United States Patent Application Publication US 2007/0105122 A1 - sequence listing, part 8

SEQ ID NO: 16295 - DNA, 1898 bp, Homo sapiens
  CDS (14)..(331)
gctcaaatatattatgctctctcttgactctgtgcctttgcaagtgacattcacttggcctgaacactgttccagctccctctgttctttccaggtgatgccttctcgccttccaaatctcagtttagacgtgctcttctctgggaagtttattcatttactgtgtgttagatgttgttctaggccctggggatgtagcagagaagaagacaaagtcactgcatttggtgaggagctgtcatcttcagaatcaaaacttccccctagtgcagtgtccacctccagatactgcttcatttctctgctctctttgttcatgaaactttttcaataattgctttttcatttcttcatctccagtttttatctaattccaatttagtttctctctccatgactctgctcacactgatttttctcagacaccaacttttttttgccgcctaatacaatcgccatgttttttcttcatgttatttgatccttttagtggcactgggcataaatgaccacacgtttcttttcgaaacattatcatgacttttctgatgccacattctcctggcttttcttttgccccacaggaattcctgtagacatccactgccttactagatgtagggagcacctcagggcccagccctgtgcccactcctctctttagccctcatacttttcctaagtggtaccatctggtcccttgcttgaaatgccaaatgtgcattaaatgccaaaatgtatatcttcagcccaacctctgctttaaccccagcaactgtatgtccagatcctttttctcccttaatggataaggataaagaatcatatgaggatgcttaaacaaagtaggagccaatgcaacatgtctttaaatggagggaacagatttcaggttcctaaggacagcattgatgattctacccaagtgtactgaagatttctagcaggcgtgagatgctttcctttaccattccaaagtgttgtcgctgggactttgctaacttgcctctaattttttttttaaatgaatatatcccttgttcattagctacctattgaacataaataacataaatgagatatcatgtcacaccagttagaatggcgatcattaaaaagtcaggaaacaacaagtgctggagaggatgtggagaaataggaacacttttacactgttgatgggactgtaaactagttcaaccattgtggaagacagtgtggtgattcctcagggatctataactagaaataccacttgacccagccaccccattactgggtatatacccaaaggaatataaatcatgcttctataaagacacatgcacacatatgtttattgcggcactactcacaatagcaaagacttggaaccaacccaaatgtccaacaatgatagactggattaagaaaatgtggcacatatacaccatggaatactatgcagccataaaaaatgatgagttcatgtcctttgtagggacatggatgaagctggaaaccatcattctcagcaaactatcgcaaggacagaaaaccaaacattgcatgttatcactcataggtgggacttgaacaatgagaacacttggacacagaagggggaatatcacacaccggggcctgttgtggggttgggggagtggggagggttagcattaggagatatacctaatgtaaatgacgagttaatgggtgcagcacaccaacatggcacatgtatacatatataacaaacctacacgttgtgcacatgtaccctagaacttaaagtataataaaaatatatataaataaatgtaaagagactaatgtaaaaaataaataaattttaagaagagaattagctacaaataagaaaactaaagttccttagaacttaaaaaataaatcttcat

SEQ ID NO: 16296 - protein, 106 aa, Homo sapiens
MLSLDSVPLQVTFTWPEHCSSSLCSFQVMPSRLPNLSLDVLFSGKFIHLLCVRCCSRPWGCSREEDKVTAFGEELSSSESKLPPSAVSTSRYCFISLLSLFMKLFQ

SEQ ID NO: 16297 - DNA, 2409 bp, Homo sapiens
  CDS (152)..(493)
aaataaaagcatattttgagggaataaagaagcagaaaaacaaagaagaatctggggaagatgggcataaatctccaccaagtgctgccaaggcttcccaggcgaggctgctgaaaagaccctgtggaggtagagggacaatttgtcatggatgggaatgggcttgagggccgggaagcagggcatgatggggcctcattcatcattttcccgttatcccagcggcgtgcaggggagcaggtacagcacctgccaagtgagtgaccagagggggactgggaatggaaaggacctcaaggaaggacaagctgagctctgggaggccacctcctccaggaagccttccctgattcatccttcacaggcagtctcaatttgcagtcagatatccactgctctgattcttagatcggcaagtatctccctacccagactgcaggctctgctggggccgcggctgtttctgacttgtgcacaatggcatccctgtacctagcacaggactgagtccagagaaagtgctcagtgatgcttgttggccttgtctctcctctgtgggcagcactggacagggcacccggcgggtcctgagggtgtggacatcccacggcagagcctgcggttgatcccgaccatgaaccaaggcctggggcgggggtggccacatcaggccacttctgccaggagagatgtggctgtgagctgggggtctggcctgtccccggaggcattccttgggtttgcatccatcagaagatccactggttgcctctatttgggcctggagcagggatgggatttttccaaggtacgtggggtctaggggagacccaggcccattattagggtcggtcttgagaaggcagagatcaggccaccactttatttggtgtagctcctcgctccattggtgtgtgctgagtgaatgaatgcatcagggactcctgcttcctgcccagagccccctccgcaccccacacagccttgctccaaggagaaggggtcagagccaactggacagtgctacagcatggggagcctcgaccaggcttggccctcgacgatgggataggcagacagccccctgtgcaagggagctagcttgcagggtcccgagaggccaaaggccctggtctttcctggggcaagaggctgctgagaaggtgcacagagcctgggtgcaggaaaccatccagaatgctgcttcccgccatctgtgagatcttcgttttctctaacactcaaaaatagatgtttctgttatgctctctcgttggcaggggagcggcaggacctgccaaggcctgggggagcccgccagcctgctgagttctactgtacaaacagttggggagggggcgctgtctctgttaagttgaaattccccgatcagtaaacatgccaatttaaagtgtaattaactcaggccggaaaaaattcagatttggactgcttttcacagttgaggttgtttttcttttatttatttatctctttccgggtgtggtggtatctgtggctggttttagccaggaaaaatagaagggggaccgggtggggagggggctggttgggagaggaaaggctggaaggaaaggaagagaaacgggcgggtggcctgacacccagcagccaggtgtctataggttttctgtcctgggagggggctgtcagggtgatgcccgcctgcagagagggggtcattctgcgaggttgggctgcagacccctgtgccagcgggcctggtgattcggaaatgatggggcactgtggagagaccccaggaaaacacccagtgctgcttttgacattctctctccatctcccctttcagcggctgctctgcctgggataaacacatttcaagagtctcagtccccgctttgccaccatctcctcctctgatctcctttcctgcttcaaaagactccagaatcttctcggttctcagagaaggctgaatccacctatgacctagtgggtgcaccctgtgccgaaactgtttaccttctggtccccggagccatgggtcacgacctgggcctcatgtaggcccgctcctcagcagaccccaatctgcggcttctcccacctcactggggaagaaggagagccctggggatgtggagaagccccccccccgccaccacatcccccacatcttacagaatctcgattgaatccccgggggcacatccctcagcaggacagcaacagtctttgccgcggcctggggagggctgtgctggggatgagcgccgagtggccgtggactaagtgaaggaaatgaccatgctcttctcccagctggatggcgaggccgggcaggaaccgcggaattcctgctcttcgttttccaacactttgctgtcaagctatttgaataataaatacacattataaaaatgt

SEQ ID NO: 16298 - protein, 114 aa, Homo sapiens [sequence omitted]

SEQ ID NO: 16299 - DNA, 1220 bp, Homo sapiens
  CDS (52)..(1146)
tctgtcgctgactccgcgccgcgcgccgaccgcgcgcccgcccagccggccatgcacgcagtgccgcgcggctttggcaagaaagtgcgtgtgggcgtgcagtcctgtcccagccccttctcgggccaggcgtgcccccagccctcctccgtgttctggtctctgctgaagaacctgcccttcctggaacacctcgagctgattgggtccaacttctcctccgccatgccccgcaacgagcccgccatccgcaactcgctcccaccctgcagccgcgcacagagtgtcggggactcggaggtggccgccatcggccagctggccttcctgcggcacctgacgctcgcacagctgcccagcgtccttacgggctccgggctggtcaatatcggcccgcagtgccagcagttgcggtccctgtcgctggccaacctgggcatgatggggaaggtggtgtacatgcccgcgctctcagacatgttgaagcactgcaagcggctgagggacctcaggctggagcagccctacttcagcgccaacgcccagttcttccaggcgctgagccagtgcccctcgctgcagcgcctgtgcctggtctctcgcagcggcaccctccagcccgatgccgtgctggccttcatggctcgctgcctgcaggttgtcatgtgccacctgttcaccggggagtccctcgccacctgcaagagcctgcagcagtcgcttctccgcaggtggggagaggtgacaggaaggaggccccagctgttcacagagttgcgagaagagccatcagccaggacgtctcgagccactgggcgccgacaaccctgcttgccagactctggggtagtctgttgtccttgcggtcggccgctggctgtctcaggaataatcctggttggggtttccccctctctggttgtaaaaacaacttgtgtttatagagtactttttaaaaatttagactatgcatcaatcttttttcttgtttgtttgtttgagacagagtctcactctgtcgtccaggctggagtgcagtggcgggatctcagctcactgcaacctctgctttctgggttgcaacctcagcctcctgagcagctggagaatgaactggagatagggttctcatattgttttgtaatctgatttttaaaaatgtaacactacaccgtggagtcctcttgtgtcagtaaataaagccctaagtgattattctc

SEQ ID NO: 16300 - protein, 365 aa, Homo sapiens
MHAVPRGFGKKVRVGVQSCPSPFSGQACPQPSSVFWSLLKNLPFLEHLELIGSNFSSAMPRNEPAIRNSLPPCSRAQSVGDSEVAAIGQLAFLRHLTLAQLPSVLTGSGLVNIGPQCQQLRSLSLANLGMMGKVVYMPALSDMLKHCKRLRDLRLEQPYFSANAQFFQALSQCPSLQRLCLVSRSGTLQPDAVLAFMARCLQVVMCHLFTGESLATCKSLQQSLLRRWGEVTGRRPQLFTELREEPSARTSRATGRRQPCLPDSGVVCCPCGRPLAVSGIILVGVSPSLVVKTTCVYRVLFKNLDYASIFFLVCLFETESHSVVQAGVQWRDLSSLQPLLSGLQPQPPEQLENELEIGFSYCFVI

SEQ ID NO: 16301 - DNA, 1644 bp, Homo sapiens
  CDS (273)..(1643)
tgggcagcagcagaagcagcagcagcagctccagcttcttccctccctccccaaggagaagagttccctcctcctcctcctcctgcttctcctgctcagagttcctgcctccagctgccaggggggacagccagccagcagcaggaggggggctagagagctgaaggagagccagtttccccaaaattgctgcagtgagaagaggagtttgttactttaaacagaggctgaagaaactatagaattagcagagaaagtggagaaggtagaggatggagttgcagactctacaggaggctcttaaagtggaaattcaggttcaccagaaactggttgctcaaatgaagcaggatccacagaatgctgacttaaagaaacagcttcatgaactccaagccaaaatcacagctttgagtgagaaacagaaaagagtagttgaacagctacggaagaacctgatagtaaagcaagaacaaccggacaagttccaaatacagccattgccacaatctgaaaacaaactacaaacagcacagcagcaaccactacagcaactacaacaacagcagcagtaccaccaccaccacgcccagcagtcagctgcagcctctcccaacctgactgcttcacagaagactgtaactacagcttctatgattaccacaaagacactacctctcgtcttgaaagcagcaactgcgaccatgcctgcctctgtggtgggccagagacctaccattgctatggtgaccgccatcaacagtcagaaggctgtgctcagcactgatgtgcagaacacaccagtcaacctccagacgtctagtaaggtcactgggcctggggcagaggctgtccaaattgtggcaaaaaacacagtcactctgcaggttcaggcaacacctcctcagcccatcaaagtaccacagtttatcccccctcctagactcactccacgtccaaactttcttccacaggttcgacccaagcctgtggcccagaataacattcctattgccccagcaccacctcccatgctcgcagctcctcagcttatccagaggcccgtcatgctgaccaagttcacccccacaacccttcccacatcccagaattccatccaccccgtccgtgtcgtcaatgggcagactgcaaccatagccaaaacgttccccatggcccagctcaccagcattgtgatagctactccagggaccagactcgctggacctcaaactgtacagcttagcaagccaagtcttgaaaaacagacagttaaatctcacacagaaacagatgagaaacaaacagagagccgcaccatcaccccacctgctgcacccaaaccaaaacgggaggagaaccctcagaaacttgccttcatggtgtctctagggttggtaacacatgaccatctagaagaaatccaaagcaagaggcaagagcgaaaaagaagaacaacagcaaatccggtctacagtggagcagtctttgagccagagcgtaagaagagtgcagtgacatacctaaacagcacaatgcaccctgggacccggaagagaggtcgtcctccaaaatacaatgcagtgctggggtttggagcccttaccccaacacccccccaatccagtcatcctgactcccctg

SEQ ID NO: 16302 - protein, 457 aa, Homo sapiens
MELQTLQEALKVEIQVHQKLVAQMKQDPQNADLKKQLHELQAKITALSEKQKRVVEQLRKNLIVKQEQPDKFQIQPLPQSENKLQTAQQQPLQQLQQQQQYHHHHAQQSAAASPNLTASQKTVTTASMITTKTLPLVLKAATATMPASVVGQRPTIAMVTAINSQKAVLSTDVQNTPVNLQTSSKVTGPGAEAVQIVAKNTVTLQVQATPPQPIKVPQFIPPPRLTPRPNFLPQVRPKPVAQNNIPIAPAPPPMLAAPQLIQRPVMLTKFTPTTLPTSQNSIHPVRVVNGQTATIAKTFPMAQLTSIVIATPGTRLAGPQTVQLSKPSLEKQTVKSHTETDEKQTESRTITPPAAPKPKREENPQKLAFMVSLGLVTHDHLEEIQSKRQERKRRTTANPVYSGAVFEPERKKSAVTYLNSTMHPGTRKRGRPPKYNAVLGFGALTPTPPQSSHPDSP

SEQ ID NO: 16303 - DNA, 1665 bp, Homo sapiens
attagcttaaatgttacggccacttaaaaattctacatatgactattgtttaaatacatttttcatgtctctgatgtagtccttatttgacataagtattttattcactgcttaattgttagatagattatagacagctgttactaagtaatactgctccattagggcagaaacagaaactttattttaattaaatgtgtactaatgtttgagtttctatattttgctacagtgataattccagtaaaataaactgtaggcctctagttgttttagaattttaaaactgtaaatggactcagagaatcagtttcttattagacgtcatgagagtatatttttttcattatgctttaagagggaatttgtaacttgctcaggtaacattcaagttttctggtttgtgtttgtccctacaattaaacacactgaactaacaggaaaaggttacatacatttaggaacaattgcacttttaaagggagagaatgcatagttgctcacatatctcagtgtcagtcacctaacatggatcagtgctttatttgagattacaaaactagaaaatgacggagtcaaggctaggaccaatattctgttcagtcttagataattatagaatacacattaaaatcagatatttgaattttcttaattttgtaactatttgtcattgaaaggagatactaaaaaaattatatatcgtcctagaaagtacatgaactaataatgcatttctaaaggtgaaaaaagaataggtatttttctgtttaatattcaattttatagagagtagtacgttaatttttttaaaccccagaagctcaggatcttatcattttaaaagaaattatcaccagttctgtgtgagtaaataaagtattataacactttgtgtttttcatccatgataccttgtatttacttacctgagctttttttctagggaaagaaaaatgctcaggtaataacagagccttgaaaaatttggattttcaaaactacctatttatgtataggcctttagatcatctgatgttgaatactctttaagtgatctaaaggcctacatataaaaaggtatttttattaaattctggaattaaacatttcagcattacaagaaaagaaagcaaatccactggaacaattctgggaaagaaggaaagactgtgattaaatgcctcttaactacttcagattcctggattgatgtcttatctacaggcttctttttaaaaatgattggctgtgagtttaccaggattatagttgaggctaaaggacagctcctcaggaaagcccctgttctacatctacggtcacatgctggaccttgagttgtcactcagagaaaagagtgccatctaccgaaactccacagtttccattgtgaatggcttctttggtgcagagttccaaaaattatgtagcccagctctttaattttgtaacatctaatgatatcaccgccttgaagtgattaaagtagattgcttaaagaattaaagctttaaagatgaaagatgttattgcttttgctggacatgaggaacagttgtaaagtttccaggtctacaataactttctggagccctctcagtgaactgtttcttgtaaaagttttccctaagataaaagctcaatcccattgtttccacactc

SEQ ID NO: 16304 - DNA, 2332 bp, Homo sapiens
  CDS (1538)..(2050)
aagccattcaacaaatctctaggaagttccatactttcccacattttcctgtcttcttctgagccctccaaactgttccatcctctgcctgttacccagttccaaagctgctttcacattttcgggtgtctttttagcagtaccccactctcggtaccaatttactgtatttgtctgttattatgctgctgataaagacatacctgagactgggcaatttaacaaaagaaagaggtttaattggacttaacagttccatgtggctggggaggcctcaaaattatggcggaaggtgaaaggcacatttcacatggcagcagacaagagaagagagcttgtgcagggaaattccgttttttaaaacaatcagatctcttgagacttagtatcacgagaacagcacaggaaagacatgcctccatgattcaattccctcccacaacacatggaaattcaagatgagatgtgggtggggaatacagccaaatcatatcaatttctaagcaacatatttggatatttactctggaaatgtagttacaaatgagcagttccaaatagaagagtgcaatttacttcagctttgcacaaaagcaggtaaagaggtatgcctatattttgaggctagaacaactagaatatcatatttcttttcttagtggtgataggaaagcctactttcctggaccagagaagcagatgtaagtagccttaggaattgctgtgctttttctgctgccagtcccctgctcatgattatggagaaaaatgtaactgagatgcttaggtagtgaggaggcttcaaggcttagggaatgggcactctagtaaatgtgacatttagactataagcaagtaattggtgggggatgtttgtgacctagtgacatataacctgtatttgttgttattgttggtcatctgtagctgtcaatttcctattaagtatgaggtcctatagctccagtataaaatacaccaagtatgcagaggggcttagtaacatttagtgaattaggtaactaagtcttcagccccatagatcctcccaaacaaaatgcaaaatgggtgtctgttctgcagctggcaccatgatcagtctctaccatgtctgcagcctgacatgctactttgtatatgtgctactgaagagagcacagacatgctgctttgtaaaaccagtctgtgcagtaatttttctaaagaaaagttaggacccttattcttcaaagagagtatgcactgaatatatctgatgtcatgcaaagtatttttccttttagaaaaagagccccatatattgcttatctcactcgttgtcgacaaggactacagaccacacaggctcacctggaaaggctattgcaaagagttttgcgggacaaagaagtggccaatcgatactttaccactgtctgtgtgagattactgcttgagagcaaagaaaagaagatcagggaattcattcaagactttcagaaactcaccgcagctgacgataaaactgctcaggtagaagattttctgcagtttctttatggtgcaatggcccaggatgtcatatggcaaaacgcgagtgatgaaccggattttcaagctcgccttctaccctaatcaagatggggacatacttcgcgaccaggttcttcatgaacatatccagagattgtctaaagtagtgactgcaaatcacagagctcttcagataccagaggtttatcttcgagaagcaccatggccatctgcacaatcagaaatcaggacaataagtgcttataaaaccccccgggacaaagtgcagtgcatcctgagaatgtgctctacgattatgaacctcctgagcctggccaatgaggactctgtccctggagcggatgactttgttcctgtgttggtgtttgtgttgataaaggcaaatccaccctgtttgctgtctactgtgcagtatatcagtagcttttatgctagctgtctgtctggagaggagtcctattggtggatgcagttcacagcagcagtagaattcattaaaaccatcgatgaccgaaagtgaccaagaccaaggcccaccaaggcagcagactgttaatcagacaaacagatctctgagaaggtgcatcagctgctttgaaggctgaagattgttttgtatgatactgcacagcatcaggcattttaaagcagatctttactaaacaggttaatgagctaacaagcaggttctctcgtctttgggctctttcctttctgagttgcatattctattttcttgtccccaagtagagactagtactacaaaaagggaccacatttttcaagtatttctaagtat

SEQ ID NO: 16305 - protein, 171 aa, Homo sapiens
MVQWPRMSYGKTRVMNRIFKLAFYPNQDGDILRDQVLHEHIQRLSKVVTANHRALQIPEVYLREAPWPSAQSEIRTISAYKTPRDKVQCILRMCSTIMNLLSLANEDSVPGADDFVPVLVFVLIKANPPCLLSTVQYISSFYASCLSGEESYWWMQFTAAVEFIKTIDDRK

SEQ ID NO: 16306 - DNA, 2101 bp, Homo sapiens
ttgccttttaaatagcaataaacatggtgtaattggtttaggaaggctgtgctccatggagaagagctggtactacatttaatttatcttgtagcatagtgttttctcaaactatgcttagaagaatactggttcctcgaggtgttgattggtgttgtctggaaatacaaggagcttctgaggccaagtaatgtggcaaacactggggtaggccagttacctggggttaactttccggcaggacttctcagagtctttaatatgctactctgcatcataaattttcaagagcttgccctgtacctatttgtctttcccttttcatagtgctcacagggtttcatggatctcagcatagaaaaggctgctttagggtagaggcagctgccagcagtctttagaaagtgagtgatttctatttcagaaaggtaacactgagcacctgggaaggaaaacgccaaggatgagaaactagacccaaggcaacctataatgaggctgttaaaattttctaggcacaagaaaatgaggctcagaattagggcagtgaaaatgtgagggaagagatagaattgagagatgcttaggaggtagaatggatactccataaccacaaggatggtgaatgagagaataaaatagttgaaggtgaatcccaagtttctagctgggaagcttggacagagaagtgttgggtagaagatgaaaaacaatttaatttgggacatacggataaagatggtcaactcatagccagcaactggtgatactaatgaagcaaggtatttccctgacctcttcatgggtgggaactggagtgcatgggtgctagaactagctggccactttggtgctggcacgggtggactccactctcttggtcctgctgtgtttcaccccttgtgggagcggggggagaacaggtgagtgggtgcaggagccagggagagtgcttttgggcactggcaggagctaaactttgtgcaggcccttcagcagcatctaggggagtgcccactacctctaaagcttcagaaggagtgccacagtgctcctttagctttcctgtctgtggatcacttaagtgttaacggctcagtggagggtcagtgtgacagccttttgcacctgcactcgtggcatctgaattcttgtctggtatcctgtagtaatgaggtcgcatgaatgaattggtgatggtaaatgtgggggattttgttggtgaaagtggctggaaggggagctgaaaaggggaaagagcaggaaggtgaacttcccctggagtctggtcatctccagctggactccttccaaggctacactgtcaagctgtccctctgaagtcatgctgcttctctccagtgtccaaccatagtttttcctcatccagcttcttttcctctctctgctggctgagcctggggtttttatggtcacaggatgggggacggggtgggccatgggtggttttgggagaggcaacattcaagagggacaacagggatttttactcccacttttggctgcagtattaggcttttcagcttgaaggtggggccggggacctgccctcttctgcccagagtttccctggctctggtccctatcaataatctgcagttcagggcacagatgaacatatttttatctttctttgatgcttcaagtgactctattatcttgcaatgtcttcaggtcgtcataattaacatcatgttgttgactataaatgtttaacaatgcaggttgtagagagctgtgcttaatagaaagctgaatacaaattattcgttgagatactaacatgtgcctagcacagcaatactacgtaaagaaaaagcaagcaagcaaacaaacaaacaaaaaagggaaaaataaaaagacatatcccttgcttaatttgtttattatcttaagcctagagaaggtattacaagtggtcagaatagcagtgttaagattctgacctttcacttgctatgtgacctagggcaagatacataactttttagtgcttgggttttttcatttgtaaaatattatttgtagattattagtgtctttctcattaaggagttatgaggtttagctagggttaaac

SEQ ID NO: 16307 - DNA, 2106 bp, Homo sapiens
catatttgtgtaaaattttactgctttcatttgtttttctttaaatagaccatctttaatatatatgcattctttttttttttaaaaaaaagaagcattttaaaaaaggaaacatttcccttattatcttgtcacttgccaaaaatagaaggtaacttaaaaataaatgcaatcaaaccaaaacgatgccattacattctagctagagttgtatcataatatctcacaaaagagattgtgaagcagagcagatgtgttaaaacggagatgttctacttggtgtgtcaaggatttaaagacttggaaaagaaagaattatctcactatgtaagttaatatcatttgacaacctcacctatcaaattacctataaaccaccctatgtcatcttatgggccactgctggtaagagtcccagacattgggaaacaacgtggtcagaaactttcaacatgaagctttcaatatgatcaagctggatggttgcgggtgggagaggtatgaagcagtcatcaaacaagacatgctttttggctgaaattcagtggtatttttgttaccaggattcttagttttcagaatgaggtaccaaatgtatttttgcaatgttttaattcccttccttaggtaattcttagtgacttatttgggcaacattagtgttgctatatagaataagtttcattttagatgacgtggtctttctgtgtctgttgtgctcttcgaatgacccattaagcacattctaggtttcagcaattgatttgtgtgattttctgaccaaatggctcaggtaattggaaattgagtagactctgattttctctctttgaggaatattcactcttccctataaaacaatcgggtctttctcttccattattctttcaaggaattggttgtcaatcttctcttcattcttgccagcctgtagattttgaaaccaaaagagcctatagcttgaaggtagaggcagccaacgtgcacatcgacccgaagtttatcagcaatggccctttcaaggacactgtgaccgtcaagatcgcagtagaagatgctgatgagccccctatgttcttggccccaagttacatccacgaagtccaagaaaatgcagctgctggcaccgtggttgggagagtgcatgccaaagaccctgatgctgccaacagcccgataaggtacagacggatttattttaagagcttggatggggaattttagagtcaagaggttctgggaaagccctgtaggaaccacgtttttcaatttcaaaaagggttcaagtttatcaggttcaatagaatgtaaacaagattaagatttagaagacatgaacttcccttcacctctgttcctgactttttggataggattgttcaagctacatgactttgctctggagcagattcccccaggcatactaggtgacggagccctgagctgggcctgtctgcctcaggggactgtggggaaatataaataattattgtgaaataattatagtaattgcaatttattaaataccttcccattctctggttactctatgaggaggttaggtatgtgatctaatcaatcccctcaacttaatcgatgtataaattgctagtccttaaaatgagaggaaattggaggcaatgcaagacaaagtgacttgcctggaatgatacagccaccgagcaggaggcaaggaaagccagctctgtctaactgctgctgagtactttgtaaaagtagtaaagtgtccaaataaatttcaggtgattttattattatgaatacctttttttgtgacaaaaaatgtgatccagaactgtggctgggcaccgtggctcacatctgtaatctcatcactttgggaaggctaaggcgggtggatcacctaaggtaaggagttcgaacccagcctttacaatgtaatgaaaccctgcctctactaaaaatacaaaatttagctgggcatggtggcatgcacctgtaattccagctcctcaggaggctgaggcaggacaatcgcttgaacccgagaggcagaggttgcagtaagccgagatcaagccactgcattctagcctgggtggcagagtgagaccctgtctcagg

SEQ ID NO: 16308 - DNA, 2606 bp, Homo sapiens
ctaaatatagttccctcctcgggacaacaaagaagccatcctctgaatgactgcattccccatggccagcttctgggctgtttgtcagattcccccagcaggatgggagggaggagtgggggcaaacaggagtggccagggctggagaggagctgctgaagtccatgcagcagggtgctgtcttccagccatatgacatttgggcccagacgctcagtggctatggccttgaccgtgagttcctgccttctgtctctggggatgcatggggcccagagccctgtcccgggcaggtgctactaagttgtgactgaagaagaggagagagaaatggtgatctccccagcaggaaatgaaaagtgtctgtcggctccagtccagtcaagctgggtgacctctgggcagattctatccttaagtctcagtttccacatctgtgaagtagggataaggactatgtcaaggagactagagagaaattgtgccaggtggcgggcactagtggtcctatctggccagggctctgtgcctgcatgtgatggattgcaggcatagcctttgaagtgctttttgatgtgcctttcacttcaggatggagtccctcttctggtcccagggctaagaggtagatagaggccctgcaaggtactcattccttactaaaacaagaccccaagcccagagcccctgccttccctcccaggcctcttatttctgatctcagcttctcagccatccagagcccagttgggtgctgaggcccctttaaaaagcccagagcccccgccttccctcccaggcctcttatttctgatttcagcttctcagccatccagagcccagttgggtgctgaggcccctttaacaccttggctcaaatgtggacagaacccttgagcacagctaagagcaattagaattatggaaaagaaaaaaacctggatttctcagctcagggcctgtctgtgcttggagggcactgacacatgtcctctccacccacccactcagttctactaagggtagagggcctgacctcttcctcaggtctaacaaacactgggaaaggtgaggccagcccctactgctagcggtcttcaggagagactcaatacaaacagctttactggatggagagcctggcctttgtacaacaaaaggtcactctgccccaggacttgcctggggtggacatacaggccacttcccacctgtttgacaccctcaggatgtagataagtcaggactagatgtttgatccccgagtgctgaccaggacagagatgtcaagctttggtggatgccttaaggccctgttgatttagaccttcctttctgctcacagactggccccctggcaggggtgcaccatagcgggatcagacattggatgtgtggaggagcagatgcatagctatctgttgctatggccaccgttcaccaagcatgaactctgtacaacagccctgcaaaacagctcctgccttcatctttgtttttaatagaggtagagtcagcagcccaaggtttcacagctgttaagtggcaaaactaggattcagtttgtgcaccttggagtccggaagtctctagtatgaccacaattcttaaagagtgtgttcctgctgggaatggcagttgcacatccaactagacaagctggtgggctcgattataacaaaagcctcaagctttcttgaggggagtcatgtggaactaacctaccagcactccttgctgataccccaaaggaaaccagtagctttggtatatttaggtttttcaaaggtttttggcaaagttccatgccaaaattttttttccgtacctagaaaaacaattaagtttgaagggaatatgctttgtcatgcataggagcctgtttagggaaaggaagatattcctaaggatgaaaatgcacccgtcttgatggataattgtaaacagcagggtcttataggaattgatgctagaagaatcttagctcatatttttaattaaagatctgggagaggaaatgtatagtgaaaatcgcaagtctacgaaggcctttcgggggaatgagaagccaaattaatggaatgtatgttttttgctctagttctcaaaccattgctaatgatctgcattttgttggcctgtttgccacagtaagatgcaagtgctttcacccactcaacacatatttattgtgcgcccatgatgttccagccacagtactggccacaggcatgagtgtggtattattctgctttacagaagggctttacaaaagcttatggtttcaaaatttccctgcttttgtttatggttctaacccttgcttgttttagaaatcattatgcaaagaacaactgcattctttttaatgtctgcatggagggatttttctgtgaaatgactgtacaataatcagttccctctggttggacatttttgttatttctggattataaataatataacgatatagccttaaacacacttgttctcagatatttacatatatggacaagtgtttctgagggtagtcaccaggaagggaaatgattgggtcaaaggacatatacatttaactatttgatagatgctgatggattgcctgc

SEQ ID NO: 16309 - DNA, 1652 bp, Homo sapiens
tagttcaactttaaatttgcccacagaaccctctaaatccccttgtaaatttaactgttagtccaaagaggaacagctctttggacactaggaaaaaaccttgtagagagagtaaaaaatttaacacccatagtaggcctaaaagcagccaccaattaagaaagcgttcaagctcaacacccactacctaaaaaatcccaaacatataactgaactcctcacacccaattggaccaatctatcaccctatagaagaactaatgttagtataagtaacatgaaaacattctcctccgcataagcctgcgtcagattaaaacactgaactgacaattaacagcccaatatctacaatcaaccaacaagtcattattaccctcactgtcaacccaacacaggcatgctcataaggaaaggttaaaaaaagtaaaaggaactcggcaaatcttaccccgcctgtttaccaaaaaaatggaagcaaacagaacaggctgatcttataaatgagctatatcaaggcaagctgaaggactacgtgagatgtctggaatgtggttatgagggctggcgaatcgacacatatcttgatattccattggtcatccgaccttatgggtccagccaagcatttgctagtgtggaagaagcattgcatgcatttattcagccagagattctggatggcccaaatcagtatttttgtgaacgttgtaagaagaagtgtgatgcacggaagggccttcggtttttgcattttccttatctgctgaccttacagctgaaaagattcgattttgattatacaaccatgcataggattgaaaagaaattcttggaaccagccgtaacccagtaaggaattgtgaagttgtgtttttattttgtttcattttttgcagagtattaagaacattattctggaacatcagaacgtttcccttagaccgatcccagcaggtggcagctcagattgctgcagtgttgtaattataactgattgtacttaagttatggatgtagagaatatgtttcattcatttattcagcatgtaaataaaattgatcctgttgagttatcataattgcagttcaactatctgccatgattattcttttcacgtatcattcattctgtacatttgtgtacattgagaagtatagcaatctatgtaaatgtaatcctcagtgaggttcctcagtgctaggtcccataggattgtcgttgcccttgttaatgaggtttctctgttcagcggcttcaatttttttctctttgtacatctagttttgaagatttacttcaagtttgaatcttctagaatgcttgtaagtccagttttaatttttagagtcaatttgtagttacatgtagtttaacttttgggaaacgtcttaacattgttctgaataaacttgctaatgaggtcaggtcatggtacagactgatgcagtcaacatgatttcattgcagagtttattagtatcagcaagtttttgctttgctaaataaaagtactcaatgaacacaattctacataaattttgacataccatctaatttataaaaatcaataaaaaaggttttggtaaaactttttcatgccagatgctgtttacaacaatgaacatgccaataaaacatttgttcattc

SEQ ID NO: 16310 - DNA, 2036 bp, Homo sapiens
  CDS (569)..(901)
tacaaccatccattcctctgcccttcctccattcatccacccatccctctgtctattcttccattctttcctccatccacctattcacccatacaaccttccatccccccatccatccaaacatccatccatccactgaacaaatccatggcactgccccactggccttcttttatttcctctgtgaaccccttctctcctacctctgagccttcacgtacttcccctcccattcccatatacacccctagggaatacctactcagcttaagaaaagcctcacctaaatcccagtctgaagtaggtcctcctgctattcctctcctgaagaacctcattccctccttttcgacagttgtcatagacatcaccaaacgtttgcttttgggttgatttacttattcctgtctccctgaccagactggaagctccaagagggcaggcattaggtcttccttcagtgcctaccccagagcctacctggcccacagtaggggctccatagggaagtggtgaatgctggcattgagtgaacttagaaagtactgtgtgcagggcacaggcccagatgtcttgtcaggatttgcttctgaatgtgactgcctctcaaggcttagcatctatagaaagagataaagaatgtgtatgcaggattgcaatgcaggatgcgactcaggaaggaggcagggagggatggcatggggagggccagggtgaacatggactgaacctggccctcagtgttcacagctgcataagccactcgatctccatgggccttcatttcctcaccagcaaaatggagctaataaaactagagaggagaaagaaacactattaccataaaattgctttaaattgttcaaatatatcttctgagttctgtgaaaagttttttaagtagataaaattattttaagaactgaaatcaatgtgattcattgatgtaattttttatagacagagccaagtaatggaaattaataaacaactaaaaacatatatttatttaaattgagattgtcatgttattgtaaggaccatgggaaatctacctagaaagaagttcttggcagggtaagtgctcaactgctctgtttttgaattctatttgaatggttttgggtaaacttcattgaggaggtgatgtttaaactaagctgtgaaaaatatgtaggcttccaatattttaacactacaaatattagatacaattttttaacacttttatatactcttctagtttctatggctatgtaacaaactaccccaaaacataatggtatactgcaatcatttatcatgttcacagattctgtggctctagaatctggacagagaatagcaagggcagcttgactctatcctgggatgactgaggcctcagttgaggctcagtctggggctgaaggctggggctgaagtcctctcagggcgcacgtgtttgttcacatgtccagcgttggtgctggttgtcatctgacctcagttcctctccatgtgggctgctcccacatctgcttcggctagattgagcttcctcacaacatggtgactggattccaagggcgagtatagagagtgagagtcaggtggcagctgtatcgtttagatgacctagtctcaaaagtcacatggcatcacttcctgcacattctactggtcaaatagtcacaaggtccctagattcaaggggaattgacctgtgccccatctgtcagtgagaggaatgtccatcatactgtaaaaagagtatgtgaatagtagcaaaatattgatgcagccatccctggagagacacagcctgacatacacatatcatctcatgaaatactcagtacaatctgtgaggaaggagcccttcttaactccattttatagaagaggaaattaaggcttgacaaagtcaaaagttttgtcctagctgggcacagtggcttacacctgtaatcccaatgctttgggagaccgaggtgagagctttaaggccggagttcatgaccagcctgggcaacatagcgagactgtgtctctac

SEQ ID NO: 16311 - protein, 111 aa, Homo sapiens [sequence omitted]

SEQ ID NO: 16312 - DNA, 1901 bp, Homo sapiens
  CDS (838)..(1278)
atataccccccttcccccatgttcctttatctcaatgaatggcctcagtaatcctgaaaccaaggtcggctgcatcttcttcctccctgcaccctccaggagcaatccatcagtaagtcctatcagcgtgacaccgtgaatgcctctcctcctcgcttccttccagttgcccctgcctggtcacaggcctcatcctccctctctggcccaattggatgccctctgcttgcttgcctcgtctctgactgtatcctgtgggtgacatgcatgcatacccggtaccacttaaaccccccatgggctccaggggccccacttgtggtgtaccaagccactctatccccttggccctgtgtcccttccttttcctctcttgctccagccttacttgtaattcctcagttcacacctccatcatgtctgtgagtctcaagatctcctagcccttctccagacctgttcaagacacccctagcccttctccagacctgttcaagacacccctagcccttctccagacctgttcaagtgcccctttcatcactccccatgtgcagttccatagttgtccatttcacattgacttccatgtatctggagggcaggagccagctctgacccaccttgccattcccagagtaccctctcagtgaatgtggatgggtccccctgccttgttaataagtcatgtgattgagcagattgtgtgacttgcccctcttgtcttggaaggtcatcctgcccagagcttgtgaaggtgcagtggcctgagccaggcttccaagaggacaaccgtgatgggctctgtgtgcgttgctgggaggacttttcaatgtgatggcagcctgggggaagacagtgtcaccacgacagtgtcacggaacatgcaggaaagatactgatctctgttcttggttaagttccaagaaccatctaagtttcgtgcccctcagctgtaaaagggaagtacatttcatttgtttattctgtaaaactctcggtgtgtgccatggccatgcactgatgatgagcacatgtgtgcggcccctgcccccgtggagcgcatgcatggtcctccagccagagaccgcgctgggagaaatcaggggttcactcctggtcggaggtgagcatctgcctctgcatgcaggaaggcatctcatgaaaccccaaaggcctggcagcccctgcacatggaaggagtcactctcctccatgtggggtgagccacgctggccttgtggcattcacgtgttccctccacctgcttctccagcgtgaaggggacctcaatgtcctctgatgaccttcttgaagagagacacttccttccttcattggaggctttagacggagccagtgacagctcagctctggctgtttcccatctgtgaaatgggaagagggaggatggcacgagtcccttgccctcaccaaactggccgctagagagaggaaagatgtttccattctgatccccactcacctccaccccatccttccaggcttctgatcctcattgtaattttggagctatttggtgatattgtctttgtccttggatccgaggcttctcctaccaactcattgttttttcaacgtgacaaaataaaagccctgagctgggcgcggtggctcacgcctgtaatcccagcactttgggaggccgaggcaggtggatgacgaggtcaggagttcaagaccagcctgaccaacatggtgaaaccccgtctctactaaaaatacaaaaaattagctgggcatggtggcatgcacctgtaatcccagctactcaggaggctgaggcaggagaatcgcttgaacccgggagccggaggttgcagtgagtcgagatcatgccactgcactccagcctgggcaacaagagtgagactccatct

SEQ ID NO: 16313 - protein, 147 aa, Homo sapiens
MAAWGKTVSPRQCHGTCRKDTDLCSWLSSKNHLSFVPLSCKREVHFICLFCKTLGVCHGHALMMSTCVRPLPPWSACMVLQPETALGEIRGSLLVGGEHLPLHAGRHLMKPQRPGSPCTWKESLSSMWGEPRWPCGIHVFPPPASPA

SEQ ID NO: 16314 - DNA, 1539 bp, Homo sapiens
gcatcattcctttaattgagcagagttaactggatcaaattatttatgggagagagaggaaaagttataaagaattatagtaatttttaatttccaccaatatactctttgtaagtgaatcactctataattactttctgttgcactgaatgcagcaacaataacacaatagtattttaaggcactggtttttggcatactctaaccttgtaattatttaaataacagccaagtttactcatgtttttgattctgtcaagaaaaaaaaaaagttcctttactcgaaagtgatggccgaaacagaatcggaaatttgttttcttgaaattacataaatacacagaaaatggcacttattagcttttgttaaaacattaccttacctaatcactgcataaaagtccagatttgtagaaaattgtaattttctcagtatctaaaactattttgctttccattaagtttctatttgctattttctcagaattttacaattaaagataaatcacaaactgtttgtttttcttaaagttctttgagaaaatgtctaattatacaatccttggacaatactgtgtttttttggtgctgtgttttttaagaagtcctacttactggaattttgactatttggatatttttgtttttaaaaggggaggggaatttgcttaatacttctaaagatgtgaattgataattgatattaaaatagaattactctcaactcaccagaattaaattttatatctgcatatttaacactattagctcatataaattataagaaaaattttcaaaggatctggttttaattttttggatatgaaatgaatttgccttttctgccttttcttaagtactattttgtaactatattgcactaactatatccaaaacacattctgagcatcactgtgagtaacagccttccagtttgtacccttttgattcacggcatggccctatagttaattaagaggtggataacttaagctcacaactgcctttaatttgatttcacatccacagttataaactttgcatttaaaaggaaaatgagacatttaaataggttcctgttgtttcacatataattggtaaaaacatattcccttgtaggatcctattatcagagcatcaaataccaaagtcagcaacttgggttgccaaataaattaggctcattaattattttgaaaagggctgctgtttccatgtaaatgataattttctttttcatggacaaggttatggtacttatctactaaaagaaacatgcataaacatagttttttatctttaacttcagtattaaaatatgcagttttttgcaaagaggaaaaacatctggttcaattacgctgaactctgactacatgtgggccagtaataatatgaattggacttaagaataaaccttgtgtttaatctctttttttccttaaaattttaatgtgagttttctgttacgcaaattatccatgttagcacatttggaacaaatgtataaatgtactttctgaataaagtcaaaagtct

SEQ ID NO: 16315 - DNA, 1886 bp, Homo sapiens
aaactagaataataaaagggaaattataatattcacaaacttgaagcacactggaattctgctataaatgtttgttatagaatagaatttggtgcagggtgaatttgatttaagagggtttaaattatatgaactgtgtgaaaacatttagatctaaggctgaaaacaattatcaactcaatgaaattttaatatggtatttcacaactgtgacttcatgacagctgttacaagtgtcaggaatggtaaatatgtactatttactaatgccaacactgtacagaagtgctttatatacaataaatcatttattactcacagcaatccttaccagtagatgctatttctatctgaggtttgtggttaaggaaaaagagtgaactgagtaactggtgtgagttcactcagtgagtaagtaccagagcgttgtcaagagaaccaagtgtagcatccttcgtaccatagtcacagtcctacagcagaaatttaagagagcatcaagagagatgcttgcttacccgctttgtatttacttgctctctgagaagtctacttctcatttatttctggaacacaattaggtaaactctatctatttcaaatgttctcttcagttgtctagtttgaagcctttgaggattagcaccttccagtttattcaagggaattggacaaagaaatgagaatgaactataggattaaaggataaaactaaagaaggtgagttagaagagtttgagttcatggcgcagatttaacataaaataatcgaataattagtaggcataaaaaggtggatatcgacctaactagtaagcatggagatatgtgtatttgtctaaaactcatttcttcatttggggaaaaaaagtattgctataattacttttcatgagaaattatcaaatttatgtatccagaacactgattattattaaaatgtttgaccagagtgggaatttttttttatcattctgaactctttcctattttattctgtttaattcaagatggtttctaaattttaattttactttgttttagaatttatatttcctttctctatgggagaaaccccagttctgtgtttgagtgtatagaataattccacatagggagaattgcagtaaacattataaccctgtaatctgccttgtatctgttagacaattagtgaatgctgttgaagaaatgagtgaatcctgtagtttttcagcaccacttttttgtgtgttaagtctcatccttctgcatatgtttctacatgtaagagattagtgcataaacaatttaactgatcaagattggtgaagatcttgtgcccgcacccatgaaagttttctatagctatatagtatctattgtatacaggccacgttaggaatgcatattttataacttgaataatgtgttagcctcttacctcttcactatattggttacctttcaaacatacaagggctgagttctttctccctttagatcttagcgtaaatgtcactgctttggggaagcttttccagcccatgcccctaagttgttttcattctgttgttctctatttggaacctcctttttttctgtgacagagacaatttaagttctccaaatatccacatgtcctcttatattttggggcttctctttgcaattagattgagcccatgtgactactggacaatagattgtaaaaggaagagacatttttggaaccacttccagactgagatggttaaaagctgttgtgccctcctccttcacttctgtttctgttgcattgttcttggaaactaggtattacagatggttgtaaattacaaaaagtagggcagtagaattcttattggacttgacatgaataagaaataaatacccttttataaatg

SEQ ID NO: 16316 - DNA, 1489 bp, Homo sapiens
aacactacaaaattttcaagcacagcctatcggccatagatagtatcaactagaggcaatgtctttagtttttattatttttgaacctggagcattttctgttggacgttacaggatcttactgctttaaatcatacattattaaaaaaaatgagggtttattctttgaattacccttttgtatgcaggagtgaagactgcttttttagttgaccattcaaaatcgttgaattttagtttttgcagactactaaaatttgcagtgactttttttttgtaaggggggtaaatgaaacatttagcagcctttgaaatcagcaagttgcttagatagtactttagattttgaaactgaatataacagtgttagaaaagtatgtgtaaggaattgtatttacatgcatactagtagtacaatacttatagctgaatttggttggcaaaagtatgttttcattttattacgactgctagtcaggtaagatatggtgggattctttctgtagtgttttcagtgtctgggcaaggggaggagctcgcctgtgttatatgaggggttaataccaataggataggaacagtttttagactgttaattgtgaattttacatttgggtcatcactgttgtgtagatttgttcacctattaaaataatgaaaaccctcatttgagtgtgtgtgtgtggtggatcataggaattgatttgtggagtgatactttcaatagtcactgaagacagaagtttggtatttggtatagtctacaacaaatgcttagtatgtccaggtattttttttttttaagttaaaccaatgttaagctattactggtaaataatttgtaattttagtgcttcgttataggggatgtgaatagttttaatgtcttgttttttcataagcagattaagatgtaaaaatgtaaaattatattaggctttgttatttttaaatacatttatggattggtacgccttctgttcacctcatttcagcttcgctgagagttggtagatttttttatgaactgtatccctctagttccaaagtgccaaaacaaattgactgtatcttaaaaaactactgcataagtaaaattaaaaagcagattgcttctcctgatcttttttgtatttcaaatggaacaaaacttttcttgtaactgtaatttgtaaagtttagatatcagtttacagatgggggaggggagaaggaaggaaatatgggtgaataatatgtgtatgtacatacatatgtgagtctgaggcccaaggatagaatactgtctccaaccttagccagctgtggccatatacttgtagggaagtttccatgcttcttcagctgcttttctgaattaccaaatcactcctgacaacacatattctgccacatgaagacgaactagaatcaatctgataaatctgagatttatcaatcaaatacatcataatttgccaatcatagtaaaatgaaaatagttttgcct

SEQ ID NO: 16317 - DNA, 1550 bp, Homo sapiens
ccaaaatccaatagggcagtcattgagccttaaagttccaaaatgatctccttagacccgatgtctcacatcgaggccatgctgatggaagaggtgggctcccatggccttgggcagttccaccccctgtggctttgcagggtacagcccccctcatggctgctttcatcatgggctggcattgagtgtctgtggcttttccaggcacacggttgcaaactgtaggtggatctaccattctggggtctggaggatggtggccctcttctcacagctccactaggcagtgccctagtgaagcctctgtgtgggagctccagacccacatttcccttctgtactgccctaacagaggttctccttgagggctctgcgcctgcagcaaacttctacctggacatccagggatttccatacatcctctgaaatctaggcagagctttccaaatctcacttcttgacttttgtacaccaccacatggaagccattagggcttggggcttgcaccctctgaagccatggcctaactggaccttggccccttttagccatggctagagcagccgggatgcagggtaccatgtcccaaggctgcacagtgcaagggggactgggcccaaaccacaaaaccttttttcttcctagtcttccaggcctgtgattggaggggctgctctgaaggtctctgacatgccctggagagattttccccattgtcttcgtgattaacattcatctccttgttatttaagcaaattctgcagcaggattgaatttctccccagaaaatgggtttttctttgtgcatcattaggctacaaattttccaaactttcatgttctgcttcctcttgaatgctttaccacttagaaatttcttctgccagataccctaaataatctctctcaagttcagagttctacagatctctagggcaggtgcacaatgccaccagtctctttgctaaggcatagcaagagtcacctttgctccagttcccaagaagttactcatctccatctgaaaccaactcagcctggacttcattgtccatatcactattagcattttggtcaaaaccattcaacaagtctctaggaagttccaaactttcccacaccttcctgtcttcttctgagccctccaaactttcaacctctgcttgttacccagttccaaagttgcttctacatttttgggtctctttatagcagcactccactcaatgtactatattagtccattctcatgctgctataaagaactgccgaccgggcgtggtggctcacatctgtaatcccagcactttgggaggccaaggcgggtggatcacgaggtcaggagattgagaccatcctggctaacatggtgaaacctcgtctctactaaaatacaaaaaattagccgggcaaggtggcaggcacctgtagtctcagctacttgggaggctgaggcaggagaatggcgtgaaccccggggggcggagcttgcagtgagccgagatagcaccactgcactccagcctggggaacagcaaaactccgtctc

SEQ ID NO: 16318 - DNA, 1845 bp, Homo sapiens
cggtaatcaaacccaattatatcagaatacctttctgaatttgagatttttgctctacattttataatgaataaggctattttttgaaggtatttcattttgaattctgtcattaacctcaaaagctttctactgctttgcggtgaaggcaaaatattcgataactcaacttaggccccactgttccccaacttcatggaggccagaagactttactttgttccataatgaaatataaacacagaacaaagttgtaaaagtagcatggatatgttgaaactttggacaagcttcttgtcctttggaatatgggatttatattcatctcctcaatatcccatgtatgcacagaaacttcagttctatttctatagacacaggaacctagtgactattgaacgtaattgtaataaaatgctgctcattgagccaaagagaagaaatgatttattaacatggggacaccaagaaaaacaaagtatgcttttattccctttgtcaagctcagttttagggttttttcttttttttatagtgacaatccatagatatagacattcctaaaagaaaaataaataattcagtagatatatgtcactgttacctgaatatggaatgaatttgatgttttttattttgttgagacagggtcttgctctgtcacccagactggagtgcagtggcatgatcacacctcactgcagccttggcctctcaggctcgtgatcctcctgcctcaacctcgcaagtagcttgggactacaggcgtgtgccaccagtcctggctaattttttgtagatataaggtctcatgatattgcccaggctgaatttgatgttatttcaagttgattttcatgtgtttgggagcttgtcttgttctcaactactacgcaggtagacagtcttcccccagagactcattagattgcaatatagaggcactttctcatttccctattgttcctaatacagaattgtagagctggagagtaccttcagttttctaaatctattctcaaacaggatatcactaacctctttagaatcattcctcagtatacatcaatttattgagaactgcctaatactcaagaaattaaatcctgagttcagtaggctgtgttccaagcaggaattattttcacttaccaaaatatctcctattacctcaaggtatccttgttgaggaatgctgaaaactaaattttaagtatcaagtctagaccatagagtgctttggtgggagtattttgattacctcctacccatcagaagcaggcagctaatattgtgaactgagtatttttgtcaaaagtcacagggaagagactacagaagaatgagaagggtcaaaaggacctagtgtggcttactacatggatcttgtctcttggaggtctgtcgtagaagaagaaacaaatagaggtgatgaagacacagaacaggctcagtcagcatcctcacccagagatggcaacatctattaagaccaatgcaataccttttcatcttcagcaaatgttgtttcatctgtttttgatccttggcattgtcaaaaacttaactgcaggtccagtgtatatttttccttatttttcccttttagctatctgctaaagtgagtaaatgccacaactgtacttttccaaagaaaaagaactattgacaacttatagcctgtcatgcaggtcatgtttcaaatcaaggctgaaattttcaacagctgtgggaaaaactaaaacacagaaatactgtacagtattagtgtttttttaaagaaattgttagtgcattattgagtatactaaatatctgtgattaaataaattagttctaactttt

SEQ ID NO: 16319 - DNA, 1531 bp, Homo sapiens
atataatgctgtattcattgatcatatttctgtatttaaataagtacattttttaaaacatcataaagtggatcagtaatgctgtaatatcacatttcatgtattatacaacatttttgaaatggagtactccaaagtaatttgcttcttatggttaccaaagtttaaagaataccctaacatgcactccaagattttaagaggaaaggctttgtgtttttcattactgtattatgaaatctgagagtgcaaaactagttttcttaggtaaaccccgtaatcagtttccacatttacctgtaaaagtcagtggagggcatacatctggaagtagtagtggcggtacacaatgtgtgttaatatgatttccaaggggtacctagagtaaactttcttaatcacagatctgatctgagcatgccactcctttcttaaaatcttttgttgattttccatttccctaaaaggaaggcccactggagcatgggccttgcaaagtcctctttctggcttctgcctgcctgccttttcagcttcatctctgccatcttccctgaatgaacttttgtcagtggcctcgctctttctacctatgagatgttgtttctgcatgttcttgcatggaattctcttcctcccaaccctgtttcattcctttaatctgtacaactctttcttatcctgaagtctttatgttaaggttgccttttcaggaagacttttaattgtattagctaattaattaattaatagtctgaggtatttggagctgagattctatggggattagttgctggagggtagtttagagccagattgcgaaggactttctaaactgtgctttcaaggttttgaacaggaaaatgatgtagactttctgttttttgtaagtttggaggatggcttgtgtcttaaaagaatatgtaacataaccatctaatttgtgagtagtggactaaggaaacaccactctaacctttttctctctgcgataatcccatcttcagcctctcaagcactgtgaaaaatcactttctcttgttgtattcttggagcccctgctaattcattattgaaaaatacctgctgcctgcatttggccttatgttgtcatttacttggtacttcctaagcgtggctactccaatgaagctttagtatatgtactgaaagaagaccctctcatactgccacagccaagagataaggttgtaaatctttattgggagaagccgtcaaggacagttctgtgaaatgaaaggatctctggatcaccacaaagtctggctcagtgactgtggctttgcaaacactaaacattcctgtctcaagtcctgtagatggcttgaaatagtatacataagcatgccttataaacatcttcagtctttatcaactctttggagattcagccattcttttttgtactttagggaattaaatcattttataatgtataaatctgagcatggccgatggcagaagaaattttgtcatacgtttttaaagaaataaaaatgtattatgtttt

SEQ ID NO: 16320 - DNA, 2287 bp, Homo sapiens
tatggatatgcttattaatgcacttgtttcaaaatcccaaattgcacaaatgtgttaatattttaagaaacaaaatgaatcctacaaggagaatgatttttagccacacatagggttggatcttgagagtgacctacagaataaaagtacttttaaaataaagtagtcagaggctattcaaagggtaaaataatcatagtaccacattggtccacttgacactaaccaatcgatcatttttttttaatcaagaaagctagattctatcagataaaatcactgcttctaaagagtttaaatctagttagaaaaagttatagaaatgtttgcaaagataagtaacagatagagtcagtagaggataagatcaaaaacaaaaccaagcaaaagatgagttcaggggagtttgccatcaagttggcaaaactgacttacttagggaagaaagttataaaacaggaaaatatgagatgaaccttgagtgatgtggaagatttagataaatggaaaggaaggagaaaatggagttctttaggtggttgtaattggaggaggaaatgaatacacacatcttgttgacttaaacccagacattcagcagctctctatacatatctggaaaagactgcacagtcacctcctgtctctcaccccaggtattacttagaattattatcatatttcccttcctttaaagtaagtaagggtgattggtgacaatatggagaactatgatttttccattaacctaataataattggtatttattgagttctgttaagcattttacatattaactcacttaagcctttcaacagccttgcaaaataggtattattatccccattttacaggcaagaaaactgaggtttaagtaacttgccgaagtgccatatacagggctcacattcagtattgcagttgcaaagctcatgatctatagtgccaagttgcaatattgtagtcaatgtcacaattattacccctttttatattccttgatatttttccatggcaaacaattagctatttcatttaataatcacctaaaacttttcagtcttctgattaaaattacgctggagtgatagaatgtattttcatgatagaaattgggaaaaaaaatggggaatgaagtttatcagcatttcagacttgttttttttttttttttttttgcaagactttgatgagattgttcacttttgtctatgtaaaatcccaaatccttgagaataaaaaagggggaggtttaagtcacttgttgcaatgccctttttaatagaggcaataaatctaaaggccataaatttagagtgacttacagaagatcgaactttggagtgtggcagagtaagggatggaaaccgggccctccagttcactatcagtagcttttgcactggtctgcccttcctaaattaagtatgcacttcaatttgatgagtggaaacagtctatctgggcagtaaccagggagctttgtgcctagtagattgcttctgttctgcacttctttggtttcccacctcaatgtaaaaaatagctagcaatgaagtccagaagttgtcaatggttcatccccagaagaatgcataatgtccaaagttgtatgtgtatgatgtcttcaatggtattaagttatttcaaattcttagttcacctacataaatcatttctaacaagcatcttcttaaccaactttatgcacagtgtatgtttgtaagtgcttctgcacgaatgtttatacatgactgtttccatagtacttatgtttttaaaaatattcagtcatttcctactataatcctcatgtatccatgtaactgactcaaaaatacttcagccacagaaagctaaaactgagcaaatctcattcttcttttccatcccctttgcatgtggctggcatttagtaatgattaataatatggccagctgaataacaggggtttgagacacaattctttctcaaaggagtcagctaagctgggtctacttatggacaaacatctaaatgtgtggaagtatctgatatttgacaatggtaaatttccacttagctagctagcattgtcagacttcaatctcctcatggctctggccgtcctgttttaagcatgataattgttggccacatctcacatagttctcattgagtgagttcataaataaacagggttttttttttttttaaagagcagccaagcacaaagtgtgactttgttgacattttatgtgactttgtcatatgttcctaacccccaataaaagcaatgttgcatc

SEQ ID NO: 16321 - DNA, 1548 bp, Homo sapiens
agtagccgggtatggtggtgcacaactgtggtctccactattgggaggctgaggtacatcacttgagcctagcaggtcaaggctgcagtaaggtatgatcacaccactgcactctagcttgggtgacagagcaagaccccatcttggcaggtgggggatgcaagaaaaatgcaaggaacagatagagataaatagaaaacatataagaagacaatcatattaaatgtacatggtctaaatacccccaattaaaaagcagaggttttaggccatatacatttaatgtgattgtcttcttacatgtttttatcagagaaataaaactatcgccttcaagaaacacaagttaaatacaaagatgcaaacaggttaaaataaaagaatggaataatatataccatgcttacgctagtcaagagaaagctagagtagaaatactaatatcaggcaaagcatatttcagagttaaacacaacatttttccactatttgcagtcaaaagtatcgttaacactctctttactctgctcaaagttacagagttcttttgtataaacattagaacacttatcacagcctgcctataatggagaataattccatgttgtatactatacaacactcttactaaagtccattagacagaaatatgtagcatttgagacaccttccaattataaaactctatgcaaacaaaaattaacaacgcagatctgagactattatattatcctgtgaaggagggtctgtctgtctgcacagttggtcctaggctggcttctgaggacttgaatttcaagagggttccctaactggtaatcatggtttactgtatctagactatggaaataatgtggcttatcctgctattctttttgtgagtctggaaatttcacacatgctaggcagagtacacatatgtgaccagccaagataaaaactgtgtttcttgggaagtcacataggttgttgtattttcattaagggggaaagaaggtagtctgtgtgatcctcatggaaggcacagcacataaggaagccggtacatggatttttccagactctgtcagtgtcttttgccattgagatctttctactatatatccatactatgttacagtaataaatcttagccattacaaccctaagctgatcccatgagtccttctagcaaatctccaaacatggaggcagtcttgtggatccctgacacaaatatagtgttgtgatctcttaaggtttatccttcctcttaaactataaagagctggctgggcacagtggctcacgcttgtaatgccagcactttgggaggccgaggcgggtggatcacgaggtcaaaagattgagaccatcctagccaacatggcgaaaccccgtctctactaaaactacaaaaattagctgggcgtggtggcacacatctgtagtcccagctactcgggaggctgaggcaggagagtcgcttgaaccagggaggcagaggttgcagtaagccgagatcgcaccactgcactccagcctggtgacagagggaaacttcatctc

SEQ ID NO: 16322 - DNA, 1661 bp, Homo sapiens
aaaaaaaaaaaaaagaaatacaccatccaatcagaacaagtctgaaataaacatgttttaaaagcctgtaatgacagagaggtggcaaaaatgaagaggatgctcaaatgaaaaggaaaaagaagtttaggaagaactacctgaagccaagagacctcttactttgtccaggtgggaaactgaggcccagagagggaagaaagctggtcaaaggtcacacacccattggaagctgagtgagtgacactcaggaggtgaggattccatgggaagagcacctagaggtgattctcccacctgcagctcctgcatgggctctagaagctggtttaacacatgactcttctgagcctttgcctcatctgtgaaatggacacaatgacaactactacggggtggtggtgagcagaaggcaggttatcctctggcgtgtgagatactcagcccagtagagtgttagggactcataaaggcttgctattagaaattagggccccagtctcctaggacagggttttgttttgtttttgtttttgacacaaggccattgctctcctttaaaggtttgggttgtttgtggcagggatggggaaaggatctgcccttcccaggccctgccgtgcccagcacacctgccatgctgaatctcccctcaccctcgcagggaccctctgaggagggtattcccccattttgcaggggagggaattcaggctcagaagtgaacactccagaacttgcacctgcccgtgcctgccgagctgtgcctcttctgttgtgcatgcgttctccatcccaggtttccttagcctctgcatcttgaatcttcacggagtgccctcgggcttagcttctgacaggcctcatttcaggggttgtcctggcatcatgggatggcgatgccctcatttccccaagatgcagtggctcagacacattggtggatgtggccaaggtcactgtccacttggttcgatgctggctgtgcccctgctggccaagggaccttgaaccagctgcctcagttcaccaagctcccatttccttctccacaaatgggtgctggagtgatacccgcctcagggctgctgtggggttcatgtgagatcctgcctggcccagagggagcacatgggaagtggattactccatagtgttgtcggcgttatttgacaggagcgaacctcgggtcttccagcaggatctggtcatgttcccattgagcagaactagtctgaggctcagttctcccactctgtacctgggtggtcttggtcatcttaattggccctgcaggactacagtgtcttttttcataagatagtcataataaaggctcttttcttgggagatttttgtgaggaatagtaagatcaggcctgtaaaattttcatcgcagtgccctggcacatagacgacatccaataaatggaaactattatgttttgattgatgatacattcattccgatactttacaaagacgtactgaggcctgctatgtatcaggcacctttctaggcactttggatacatcagtgaacaaatgagatccaaatccctgaccttgaggaccttggccttgataaggggagacaggcagtcagtaggaaataagcatattaaatatatagtaggataggtggtaagtgccacagggtt

SEQ ID NO: 16323 - DNA, 1746 bp, Homo sapiens
gatttagaggtgtggaaaatcttttaacggggagatcctgaaacacggaaacatggcagggaagttagaatttcctgatggtcatttttaacattttaaagtttactttttggttgttgccatttttctagaatccgtgtcttttttggggaaatacagtcctttgaggactagaatttaatgatttctttacacatctaggattttttgagatttagaaaggatatggctttattcctaaggaagtggaggcagcagtttctaggatactctggtttcaaggcatgctaacttggttgtgatgtctaacccattttggtttacacagtctgaccactagcacaatgcctggcacatagtttacaaatcatttaaggcaagcttaccatcttaagacaatttaatacatagaagtgtccctcctaaaaatctgagtttgatttagaaatccagttatacctgcaggtactgatgactaattccttctttgaagacaaaataagcagctgtgtagcttcagtggctctcaaatggataatagattcagtgtatactcgctttgaactttcctgttttttgatcagctagataaatgactttagtgggtaaatgtctgcctccaaaaccaaattctgaccctgatctaagtattctactgcaccgctgtcactggaatatcaaagttggccctcagactggtgcctggttccttggattggcttgagtattgaggtctgtctcatcttactagggaactaaaatgatgttgattgttttgtagagaattgtaattagagatctgtaggttcttaattcttttggaattccattctgaaaattttcaaccttatggtgttggtggagtgctcatgtgaagagtgaaactgacttaagaataaaagaaaaagtgggcaaaactaatgctaaacttgagaccattgggcagaaatttgcctgtgtgtgtagagtaattggtcttgagtcaaagtaactatgcttatttttaacatcactgaatattttctagcgttacactctatataggcttgtagaaataaacccaggggtaagcccagaaattgaatatcagtcctaaagaaagcctatcaagagcatcctattctctttaagagctgctattcgaatttaggactgggctggtttgctgctcattctctcgaggcataggcagccacacttgaattttgccaagtatgcagataattccaacttgtagtcaggatcatcaggtaatagcattataaggggagctgtacagactgtatactttctacagtttgttgaaatagaaacatttatatggatacatacatctgcaaaggttagggagaaaacggtagccctggcagagaagagctagttagtgtatttcaggatagggccgagggaagctgtcatttctctactaagtctcattgtggaaaagccacaaatgtccctagtacagtaataaggaaaaaaaggctgagcgtggtggctcacacctgtagtcccaggactttcggaaggattgcttgagcccaggagttgcagatcggccaggacaatgtaagaaaaccccatgtattagaaaaaaagaattagccaggcgtgatggtgtgggtctatagtctcagcttgggaggctgaggtggcaggatcgcatatagcccaggagttcgaggctgcagtgagccatgatcgcatcactgcaccctagtctgggcaacagagtctctaaaaagg

SEQ ID NO: 16324 - DNA, 1446 bp, Homo sapiens
gatagataatagtgtaaaatggacttgccttgcttctactgatgtttttcacatgtttcccgtaactgatacttttcatcagttgtggaattcccataattgcagggattccttttctgtccttaggatcccctgaaggccttttaatcttgttcaccaaatgtgtgttccttgctgacacaaaatggtctctaccatcagtggtggtactcttttttccccctttgttcaattcaatctcaggaacgtatttcctacattaataaatatttactgagcacctaccaaatgccaagcactttcctagaacaaaagttcttttgaaacaaaaaagtatcttggcagttaaggcaaaatgacctaaagaagttttaaaatgaaaggtctcctatatttcagggtctttgagatgaaaccctgcaagtagacttacgtgaatgatttttgctgtggtaagtatacaaatgcagtgggagttgccagactttaaaagacgtgaataacaatcatataaaatgccagacattgttgtggaaaagagaaagaagataccctactagggggtttttacctcctttaagaaacagactaaaactagttttctcaagtgcctgaatatatatggtttaaataacaatatacaacactttcaaaataaaatctaggaatgtttacatatgcttttaatctcaaagtctaatgtcttgagaaaagtaaatctgtgagatcactgactcacagaattttagcaaatagaaaaaatccagtatcttcagaacacaagggctgatcttttgtcccctacccgcaagacattgcttggtaccaaaatagaaagttatttttttaagggggaattatgggttttttctgagaacagataatatgaaaatagttaatagtattggtatgaccacatattttcctaattcaaaataaggacgctatgctctacaagagtattttaaaacaataatgagataatgtttgaaatagaaacaaaatatttgtgagtatttctggagtatctggctggtccatatcaactggaatacagataacccaggtgtagatttctttgctcttagagggtgaaaaaagctttttgttgttttattttcagttatattggttttaattatccagcctccagcaaaattaaatacatatggattcaaagctgatagctaccatagtttgccaaaatacaaccagatgttttcaaaatgtggaaaaattgtttttggactctacaggaatagaacccttcccccaacactgggaaaaggttgttttctaggcattttcagtgttactgatatcccaggaactgtcagatcaccacccggcacatttttcatttttatctgcacttgtcttacatgcgaaatattttcttaattcatgtctcttttttgtagcatctttttttcccaagtaaatacc

SEQ ID NO: 16325 - DNA, 1958 bp, Homo sapiens
  CDS (1319)..(1699)
accaagttgcttaacttcgttgagcctctttaggggatgatccatgccctaagctgcctgactgcccaaaagcagaacaatgatgagcaatcatttagacgagataagcacctggagctccaggcattgcctaataaccctgaattattcaatccttcatttcacagacattgattgactgggatttaaaacaatttaaaaatgaatgtgacactggccctgccctcaaagagcttaagagccatctaggtacacaggacatgcccatgcacagctgcaaaataaggcagggtgtgtataatgtatgctgggggtggaagaaccagggaaagttgtcttggcagaggtggcatggcagaaataagcagggaggctactccaactggaggagatggctggagcagggtttgctcctgagtgacgagtagatgaggttggctggagcagatctttggaaggacctgggaagggtttgggggcgggggtggactacagagttggagctaggtggtaaggggccttaaatgtcaggctaagtagccaagatttaatttagcaagtagcgggaagtcatgaagatgtttgagtcagagattcaggtcagtaacctgaccaggactgggctttaggaagaaagtcctctagcatcataagggacagattggtgggggagggtggatttgaggtaggaagaccagttgggagtgatgtaattaagtgaacaagatctaggactaggattcccaaactttgagcataagattcccctgaagtgcccaactttggagatcaattgagaggtcttgcatttgccccctaggaaatggctttttttttttttttttttttttttgagatggattctcactctgttgcccaggctggagtccagtggcatgatctcagctcaccgcaacctctgcttcccaggttcaagtgattcttctgcctcagcctcccaagtagctgggattgctggtgcccaccaccacgcccggctaatttttgtatttttagtagggacggggttttgtcatgttggccaggcttggtcttgaactcctggcctcaagtgatctgcctgccacagcctcttaaagtgctgggattacaggtgtaagccactgcgcccggccaggaagctacattttgataggcaccccaggtgattctgaggcaagtgattgaggaacattgccctacggcaacttgaggtggcgggtggagagcaggatgtgtcggacacctgtggaaatagatttagtagccttggtgttggatccatgccctaagctgcctaagccctaagctgacatggatgtgtccagagtggctgggagaatgtggggcggataactgggttgggccatcacaaggagatactggtgggtgggttggtgggagggcaaagtgtgaaaccagtaagctcaaacgcttagaaagagccctgtggggagaaagtactcttgcctgtccagatcttgacagcagagtagaaactggccaggcagcagtcccaatatcaggaggaaccccaaggcttccctgcagagacctccagccccttccttcccctcctgctggccctggggcagaggagcagatggagcagtttttcctgggcagtgtttctgggatgcggtggtggttactcttctgccgatcccacagccttgaaagagccccgtggtggcgggactgaaggtagcaaagctggcgatgtttcaagtgctcaggggagggaagcagagcagggagggaggccccggggagatagaaggctgggattgttcccacagtaaccatctgcgtggccttggggtgggcagggtggggttcagactgaagtcagggacagagcagcaggcatcttggatgtcagagccatgtttttcaggccgggacctgagcaaaccaaaggaaccctcctaattcttcccttttgatggtctcagtcc

SEQ ID NO: 16326 - protein, 127 aa, Homo sapiens [sequence omitted]

SEQ ID NO: 16327 - DNA, 1414 bp, Homo sapiens
aaaaactccctgctagagagactaggagatttggggctgcggccgtttcctccggagcacccacgggactgtgtgctggggtccctccaccggctgtgtcctttattcttctttctcacccaacgatttacctgaacggttataaagtgcacgttatttccctaagcactttgagtatattggcccactgcattctggacttcaaaatttctgatgcgaaatatgctgatacttttgttgaagaaatctgggctttgagcatctgtaagatatttgttggaaggttttgtctggtccttcttactgatgtgttgctcttcttcatggctcgtgaaaactattagagtcatccaagggtgggaagagagatcagcaacgttaactgggtgtcaagaaaacataccgagattgaagccatccacttctgcaggaacaccgaaaagaaagcttacaatctgaaggtgtccgttcttacactggtcagaccactgtccttggggcagctggggtctttgggaccctccaccgggctcgccggtccgtcggacttttggctgagatccgtgtcagactcctccgaatagtcgtctgttggcatcgagggctgaacccctgaggtgctgcatgaacttgagagcgcgctctcgcacgccaggcagtggtacgagccgccgccgccgccgccgccgccaccgccgccgccgccactgccaccgccgccgccgccggtggggacgtgaagcaccatctcttgcaggttcaccacagactggccgaagaagcagagggacttcaggtggctcctcgctgcctcctcgtcgctgaagccctgaacccaaaccaagaaaaacatctgctaagaaagaacctggagcaaagattagcagaggtgctaaagggaagaaggaggaaaagcaggaagctggaaaggaaggcacagaaaactgaatctgtagataacgagggagaatgaattgtcatgaaaaattggggttgattttatgtatctcttgggacaacttttaaaagctatttttaccaagtattttgtaaatgctaattttttaggactctactagttggcatacgaaaatatataaggatggacattttatcgtctcatagtcatgctttttggaaatttacatcatcctcaagtaaaataaatatcagttaaatattggaagctgtgtgtaagattgattcagcattccatgcacttgctttaaaatttagtcctgtgcatactgtggtgtttttactgtgcatatttgaatttttcatgcagtttttctagagcaataatcagtggtgcttttgtacctaggttttatgtgattttaatgaaacatggatagttgtggccacctgctgactatttgtggtttaaaataaaaggtttacttgtctgcag

SEQ ID NO: 16328 - DNA, 1903 bp, Homo sapiens
  CDS (902)..(1222)
atcttctcctctctgcaaacctctcctgtgctgatgcctgggcaccagagatgaggtgggagcagtacctgccctaggcggggctcacggtctagtgcccacagcagctgtccagggagtgcaggctgaagcagtgagatggcaggggggacggagtgagaaaagagcctctcagaagggcaggaggggcggggaggggcggggtggcacatggagctgccaggaaccccagaggcagctctgttcccagagttcagaaacctccaagaaaagctggtggcattgtccgttttgttgtttgcctatctggcctttggctattgactggatggcatcttgggaatcctctgaagggctggagtttaccccaagcacagggacagagggagcaggtggagtcacttctcgttgatgtccagctgagctgggctggtggctgcctcagaagggagggggcagctactaggagcagcagcctcaccccagggctctgtggacctccttagcctgtgatggccttggcaatggggatggcctggttgggggactgagcaaaaggcaggcagtagggatgggtgttcccagccttgagtcagatcctgagaagctccagggcggggcacgttctgtctctgccatctggaaacctaccagctacagcaattgtcacctccaacaagaacccctgagcccggaagctgggtgagaggaacctccaggtacaactctccacccagcacagaccaggtctgctgatctgtgccattccctgatgcactgtggcatcccgtgaccacagactgtcacccacatccccagaacctgcacggtgcttgcttggtacagactaactactgagtgtccattaagccaaactggtaccaccatctggacctgtgaaatgtccttcaacactcccccacccaccccttcctgccacgcccctccctcccttccacgtccctccctcccacgcccctccctcccttccatgcccctcccttccacacccctccctccctccctcccacaaacttgtcttgagacctactgtgttgggtggcgaggagacgaaggccttgggaaccacattcctgttgctcccgtggcccagaaccagccctcatgcctcctgcgcacaccatgttcacctgttctccccctgagctccagcgcagagaccctccctgcccaagttcactgcagtgtctcagcccccagctgagcgcctggcatagagcaggcactttccaaattttttaatgatctagaaatgaaataaatactgaggggctcagggtgtcgtacagcaagtgtgaaagggcttgggtgcagtggctcacgcctgtaatcccagcactttgggaggccaaggcaggcagatcacctgaggtcaggagattgagaccagctgaccaatatagagaaaccccgtctctactaaaaatacaaaatcagctgggcgtggtgttgcatgccagtaatcccagctactcgggaggctgaggcaagaggatcacttgaacctgggaggtggagattgtggtgagctgagattgcaccattgcactccagcctggacaatgagaatgaaactctgtctcaaaaaaaaaaaccaaaaaggccgggcgcggtggctcacgcctgtaatcccagcactttgggaggccgaggcgggcagatcacgaggtcaggagatcgagaccatcctggctaacacggtgaaaccctgtctctactaaaaatacaaaaaattagccgggtgcggtggcgggcacctgtagtcccagctactagggaggctgaggcaggggaatggcctgaacccgggaggcggagcttgcagtgagccgagatcgcgccactgtactcccgcctgggcaaaagagcgaggctccgtctt

SEQ ID NO: 16329 - protein, 107 aa, Homo sapiens
MSFNTPPPTPSCHAPPSLPRPSLPRPSLPSMPLPSTPLPPSLPQTCLETYCVGWRGDEGLGNHIPVAPVAQNQPSCLLRTPCSPVLPLSSSAETLPAQVHCSVSAPS

SEQ ID NO: 16330 - DNA, 2845 bp, Homo sapiens
ggaatgcatgtacattctctgatattattccttatatcctcgggggatgtgacttctaatgtcacacagcgtgttctccctgtgttctctttcataatatcctagtgcaattgtactcttaatgacgcagggggtgtaggcattgtgatattattcatgttattctagaaggatgctactcctaatgtcacaggggtgtacaccctgtgatagtattcataatttcccaggggtctatactcctaatgtcacagaagataacaccctgtgacattattcgtaatattctgatgagatgattctcctaatatcacagggggtgtacaccctgtgataatattcttactcctccagggggatgtcactcttaatgtcacaggtgtgttccttctgtgatattattgaaaatatgctagctgggtactactactaatgtcacaatgcgtgtacaccttgtgatattattagtaatattgtggggggatgttacccctaatgttacaggggtgtacaccgtgtgatattgctcccaatattgtagggggatgctactcctaatgtcacaggtggtgtacagccttcggtattatttgcaatctgatagagagatattactttaatgatcacagtgggtgtacatacatgggctacacccactgggataatatttgtaatatcttagggagatataactcctaatatcacagttggtgtaccccatgtgtgtacatcctgtgatattatttgtaatatccatggtaaacattgcttctaatatcccacagagggtacaccctgtgatatttttcataatatcatagggagatattgcttctaataacacagtgggtgtacaccatgtgtgtacactctgtgatgtgatagcttatatcctagggagatattccttccaatatcagagtgagtgtacaccttgtgatatcattcgtaatctcctagaaagatgttgctgctaatatcacagagggtgtgcccccagtgacatcattcgaaatatcctagggagatgttaccgtaatgtcacaggggttgtacaccctgttatattattgtaatattctagggggggtgttacttttaaagtcacaggggtgtacaccctgtgatgttattcgtaatatcctaggaaggggttactcctaatatcacatgggttatcctaggaagagcttactcctaatatcacactcctaatatcacaccctgtgatagcattcggaatatccaaaagggatgttacttttaatgtcacatggggtgtacaccctttgataatattcgtaagatcctagggacatatgacttcaaatatcacgttgagtgtacacacatggtgtacacattgtgtgtgaacacctcctgtgatattatccataatatcctaggaaaatgggactcctaatatcacggtcagtggacaacctgtgatattattggtaatatcctaaagagatgttaccactaaggtcacaatgtatgtgcaccccctgatattattcgttatatccttgggggatgttactcctaatgtcacacggggtgtactccctgtgatattattcgtaatgtcctaggggtatgttactttcaatggcaccagggtgtatatcatgtgtattcaacacctgtgatactattcttaacatcctaggggcatgttcctcctaatgtcacatggggtgaacaccatatatgtacacctgctgtgatattattcgtaatatcctaggggaatattactcctgatggcacaggagatgtacaccatgtgtgtcaaccgcctgtgtcattattcttaatatcctagggagacgtttccttgaatggcacaaagtgtgcgcaaaaggtcacagaagctgtgcaccttgtgatgttatctgcaataccctagaaggatgttactcctaatatgtcacaggggtgtacacactttgatattatttgtcatctcatagagagatatgacttcaaatgtcacagtggatgttcacacatagtgtataccctgtgatattattcataatatcctagggagatgcaactcctgatatcacagtgtgtgtacccggtgtgtgtacacccttgatatgagtcgtgatatccagggaaaatatgactcctcatatcacacagtatgcacaccctgtgatatttttcatcatactttagggagatattgcttctaatatcacagtgggtgtaccccatgtgtgtgtactctgtgacagtatattctgtatcctaggaaggtattactcgtaatgacacaatgggtgttcaccctgtgatatcattcttatttgaccttgctgccttttttaacccatcctacaaaaggaatggaacagataagaagatattgagattagactgcgctgctgtgcggccgccgcaggacacttttcatatccctgtttctcaggctgtagatgaaggggttcagcatgggggtgaccaccgtgtacatcactgaggccactgcacgctttctcggggaagatgacacatctgaaccgaggtaccctccaacgcctgttccataaaatcagcaaacaactgacaggtgagacccacaggtggtgaaggtttatacttcccacctgatgatgaaaccctcagaatggaggaaacaattttacagtaagagaaaagggtccccgagatgggaagaaaaccaaatacggcagcagggaaatacatgttgatgttcctggtgaaggtgtcacagaaggttcccagaagaaattaggaatttccacatccttgaagcaggtcatttgtaaggcaatcaagttgtgcagctgagagtctaaaagactgaggg

SEQ ID NO: 16331 - DNA, 1985 bp, Homo sapiens
atcataaaaacacgcctttctcattcaactgaaaaacacactaaaattttaaaagagaaaaatgcaacatcttggaaagtaacgttttaacaccataaaaatttgcacttattcaactgaaaatttacactaaaatagacattaactgtgcttttacattccaaaccatcatactaaacataacaagttaattgccaatgttttccttcccctatactttgaggtagttctacgtaaccaactataacaaatttacttcctaacatcctcaatcttctgctctcctttagttttaagatactttatgacatgggtaatactctgaaatggatgccttctttggatatattttggggttttagtgtctggaggactttgatttctatattagcatattggtttatgaagtctggacataacctaaggaaaataatcacttgttttaaaggacagttctttcaaattccctacaatgtcagatttagagccaaataccatcgaatatgttgatgctgtaattcctagcaaatttcaagaggtcactctcttttcaaaattataccgtgccccttctttgaaaatgagtttcattttcgaagtcaaaacaagtcctttctcttccactggcgggcccttctggtccccagattagcctgttccaaaattggtcatgtgtctcactgggccccttcagttgacccaagcgtccctcaccagctcctatccatctctatctgctggaaaggctttgaggtttcagatttaggacagcaccactcattcatggtctctcctgcatcaggttctttattctgatagtttccggaaacaaatacaaggcaaagctgcctatgtattggatacccccgagatgagacgggtgagggagacccaacggcacatctcaacggtgaaatatcatgaagactttgagaaacacaagggttgcttcacaccagtggtgacagatcctatcactgaacgagtaaagaagaacatgcaggacttcagtgacattaactaccgaggtattcagaggaaagtggtagaaatggaacaaaaacggaatgaccaagatcaggagactattacaggtaactgagcctgggttgggggaggggattaactttaagtgagggggtagaagaacaaaagtagcattacctacatcaagtcaaaacataaaggacttcaatctgtttttctagaggtgcaagaaagctcctattatctcatagtttacaaagctgatttctaccttatctttgttctcctctgaggaaaagacatgacccagaacctaagctggaataagtgtgattcaatcctttggtggttgttaaaattcatgccttggttttcaagttattggaaaactccaagaacacttgttctgatcactggtttccctttcaggtttacgtgtctggcgtactaatcctggttcggtttttgactatgatccagcagaagacaacatccagtcccgaagcttacacatgattaatggtgtgttagctgaaaaaggcttacaacataaacatcaccatttagtatgctagagtcaatgactttcatttgggctctgaagttccttccctccagagttttccattttctgagctgcccatttggcataaaaataccttgttaactagtgagcaaaacttactttctagataagttcaagttagaaaaaattttgtttcactgcctcagtgcatgtctcccattattatcatttctaatttttcttccaaagaaaaaacagtagtaattctattggagaaataatgaaaatacataaaatacataggcaaagggaagagaaaggatttgacctgtaggaacttcctgagctctattgcatcaaggaagtttattcattacacaaagcaggctgcacaacttcattccttcttttcatgttaaaaagcagaatactagcctggaaaagagaatgagaccccttttctacaaacagt

SEQ ID NO: 16332 - DNA, 1749 bp, Homo sapiens
aagtctagttaaactttaaacaaaggatttatgaacatctctacttccctcagtgagtttttttttttttaacaagtaatattttcaaggaaaggaaaatggacattatgatggctgtcttttgtccttttgtaaatggtggttcttctagagctgtgctatctaatatgatagccactagtcacatgtagctatttaaattaaattaaaaatttagttcttcagtcaaaataaccccatttcaaggttcagtagctacaaatggctagtggctagcatattggaccacacagatacagactgttttcatcattgcaaaaagttgtattaaactctattgtatagaatattttgctgaaatatagtatatgtggctgggcatggtgtctcacacctataatcctagcactttgggaggccgaggcgggcagatcacctgaggtcaggagttcaagaccagcctggccaacatggggaaaccgcaactctactaaaaagacaaaaatttgcctggtgtggtgacgggcacctgtaatcccagctacttgggaggctgaggcaggagaattgctggaacccaggagggcggaggttgcagtgagctgagatcataccactttactccagcctgggtgaaagagcgaaactccatcccatctcaaaaaaaaaaaaaaaaagaaatataatatatgtaacatcataaatacataagtgaaattaaaatggatataatataagacacttgaggtggggtgtagtggctcacgtctataatcccggcactttgggaggtgaagacaggaggatcacttgagcccaggaggtcgaaaccaacctgggcagcaaagtgagactccgtctctataaaaaagaagaaacttaaaaaaaaaaaaaagacacttgaaacaggaattgacttcatcagaaagcaaagcaatagtacaaattaatattaagctctcaatagatattttatttggcctcaaggaagaggaatttaatatctgagtataaaaaatgcgtacaagcagtttgagcagctagcctgctgaagcaatgccttatcaaaaataacaaagtttcagttttgaatcagtgtcaattatgtatatgaataataaatataattacaggagttttattgtgtaataagaaaccataatggaagtatatatgtgctttcagttatgaagttatgctcgtcagccagaattttttgaaacaaatatcatttttgttattgtgatgaatacctttattaatgttacactattgactaagaagttgttatctttttaccctaatgtgcaccttgctagcagatagaaactagtgtgaaacaggtagcctgtgattctttgaattgtcacattttaagtacaattggctaacttcatttttctgtcccaagcctacttagttgtacttgttaacactttaaggttatttagatcagaagaaatctggatgtctcaggccaggtgcagtggcttacacctataatcccagcactttgggaggccaagacgggcagatcacttgaggtcaggagttcgagaccaggctggccaacatgtctctactaaaaatacaaaaattagctggtcgtggtggtgcacgcttgtaatcccagctacttgggaggctgaggcaggaggatcacttgaacctgggaagaggaggttgcaggttgccaagccaagataatgccactgcattccagcctgggtgacagaatgagactgtctc

SEQ ID NO: 16333 - DNA, 1792 bp, Homo sapiens
gattaatgtagacaaacgtccaggtagcaattttggggataataaatgagttcaccctttttttttctttttttccctgagacagagtttgctcttgttgcccaggctggagtttaatggcacgatcttggcttaccacaacctctgcctcctgggttcaagcaattctcctgcctcaggctcccaagtagctgggattacaggcatgtgccatcacacccggctaatttttgtatttttagtagagacagggtatctccatgttggtcaggctggtctcgaactcctgacctcaggtgatccgcccacttcagcctcccaaagtgctgggattacaggcgtgagccgtcatgcctggccgagttcagcttttattcacattttttccccgaagtgatttattcttcaaagtagacagttatgttctatagagtgttttgttttttctttaagaaaataatttacataaacagagattatggtaaacattttaaatcttaggctgttggttaaatttaatggtttaagcactgttgggttctctttaattaatatttgcagaaggagaacatatgtgtttcactgatatgtatggtccagaaaaattacttaattctcaaaaatatgttgcattctcatattgtgttagggaaaattccataagtagtctatttttttttttcttttgctgactgttaacatccaaacacctgaatgaaaactgactcatttctgtattggtgtttaaaaatattgatttgcagatgttcacagaacacttgcattttttgattcacattgctaaatcaaatgtaaaggcaaatatgtatatttaataaatgagaagtatttttttattactgaaatttattctcaaagcaaatgtattttgtagatgtttcatttgggagattttgctttgccttaaaacatacaaaataaacctgtcttgtggtctgcccacctcaaaacctctgttaacttgacatgtagaaggagttcagaattctttgataatgtgtggttttcacttttgtttggattaaacaaaaataaaattagagtccatagcactttgtaaactaatgtgaagtttcttgttgaatcataaaagctacctgtatgtactttataatttaatgttctgttagtaaaaattgtcagcattttatctttttctcttctcattacattttagtctccaatctttcccactctcagcagtcacagttttgcagagcaaaacatttttagaaactgaatatgtgtgagttctatataaaatgaatgtgttagtaacatccatctgctgatcaaggaggcattggatctggtactagaaggtgaaattgattgtagctatcaaagcattttatcaatgtaagtcaagaaaaaagaagaaaactgtgaacctctgatatttttaacataaaaactgttcccaatgagtgttctcttgctgattttgtgttaatgttattgtctatgatttttaagctaatgctaatataaaatctaaaatttcaacatgatgacaacaattcctgtagcctgtttttaccattaggatgtttttgaaaacagatgtcatcttagaaattatatttttaagtgcaaataaatcatcctgacttgaaagtcaacacattttatttttcattccgtagtatcacagaatatgctgcatttagatacaggtttaatttgccagattttctcaaaatttatattgctacaactggtttacttaacatgcaattgaattgttatttaaataaattacatttgatgg

SEQ ID NO: 16334 - DNA, 2545 bp, Homo sapiens
  CDS (929)..(1288)
aaaattacaggagaaaattgagaaaaatttagagtccaaggctggcaccaaagacctgagacctaggaacatgagagtctgttttcttcatgtacaaaataaagctactaacacctgttctaacaagactgacatgatggaaatggcaaaatattaacaattatgccaggcgtaactgttgaattgttgctttctaacaattacttcagtgcccaataaatatcttcaccagaaaactatttattcaaggctggctgtggtggctcaagcatataatcccagcactctgggaggccaaggtgggcagatcacttgggctcaggagttcaagaccagcctgggcaacatggagaaacaaaatacaaaaatacaaaaaattatctgggcatggtggtatatacgcctgtaattccagctactcgggaggctgaggcacaagaatcacatgaactttggaggcaaaggtagcagcaagctgagatcatgccactgcactccagcctgcgtgacaaagtgagaccttgtctcaaaaaaacacaacaaaaaccccaaaaattagctgggtgtggtggcacacgcctatggtcccagctacttggggggctgaggtggaaggattgcttgaacccaggaggtcgaggctgcaataagctgtgattatgccactgcaccccagcctgggtgacaaagtgagaccctgtctccccccaaaaaaaaaaacaaaaaacaaacaaccaaacacctaattcttccaattactatctctccagtgttctgcaatacacaaattttgcagcataatttactggtgtcaatttcacaaccacagaagtcctcagaagtcaaagcacaacaccttgaacctagtctgattcatcaaacgtccattttgctaaaaaccatactcaccactcggattctgtgtccaatggccttagcaggaagattgcttcggaatttggcacgaaccatgccactgtttccatgggcccgagttacttttccccagatgactctggttttgtttggtttgccgccaggagtgactgtgttgctgattttaaaaagggaaagaagaggaatacaagctgatatagttggatacaaattcaaggtgacctctacacgagtggctctcaaccctggttacccacttcatcacctgagaaactttaaatgcctagaacaccattcattcaacagatacttatcgagtaactattgtatgccaggcccttctgtaaaatacagcagctataaaacaaaaatctttcacatgataaccaagtaagtttaaggaaaatacataggtcagatgataacagaggcaatattgaaaaaatagcaaaaaaggacaagtgtgaggatatttgtgtgtacagaaaggaggaattacctgccattttaaatagccaaggaaggtctcactgaggtgaccatggaacaaagactggaaagggaggggaaatgccatgaagtgatcacgggatgactagcgcaggcactggggccaaggagtgtgtgtcctggccggaagaaagactgaagacaccaaggggttaatcccagctgagataaagagaattatggagctcttaatgacgggcttttactgaatgagagaaactactgtggttcgagcaatgtacaaaggatatgactttatatatatttcctttaaagaccacggggttgtcttgtcacccaggctgcagtacagtggcccaatcatagctcactgcagcctctatctcctggcatcaagcaatcctcccacctagggctctcaaatgctggggctacaagtgtgagccactgcacctgacttaaaattttaaaggaacacattggctgtagaagaaaaggtggggcaatgattaaaacactttcccagagattttaattggcttggagtgggtgaagacaataggatttgctcttgttgtccaggctaaggtgcaatggcacgatggctcacgcctgtaatcccagcactttgggaggctggggcgggtggatcacgaggtcaggagttcgagaccagcctggccaacatggtgaaaccctgtctctactaaaaatacaaaagttagccgggtgtggtggtgcgcgcctgtaatcccagctactggggaagctgaggttgcagtgagctgagatcacaccactgcactccagcctgggcaacagagcaacactttgtcaaaaaaaaaaaaaaaagtctacagcataaacatctttaggcatgcataaaaactaattttggcctggtgcagtgacttgcgctataatcccagcactctgggaggccgaggcaggtggattacttgaggtcaggagttcaagaccagagtgaccaacactgtgaaaccccgtttctactaaaaacataaaattagctgggtgtggtggcacacgcctgtaatcccacctcactcggaggctgaggcaggataatcgcttgaacccgggaagcagagattacagtgagctgagattgtgccattgcactttagcctggataacaagagcaaaactctgtctc

SEQ ID NO: 16335 - protein, 120 aa, Homo sapiens
MALAGRLLRNLARTMPLFPWARVTFPQMTLVLFGLPPGVTVLLILKRERRGIQADIVGYKFKVTSTRVALNPGYPLHHLRNFKCLEHHSFNRYLSSNYCMPGPSVKYSSYKTKIFHMITK

SEQ ID NO: 16336 - DNA, 1546 bp, Homo sapiens
attgttattccaataggaaaagcattttatctcttcactttagcctttgctgagtattgtacaaaaagaatgatgctgcactaaataatgaacttctttttgaagaatttaacaactagatgcattttgccttcctggaatccttttgtctgtctctttgcatcgttgactcttgcttatccagagatctcagcttaaatatttccttaaaggtacctttcctgagattccagctggaattgagtccccttagtatactctgccatatcacctcttgcagtttataattacccagctgtttgtatgaatgttatgtctgtgtctcacatcacactttgaatttcagagagagcagtggccatgtctgtttcggtcactgctctataactccagtgtctctcataacagtctgggaaataataagtactaattaagtatttgttaagtggaaatactgctgttagagcttctcctaattagagtgttaaaaatgagataatgtgtgcatgggggaaggggaaggagagggagaggaagtagataaacttgtgatattaccgtgagataatcctcaagtaagtcctctcacctccagggcctttgtttcaccttgtctgtaaaataggacagactgggttcaagatgccattaatatcctatattttgattccagtaacaatgatgacagattatgtaagctcatttgaatggaatatgtgacagctagctccccaaaagaatatttgacaagttctaaataaacatattagaaatgcttgccaactagatgatattatttagagcctcgtacccctgttagaaacaagcatatataattggtatatagtttgtaaattaataagatgtactcttctttcagttttctaattgaagcgtaaagacaaaattaagcagcatatcaaggttcatgtaagttacagttattaggtttaatatttagttttaatatttttcacccaacatcttgttgcatcttccagagtaaatctggggtccataaaccaaaccaggagagggaaaatggaaagagtgggcagaaatctgacagctcttaggtttcttctatttgtgttaatactgagacttttaaaaatcatttttatatgtagtgtttattatgaatagttgtaatttgttctgataaattagttgtattaaacactgttatttggctaatattactaggtataataaaatgatatttagtgggaagacattcatcaaagtagaagtagttaatttgggccaggtgcagtggctcacgcctgtaatcccagcactttgggaggccgagatgggcggatcacttgaggtcaggagttccagaccagcctggccaacatgatgaaaccccgtctctactaaaaatccaaaaatgagccaggtatggtgatgtgcacctgtaatcccagctactggggcggctgaggcacaagaatcgcttgaacccgggaggcggaggctgcaatcagtcaagatcgcgccactgtactccagcctaggcaacagagcaagtctctgtctc

SEQ ID NO: 16337 - DNA, 1532 bp, Homo sapiens
attctgaaagttttctgactccatatttccaagaaacttgtcccactccttaatatttcaaaggactaccatgccaaataaagataaatctttattttatgtagtgaaagcaacaatgtataatcttctcttttctacttacggcttgttaaagagaccggtaactggttctaatgttttgaaatctgcatgcttaccaatgatgtcttcatgagttagctgtaggctaatggaaaaaggaagcttatcatactttttagaactttttataattaaggtcagacctctatattattattaatattacacctcagtatttgcaattaacattgagacatccttgcaacaaaccctttggatattaacaaatattgacacacatataggaatatattaaaaatccttattaaggggaacaccaattagaatcaccataaatgatgtttatacatttcatcaagcaccaagaggccataaattatttggatgagattagccacctaaatgattacatgaaatgaccttagataccaattttgttgaacaagctttccacagtacttatcatttactcatacactattaaaagtttgacattcaggatattagctacaactcttggttatatgtgagagaaactcaactccaactagcaaagaaggaaattaatttattggcttatctaactgcaaagtccacactgtagggctgattccaagcacagctagatccagaggctaacataatgtcatcaggactctgtctctctctttcagtcccttgcaaggctactccataagcataatgattgctcaaagcagcctgaagtccaaattctagcagcttagcagctacggcagaaaaagagcatggcaaggtagcaacttccaaaatggtgacattaggagccctgtggaattgctccccagtgaaacaagcataacttgtgaaaataatttttaaaataactatctaaatactttggaaattgtcctaaggacctaggcaaatgaaggaacatttattcaagaaaatctactaaaacttggtaagaagagtgagaatcggtgacatttgaaccacagcctccctccttcccccttccagttcagtgtgataaaaattcaccttctacctgaagttcattcaagaacacagggattcctctctctccagctcccagttgaggaacatggtatctccttgggaggcacaggccatcagcatttcttattgctactagctagctatgtgttgcagagcctaaattccatggaggtgtggcctagaagccagggtgtttcttaattaagaggaggcttgcaccttaatgagaacagcaagctaaaccataggccagttagtttacaagggagagccagaggacaatgcaggtaaaacgtgccctcctggagtcataacagatatcacagactagcctcaaaaattcaaatggtccttaatttaattggatcagactgtgggggcaatttgtgctccactgaggaaataactccaaaaaaaaaccccat

SEQ ID NO: 16338 - DNA, 1901 bp, Homo sapiens
tggaagaataagtattttgtaaaaattcacttgataccacattttcatttctggaacaggatagcaatcattcatttctatcttgtgtctgtgtccaccacaaccaagaccagatgcatctgatgaacattctggaattctgaactgcagctagcctgctgtgcaatagtacaagtgggaggacgtcttcccagggctgggctggttctcaactagtgcccagatgcaaaaggactgaggcatcactttcagactgcatatatttttattcatataaagttctttataatactttattttgtggtgttaagttccaccagttatttacaaatgatgtaaaaagctttaagtgttgttaatttctaaagtgttcttgcgttttcagaagtgtaagtggatctcagttgatctgtcaccccaaacctcaaatgatccatccaccctgcttggccatctaattcacctgctctccccagtgactattttggacctttcctctccatagatgactttgcaatctacagggaaaatacttatgcaggacatcttatatctcccccttaccacgtacagttctctccacagctgccagcagccctaacctttttgtctctccacctgtgctttggatgctcttctcccagccttttcaggatctttgtctgtcctcctatattaatgtattcaattattctctcagctagatccttgctacttggttttaaatttaagactaagattaaacaaaactatctttcacaaccacaaaccccctcccgccaagcaactaagattttcctctcattctcagccagttttcttgcaagcagtatctttagtcattgccctcaattcatctaatccctatcttaagctatctctaacatggatctttccctctactccactaatatcaatcactgtgttacttaatcccagggagaatttttaggacattcttttgcttctttaatataatcctattttgctcctaccactgaccatcctttctggcttatcatgctttaccttgccattaattagtggagtttctcaaacttcagaccctaggccctcttcctctaccaccagcagatcccatttatacccatggccttaaggtttatttctgtagtttagactactgagtaatgtgctactgcaaaaagaccatttgggtttctcaaaggtaatttaaaaattcagctgtttaaatgctgctccccagctgaatctagggtcattatgctcatcagtgtgcaagctggacacctagcagttatggacacctccactattaccacgtctagttggctctgtcatccaactataaacgatcttatttcactaattttactagtccaagctggtctcttgtctagacaacaataagcaacctagttcaactaccttttcttgcaaatctgattttccaccatggatttatcttgctttaataaagccagagggagcctgaagtggtctggcttctttacctacctcttcagcctcattttgtaacactctcacctcccataatagccatcttacaagcctcagtaaggactcagttctaaaacagggcactgaagagggaaagcagccaaaactgtctcaaaagtaagtggactaacggtatcttttttctagcccaagcctctgtatatgtcattcccccagttttgccttgtgaaaaatatgacacatacctttagtctcaactctttctcaggtttccctaagaaaatcctatcacggaactcatctcatagtgaagttttacatttgtgatgacattccctccacttatctatgtttccaaagggaagaactgtgttgtgctcatcatcgtgttctcagctcctagtacagtgctttcaataaattttttgaatacctct

SEQ ID NO: 16339 - DNA, 1902 bp, Homo sapiens
aggcttatcaaagtcaagcactgtgtcacctggtaatgcaaacccttccagcatctctgcctttaggttttaggggggaatcgtcaaaacagacatgcagcccactacaaagtacttgaaagcaatagggcaccattcaagcacacgcctgcatttactgggctacgtttatttagggcattcaggtggctgtaattattgtgcataaatagttttctaaaaagcataaaactaaaaacttgatccatggaaacacagtgtggtttaggatggagatcggatttcactcacctcaaaataactcctggtgtttgcctccaagacccattaatttatgttatctcttgctctgtagcagtttggatttgtcacacttagcaaagtaatttggtttcccacaggttttgttctgttttatagaagcaagagaacggttttgtgtttcagagcatgaatacattccttcagaaatttagccagcatttcagaaggatatgaatttttatttttagctatttacacctgcctgaaaggttgatgctgctaaacattgatattacttgaaaagttgtgcccaaggcatattgcttctttcctagctaggaattgaaatgtttatgaagcttgctgaaaatttaccaggttaccaaaataagagtttatatctcttatgtagtgactaacagaaatagatttatgtattcaaccaaccgtccaatatttattaagccactaatatatgcattgaattatgctggatttggggtgacatcagattatacaacatacacttctcctgttccagttcccttttaacatgttattactgggcacttacagaatgacaaaatcacattaataagactcaggcctgacttcagattgtaaacagtctagctggtgaaacaaactcataaacaaatgcccagacattttactacaatataataagttccgtgaaagagataaacacaggatatattttagaatctcagaagcaggtcttggccgggtgcagtggctcacgcctgtaatcccagcactttgggaggctgaggcgggtggatcacgaggtcaggagatcaagaccatcctggctaacacagtgaaaccccatctctactaaaagtacaaaaaaatttgtcgggcttggtggcgggcacctgtagtcccagctacttgggaggctgagacaggagaatggcgtgcacccggagggcggagcttgcagtgagccaagatcacaccactgcactccagcctgggcaacagagtgagactccgtctcaaaaaaaaaaaaaaagaaagaagcaggtcttaacagaacctgaaagcatcaggaaaggcttctggcaggagataaagcctgagcttgaagttttgagaagaaagacttcaatagatgtcagaaagtagaaaagctgtcccagacaaaagagccacagagtacaagtttttatgattttatagtcaaaagatgattattgattgtgagataggttaggttttggggggccagtagttcagtgagaatgtttatgtttacaactagccttcccagtaaaaaaaaaaaaaaaaaaaaaaaaaaaattgtaaacatcacttatattactttattgcagcttcatcaccagtacattatatgttgtaatatttatttacctgatcattttgatcattttctgctttattttgctaataaactgtgatgttacttctagtgctaaacatggcatatttccacctatgattcgtgtttacctggtattaggagctcagaatggaatgcataaagcttcactggaagtgtatacaactgtggtgtagaatctgttattattatcattattattttatttagacttgactatctcttatgtttattaaagaacatgttttcct

SEQ ID NO: 16340 - DNA, 1180 bp, Homo sapiens
gaattcaaaagatgcctatggttggttacacagcttttgatttgcataggtattcgaacccaggttttgctgacttcaatgctttaccttaaaagatgcttttttagaatggtagatgttaatagatggtctgtgtaattagtttcctgggcctcctgcaacaacatagaaaaaaatgggtaacgtaacatttattctctcacaattccagaggccagaagtccaaaatcaaggtgtcagcagggcgatgctctctgaaggctctagaggagaatccttccttacctcttccaaacttgtggcagttctcagcagtccttggtgttcttggcttgtagatgcatcactccaatatctgcctccatcaccccccagctgtctttcctcatatgtttttgcatcatcttacctctgcgtctgtgttcaagttttcttctgcttatgaggacatcggttatatttgtttaggagcctaccctattccagtgtgatctcatcttagttacatctaccatgaccttatttccaaataaggttacattttcagacatggtagttaagactttaacgtatatttttggggttgagaggacacaattcagttggtaacagctatgacaaaattgggtaaattgatgaacatcttaaaaaaaacacagtggaagaggcaggcactgtagagtgacaaaatacatctttatagaaattccatgttaaaattattttgtgttataataatcaaatttaaatacctaatacatatattaccattaaacaggatagtcagcactacctagttttttagctgaatttgtaatgtccatatgtttatgtttctttagtaatacttgaactaaaggaatttgcaaagaaaacccaataatattagtattacatcaaaaagttactgtgtatttttcttccatcaagaaataatgctgacttttaaaggtggaggagtttttagacttcagtaaacataggtaccctgaaaatgtgcactgttgtatcttttcacttttgtatgtcagtgctttgaaaaaatggacaatgttatcattttgttttgtctgcttattaaaattttctccctagtgtgatgtgactatcattttgccatttcagtgtcatattagaaatggttgttttatttaccaaataaattaaccaattcgttcag

SEQ ID NO: 16341 - DNA, 1896 bp, Homo sapiens
  CDS (790)..(1509)
atttagaatttaagcctagatacttcagcagtttttctataactgaacaaagaaacaaagtagctcttgatggtccagtaaaatgagtctaaccagggactccttacaggttttatatatagtaaactacattttcgtggaatatgagaattacgttaaaagagtaccaactaagaataattttattgttcatggaagatagggtaaatctcaatactgccttatttatacatgtactaatcaaaagagccattaaactgtttttccacactattatactaagcacatttcacagctttacatgtcatctgggcccagtgtggtgactcatacctgtaatcccagcactttgggaggccaaggcaggaggatcactgagcaacattaggagacctcatctctacaaaaaacttaaaaattggtcgggtgtggtgatgggtgcctgtagtcccagctacttgggaggctgaggcaagaggattgcttgagcacgggaggttgaagctgcattattgagccatgatcgcaccactgcactgcagcctgggagactgagtgagaccctgtctcaaaaaaaaaaaaaaacagttgtttcaagtcagtaaattctattttggataagtagtaaagaatgggttttggggggtgtatttttttaaatcttgtaggggacaagtaatctattccagcaggtagatactaatctttcttttcattctaagtttatactctaaagttttattttgtcagactttttacagggtacctttagtggttgccaatctgggcatgtctgaacaactgggttataaaactgtatcaggttcctgtatgtccactggttttagccgagcagtacaaacacacagctctaaattttttgaagaagatggatccttaaaggaggtacataagataaatgaaatgtatgcttcattacaagaggaattaaagagtatatgcaaaaaagtggaagacagtgaacaagcagtagataaactagtaaaggatgtaaacagattaaaacgagaaattgagaaaaggagaggagcacagattcaggcagcaagagagaagaacatccaaaaagaccctcaggagaacatttttctttgtcaggcattacggaccttttttccaaattctgaatttcttcattcatgtgttatgtctttaaaaaatagacatgtttctaaaagtagctgtaactacaaccaccatctcgatgtagtagacaatctgaccttaatggtagaacacactgacattcctgaagctagtccagctagtacaccacaaatcattaagcataaaaccttagacttagatgacagatggcaattcaagagatctcggttgttagatacacaagacaaactatctaaagcagatactggtagtagtaaccaagataaagcatccaaaatgagcagcccagaaacagatgaagaaattgaaaagatgaagggttttggtgaatattcacggtctcctacatttcgatccttttaaccttacaaggagatttttttatttggctgatgggtaaagccaaacatttctattgtttttactatgttgagctacttgcagtaagttcatttgtttttactatgttcacctgtttgcagtaatacacagataactcttagtgcatttacttcacaaagtactttttcaaacatcagatgcttttatttccaaacctttttttcacctttcactaagttgttgaggggaaggcttacacaacacattctttagaattggaaaagtgagaccaggcacagtggctcacacctgtaatcccagcacttagggaagacaagtcaggaggattgattgaagctaggagttagagaccagcctgggcaacgtattgagaccatgtctatt

SEQ ID NO: 16342 - protein, 240 aa, Homo sapiens
MSEQLGYKTVSGSCMSTGFSRAVQTHSSKFFEEDGSLKEVHKINEMYASLQEELKSICKKVEDSEQAVDKLVKDVNRLKREIEKRRGAQIQAAREKNIQKDPQENIFLCQALRTFFPNSEFLHSCVMSLKNRHVSKSSCNYNHHLDVVDNLTLMVEHTDIPEASPASTPQIIKHKTLDLDDRWQFKRSRLLDTQDKLSKADTGSSNQDKASKMSSPETDEEIEKMKGFGEYSRSPTFRSF

SEQ ID NO: 16343 - DNA, 1549 bp, Homo sapiens
  CDS (902)..(1357)
gtttccatccctcctctggaggcttttgaagtcaccgggagacagatgtgctctgtggcaggcaggggagtgggggtgctcaggcacttgggaggtctgggagctcctcagtgtgaccgctgggacccaccaggactttttcctttgtcagaagcctttggttgctttgctgctctgcatgtgtcactgtggaggggcaatagagcaaggccttacatggcatggtcatttctcgggcccaggaggcttagaggcctgcccctggcgctcaagtattgaaccagaaccatggggtggcactgaagcctcctcaccacatcatgataaataacggggacattcacagagcaggcactgtttcctcagtccatggctgagtacatcaccggtgttttctctcttattcctcccatcaagcctaaaaggaatctctattggagatactgccattagtgttccttttataggtgaggaactgaggcatagagggttccccagttgaaccaactgataaatagtagaacttggattttaattcagtcttgatgccagggataaggctcttactttctaccttaggctatttctaggaaacgcaggagagtgttgaaggggcagagaaagggatccagttcctttctgtcccgcatcctagtccctgagaagcaaagaagaatgtgtggcttcttttgctttgcttttgttgtcatcccacacatctccaggggacctgggctcttgatcttggcctcttcccctttaactgttaagtgggagcaggtaagggggtacagtagggctggcctggagttagaggcttggatgccttagctcctctgtctgcactccagaactgcctgacttcatttcgtatgttgtcctttgttttgacaattgatccatgtcccagtccgtctcttcttccttcttgatacttacactgcttctttctgttggtttccagtgtttaacactgtatacaacagtgacgacaacgtgtttgtgggggcccccacgggcagcgggaagactatttgtgcagagtttgccatcctgcgaatgctgctgcagagctcggaggggcgctgtgtgtacatcacccccatggaggccctggcagagcaggtatgacgtggcgctgtgtcatgtgaatttcccaagaagcatttcatctgtgattccgtatgaaggctttctaagccctgaaatttgcagggtcatttcctcagtttgtgtattaaagaaaagctgccccagccaagcgtggtggctcacgcctgtaatcccagcactttgggaggccgaggcgggcagatctccggagatcaggagttcgagaccagcctggccaacatggtgaaaccctgtctctactaaaaatacagaaattagctgggcgtggtggtgtgcgcctgtaatcccagctacttggaaggctgaggcaggagaatcgcttgaacccgggaggcggaggttgcagtgagccaagttcgcaccactgcactccagcctgggcaacaagagcgagacttcatctcaaaaaaaaaag

SEQ ID NO: 16344 - protein, 152 aa, Homo sapiens [sequence omitted]

SEQ ID NO: 16345 - DNA, 1587 bp, Homo sapiens
aatacaagtggatttgttaaatggcttttccctagatgaagtaggtcaaactcgggcctgcatctccctaaggaggcaataatgcctggtagcattaccagagggtaagacggagaagtactttggagaaattagaaacttccctagtacttgttatgaaagctcaaactctttaaaataatggaaatgtcataaatcaggcagattcacttttgcctgaggatggcttgaaggaggctgctgtgagctctttagtgatttgtctgacacaggctacaggcaaatttaaaggtgaccaacttagcaagaaacaaggcaattgaaagatcggtttcctaccttgaccagctaatgcctgcaagagcagaccgaatggctgaattccaacccgattccaggaatactgtttgctgacctgctgtcttaagtcagtgctgtgattcctgcaaaagacggcagagtcagggtggggaaatgagcaggtgctgctgttggcggtgggtctaaacaccccaccacacatttgtttgcatcacttgtccaggactatgattctggcactattttcctggatgttatacaatgtcaaaggggaaggtggatggttcccaccaagacagaagcaccttcttatttcagatgctatcttcttggtctgctgtgctgtgtaacaaaaatgtatcaaccccaagcagagttaaggccagagctgggatgctgtggtaggctgaaaaacaccctggaaaagatatccatgtcctaatccctggaaccattgaatgtttccttatatggaaaaaatgtggggagcctttgctaatgtgattaaattaaggatcctgagatcgtgacggggcggttattctggattccccaggtgggctctaaatgcaatcactggcatctttgtaaaaggaaggcagagggagattatttcacatccatagaggaggaggttgtattagttcgttctcacactgctataaagacactacccaagactgggtaatttacaaacaaaggaggtttagttgactcacagttccacatggctggggaagcctcatgaaacatacaatcatggcagaaggggaagcaggcatgtcttacatggcagcaggcgagagagagagagagagagagagagagagagagagagaggaaaaactgccttataaaaccatcagagcttgtgagaactcactcactatcatgaaaacagcatgagggacaccgcccccatgatccaatcaccttccacctcatccctcccttgacaggtggggattatggggattacaatttgagatgagatttgggtggggacacggacccaaaccatatcagaggtcatatgacgacggagcagagaaacaactgaagatgctggccttgaaaactaaagtggcatggccacaagccaaggaatgccagcagtcagcagaaagcagaagaggcaagacacagagtctaccctatagcctcctgagaaagctcagtgttgctgacaccttgagtttgacccagtgatgctgatgtctgacttctggcttccagaactgtgagagaataaatttccgtcatttt

SEQ ID NO: 16346 - DNA, 2111 bp, Homo sapiens
cattccctaggaagtgctttgaagaaaaacttgaggtatatgaaatggttaaaaatcagaaactaaaccttttaacatggacatcaaagctttgccataagcaattcagcatattcctagaaatgtttctaatccataacctgagagaatgttgatctccatagtgtgaaaatgacttgggccagtttaacttgctcttttttttattttttcactaattcccttttgtttttctctgataattcttctctttcctgagcctctttagagcagcacttacaggattgcctctgtaaagccttattcctgtcccagaaaaggtaacccaaaaagtctctagtatccactaaaaggtaacccaaaaatctctagtatccactggctttctccagtgtggaagctttcccctccacctcccatagatcactggaaaggacccgaggcctcggttctaatccctggcttatcactaactgctgtgtggctttggcttgtcccttagtctctgtgagactgctgcaccctcatctgtcaaagatggaactgaacttagttgagctctgaggtccctgtggacttggcccctccacaccctcattatggcaactggacataaacttaacagaggacttcccagcaaaatgtcctcttcttcctacaaacaggctgtttctatatgtgcatgtttcatgctaagcacttctttcttgggtggagatggcaaaggcctctttctgctgagacaaagtgatttggagagtcacctggcccctgaagggggagtggtaggatccagccacccagtgtgcagtgaattggagcagggatctcagcacacaggggggtggggaggctccccctaacctcgggcacctgttgctcctccagactgcagcgcatgctcttagctcatcctcttaactggctctcaccgtgctcctggctttggtcaccacgtagctctcactccagcttcaggtagccatcagtaggacctggcaatatacactgatttggtttgttttatgtttgtctgcaggtgaaatccctaagggctctgccgtgtactccagccttgtgacccttgccttccaggaaccatgcaagaagcgcagccaccagaagtccttaaaacagcaggaaaggtgagcctgtcccccttttgtgcagctacctatctgctgaggagcatctgggcctcattcctccaagtccactggagggtccagaagagggagtcagagatgtatcctggtggagctgggagaaaggcagaaagcctttgtgacagctatggaataccgttagccaaggtccacttggcccagcactaagcaaaagatgcgtagtttgcacagaaggttttgtgatactgcctctcaacagccccagcagcttgggaactagcaagagcacatttcttgcctcatcagctgtcctgagatggaaaactcagtggatataggaccctgattccgatgaaaggggcacgtggtcccaatgctggagctcctctggcaggttctaaaagcacactacggagcagcggtgccctgccggacactgctggcgggggctcagtgagcactactcacagatccacacctgaccctgttgggtcgagtcaggctgggctttggtctgcactgtagcacctgtgttctttgagttcacatcatgaatgtggtgatttcccagataccatctcaggcttaacctagcacatcctatttcttttcttctatgatatccaaattggactgacctcacttcaaagttgctgtcccattttgtcaccctatcttatctcggggaaattgcagactgatggccagaccaactctgttgaaattcttgcatagagcaaacctgtgctcatttttaagtggcatgggagaggccccaagcctagtaaagcctagtctgtgtcttcacagtgctggtagaatgtgtttgtgtgtataaatatatgatatagatttatatatgttgctaacgccacatattgaaggccaacataactggtggacagggtgggtgacagaaaatgaaagtctttttggtgattgtttaagcaagatgtgtataaagaaataaatagtttttctttc

SEQ ID NO: 16347 - DNA, 1529 bp, Homo sapiens
aggtatatcatcctaagatcttcgtcagctctgacaaacatcctaggaacccactctaactcctcattttttcatgcctcctccagtgctcttcactcatgctgtttccccttcttctcttggcttcagactctggacattaatgtgaaggccccagccctgatgacaaaggcagtggtgccagaaatggagaaacgagggtacagagagtgagagagagcctgggtgagaggggacaccacacgggctgagggcactggtccacaatgggaagatggtcagctctcttctttttccagaggcggctcagtggtgatcgtgtcttccatagcagccttcagtccatctcctgtaagaacccttttgtctacctcttccatcccaccctccactccacatctttccacccctcctattacccaaggaagtttgtgtccccttgtagaatcacaccaccaagtccctgcccacaaaatagatgccttgcctccacaaaccacaacctaggggaggtttagccacaagacagttccctaactctgcccctcccttacaggagatccctattgagcactgccctctatgtctagttattagaaccaagaatgacctggaaactatgagtctaacacattctcttctttctccagggcttcagtccttacaatgtcagtaaaacagccttgctgggcctgaccaagaccctggccatagagctggccccaaggaacattagggtgaactgcctagcacctggacttatcaagactagcttcagcaggatggtgaggaaggggagctttgcatttgactgggaccccttgaaaggcatccatcttcttggacagggaagcccactacctgagtcctgagctctcagccactccattctccttccctggactttcccatattccctctctgtaccacctgccctatacaagccacactcttatcacaccttttctgaggtataggctggagactgaggtattcagactgtactcacactgtttcctccctccttacatggatgagaattggagagacgcagcaaaatgcatcactagaacctgaaacaaatgaaacagatgagggcagtggggagagctgggagctagaaaaaaataggaagtgaaagagggaagtctctctccccatccctcctctcagttaccatgaggatgggcagtttcttccctttccgttcttcactttcctcttcttaaacataaagagatttctgggtggggtggctcatgcctgtaatcccagcacattgggaggccgaggcgggcagatcacgaggtcaggaggtcgagaccatcttggctaacacggtgaaaccccgtctctactggaaatacaaaaaaattagccgggcgcagtggcgggcgcctgtagtcccagctactcgggaggctgaggcaggagaatggcataacccgggaggcggagtttgcagtgagccaagatagcgccactacagtccggcctgggcaaaagagcaagactccgtctctaaaaag

SEQ ID NO: 16348 - DNA, 1283 bp, Homo sapiens
  CDS (649)..(1197)
acttccgctgtcccgcgaagggcggggggagcgaactgttgtggtgcggagcgttcggcgggcggcggccgggcggcccaggggctgccgcgggactcggggcgcagccgagtggctgcaggggtggagtgggccggacgagccgcggggcccgggtgccgcgggttcgaggccgggccccgcgcgaggaggccgcgccaccccgggggagctgcccggcagcgagtttgccccgctgccgaaagaaggcgggagccggcaggggccttcgaaaccccctggcaacccaggcccggagtccttggggagcggctgtttcctgggacgccctcccggacacccccgctgcagggttacggttctgggcccccggcagaaggctcctccgggtgacccccggcggggccctgcgagccgcgggagccgaccccggggcctcgagccgggaggaagggggcttccggaggcggagggccgggggccgagggagccgggcctctcggacgcggggcagggcagcgcccgggctggagacggactctgggaccctcggctgcgggggtctcagcgacctgccccgcggcaagcgcggccgcggagtggcctaccggggaccctcccccagagggaccggcccggggcggggagatgaacggcttcagcacggaggaggacagccgcgaagggccccccgccgccccagctgccgccgccccgggctacggccagagctgctgcctcatcgaggacggcgagcgctgcgtccggcccgcgggcaacgcctccttcagcaagagggtccagaagagcatctcgcagaagaaactcaagctggacatcgacaagagcgtaaggcacctatatatctgtgattttcacaaaaatttcatccagagtgtccgaaataaaaggaagaggaagacaagtgacgatggcggagattctcccgagcacgacactgacattcctgaggttgatctgttccagctgcaggtgaacaccctacgacgttataaacgacactacaagttgcagaccagaccaggcttcaataaggcccagttagcagaaactgtgagtcgacacttcaggaacatacctgtgaatgaaaaagagacccttgcctacttcatctacatggtgaagagtaacaagagtagactggaccagaaatcggagggtggcaagcagcttgagtgaggatgaagcacatcttaaaggaatgaagtgtaatgcttgatgcacaggtgatatctactacatttaagcccataaagactgtt

SEQ ID NO: 16349 - protein, 183 aa, Homo sapiens
MNGFSTEEDSREGPPAAPAAAAPGYGQSCCLIEDGERCVRPAGNASFSKRVQKSISQKKLKLDIDKSVRHLYICDFHKNFIQSVRNKRKRKTSDDGGDSPEHDTDIPEVDLFQLQVNTLRRYKRHYKLQTRPGFNKAQLAETVSRHFRNIPVNEKETLAYFIYMVKSNKSRLDQKSEGGKQLE

SEQ ID NO: 16350 - DNA, 2264 bp, Homo sapiens
aatggagtggttatctttggaaaataaactgtaacacttggagcaacagtcctgagtggagaaggtgagccccgggacctgccaggagactgtgtcttgactatccccatcagagatgcattttctgctatgtcacatcccatccgttagaatcttccggatactatatctcatagttgatggtctcttgaattcagcaatttcatatctaaagagattcttgaagacaccatgttgtacaccttaaatatatatacaatttttatttgttaattaaaaaataaataagtgaggccagagtgctgggattgcaggcgtgagccaccatgcctggccgattttttattttaacgttttgttttatcttactgtttttccttaggtgagaaaaatgtacccttccatgcctgtgctttctagattttgggactgatacagatccacagaggccacacctaaaattaaattatcgttagtgctaaaacttaattgactgtgtatataactgtgcaattgctgttactgatataactgtttggggttcattcaacagattaaagaagcaaggtcttgcatttaacacacaaactaatgagatactgctttatacaagaattttaaaaacactgtcatatggtttagtgtagttaatgtcatgcttatgtcatataacatagcatgttagagttctctagagggacagaactaacaggatatatgtacataagaaagggagttgattggccgggtgtggcggcttatgcctgtaatcccagcactttgggaggccgagacaggtggattatctgaggtcagcagttcgagaccagcctgaccaacatggtgaaaccccatcctactaaaaaaatacaaagattagctgggcgtgttggcaggtgcctgtaatcccagctatgcaggagtctgagacagtatcacttgaacccagggggtggaggttgcggtgagccgagattgtgccactgcactccagcctgggcaacagagtgagactctgtttcaacaaacaaacaaacaaacaaaggggggggagtttattaaggataattgactcacacgttcacaaggtcaagtcccatgataggccggccgcaagttgaggagcaaggaagccagtggtggatcagcctgagtcccaaaacctcaaaagtagggaagccaacagttcagccttcagtctgtggccaaaggcctgagagcccccgacaaaccaatggtgcaagtccaagagtccaaaagctgaagaacttggagtttcatgttcaagggcaggaagcatccagcacaggagaaaaatgaaagctggaagactcagcaagtctgctcttccatcttctcttgcctgctctattctagctgggctggcaggtgattagatggtgcccacccagattgagggtggatctgcctgtcccagtccactgactcaaatgttaatctcctttggcaacaccctcacagacacaccaggaacagtaatttgcatccttcaatcctatcatgttgatgctcaatattaaccattatacattggttcaagttctttcttcagtcacaagagtaacacaggtagaagagacaaatgaataagtgccaagtcttgctgcagagtttccttcataagttttgtttgcaacctggccatttcttttctaaggtcactttgttcatcagtaagatgaactctgattctcttctaggtcctccaaactccgtaggaattgctgatttcagtttaatttgtttcagtgtctctgtctctgaaccattctagcttatagacaactcttttgttgctctcgaaacattgtagctagtttttgttcctctggttcctcagccttcactgttcgtgttccaatcttgaaacaaagtcagaaactgcttagaatatttgtaatgaagtttctgcctttcctcttgtgttttcaaaacatgttcaattctcttcttagtggtgtggataaaagcattcatatactcctgtaatcccagcactttgggaggctgagacgggtggatcacgaggtcaggagttcgagaccagcctggccaacatggtgaaaccccgtctctactaaaaataaaaaaattagccgagcatggtggcagcgcctgtaatcccagctagtcaggaggctgaggcaggagaactgcttgaacccgggaggcggaggttgcagtgagccgagatcgcgccattgcaccccagctctgggcaacagaacaagactctgtctcgg

SEQ ID NO: 16351 - DNA, 1591 bp, Homo sapiens
ctagcttaacttcatttaaagaataaattaatcgtttttaaacttatgccagcagttgttaattcccagatggcaggtgaactctctaaacatttttttaaaacttttcatcaaatagtaattccattttaacccaaaaatagctttttgttttctttcttaaaacatgaccatgatgcatcgtcaatcaaaataaactgaagtatttattaattacagctgtattgatttctactctaaactgacttcctccgaaatctagtatgtttcatgtttcaagaattaatttcttgatggtactctgctgcactgtaatttagtcatggtggattgagtcaccagatattaagacagtcatgattgcaaatgacagatggcatccagtggctcaccattgtttgtacctcttggtacccatttctctgaagctacaagtacagccatgaggcagtggtaactgtcttagttggagtctcagagctcatgcttcatttattcccaaggcaaggcactaaaaagccatagttggagctggagcacttgccaacttgtatttctgccatttagaaggtgctcagtccctacatctaaaatttgaagggaaaggaaatcttccatatgaatgccacttttcgttattttccagaccatcacatcttacttttcctttcattcaacaatgataacttattcgccaacacttttcaagaatgtgtttacatgaaagcagagcaagcatgttaagagacccagactgcaaataactttggaacggcttcagtgtaattcaaagtgagtcatcctgcctcagttacagaatgagcagctctgattgacagaacttggaaaagctaacacagagcggcaaagggtattccccaaaccttaatttatttctgtttgagagcaaaaatattgggaaattatccatctacagcttaccttttcttactgtgtaatttgattttaatgctggaggatttaccgtttacataatttgatcttcaatgaaattactccttatgtccgacttttggttcagattatatctaaattaagagattaataattatttttaaaggtagtgaactagcgtagatcagatggtatgattcctgactacgaaaaggaatttatttgggcaaggattactggtatgtctattgcttttgttgcgtaaatgaattgatttccacctacgccataacagtgtatctcacatgcaacgactaagctggagttgcaggagctttcttgtctgccactgccctcagcctccattctcccttcctggtgccccagtacagcctctgttctcctttttcatagtttccagtgggagcatctccacttcccttctttttgaggggcctggtcatcttcacttccacacagcccacaaacttctcacttgtatctctcctggtacagtagccatgccataaaacaagatggatactgatcagttactcaggctagaaacttcaaagccatggaacaggttcaagaagagagtactacaattagacttacgctttagaaaagtcagtcttttacctgagcagtattatatagtacaatgcttgttatg

SEQ ID NO: 16352 - DNA, 2001 bp, Homo sapiens
ggatccacggccgcacagctaaacagcaaccccctacccgcttcgtctccctccgccgctatcggggcctaagcgggagcggctggcacggcgtcactgggtgggctggggcggaagtggaggcggagggagacggtggcgtcgtccgcggggccctgggctctcgcggcgaggccctggtgggcgcgaggcagggggagggggaggaggaggagcccgcggcccgggcggcggcggctctcgggttctccgtagggccccgcctcggagcgggcggcggcggaggaggagactgaggagcaggatggcggcctcggccctgtacgcctgcaccaagtgtacccagcgttatcctttcgaggagctctcccagggccagcagctctgcaaggtccgtgggctccgggaggcgggcgggatgggtgtcctcggccgtagccggagggggccgggtagccgctgcactgcagcccctcttcgccggcgcctcaggggtttgggagtctggagccctcgcctccccactcggggacccctttttctgggggcttgaacattagctgggaacggaccctgaaagggaggcagaatcgtgcccttttccaggcggcccaggagggtgccgggccccgtcagcgtctgggggtctcaggagtggggttgagtgaggcagccacctgtctatgccgcagagacccaggggtggagatgttttcatctcggttttctgcctggtctgtcctcttcttccaccaggaggcaggggacggtttttgcactttcttgctaggaacccgaagccgcaaagctgatggcatccttcttccctgtccaggaaagcgaagcgactggtttgggaacagaatgctctgatttggagctcctcccatcccattaaagcctggatgctgtctgtgagcaacggtgcaaaataataagtagtttcacatttaaccaatccttgaaataggccctgacagctttcttaatttgtctgtaatatacccccacgtctactaaagacaaagacacctgtgccttccctaaggaattatattgtgattggccacttatatgataaagcatccagttctttacgttggggccaggttttataaatgttttagactttcactaggttgggtaaacagttttctaccagaaaagtgagatttgggactttcagaaagatactgactaatgtattgtcttattacaggaatgtcggattgcacatcctattgtaaaatgtacttactgcagatcagaatttcaacaagagagcaaaactaacacaatttgtaagaagtgtgctcaaaatgtgaagcaatttgggacgcccaagccttgtcagtactgtaacataattgcagcatttattggtaccaagtgtcagcgttgcacaaattcagaaaaaaagtatggaccacctcagacctgtgaacagtgcaaacagcaatgtgcttttgatcggaaggaggaaggaagaagaaaggttgatggaaagttattatgctggctctgtactttatcgtacaaaagagttttacagaagacgaaagaacaaaggaagagcctgggatcttcacattcaaattcatcttcttcatctcttactgagaaagaccagcatcatccaaaacatcatcaccaccatcatcaccatcaccatcgtcacagcagtagccatcacaaaatcagcaatctaagtccagaagaagagcagggactgtggaaacagagccataaatcctctgcaacaattcagaatgaaactccaaagaaaaagcccaaattggaatctaagccatctaatggagataggtgtatgtaatgtgtgccattagtaaggtaatttgccagttgcatccatttctgtcagctctataaatcagtcagcagatagtgggggaacagacaattttgtccttataagtcaattgaaagaagaagtgatgtcacttaagcgtctcttacagcagagagaccagaccattttag

SEQ ID NO: 16353 - DNA, 1620 bp, Homo sapiens
tcttcttagtcactacttcccacagagttaaccattgccaagattagctttaatctttaaaaataacctgagattagctttgcctgttctgaaaatttacatgcatttaattagacgatatgcattatttggagtttgggagtcttcagttattgtgtatagcaggggcgggtttgttctcattgctgtatattttactgtacaaccgtgccactcagttattcattttactgatgacagagacttaattggttccagtttgggactcttaggaatagtgctgctgtgaacatttggcgatgtgtcccttgatgtacatatttgtgtatttctggtgggtatatactgaggaatggtatgtgtatggtcatagggcatatgtaccatcagctttagtaccagtagatactgccaaacgattgtccatattgagcatcttcttaatgctttttttgtgggggtgaagggggcagagtttcactcttattgcacaggctggagtgcaatggcacgatttctgctcactgcaacctccgcctcctgggttcaagcaattctcctgcctcagcctcctgagtagctgggattacaggcatgtgccaccacacctggctaattttatatttttagtagagacagggtttctccatgttgatcaggctggtcttgaactcccgacttcaggtgatccgcctgccttggcctcccaaagtgctgggattatagatgtgagccaccatacctggcccctaatgctttttaagtcatcttacctatttcacatttccctgagaatagtgagtcacttaatatatttttgacaggttgaacaaggaagtttgttcctgggagataaaaaagcttgaggtcggccttgcgtggtggctcacacctataatcccaccactttgggaggtggaggtgggaggatcatttgaggacaagagttcaagactggcctggacaccatggtgagatcctgtctgtattaaaaaaaaaaaaagtacggggccatttactttttctttcttcaaatgatgagtatcttgggagacctgtttgcttctcttgagccaggtcatcttggaaccatgtccacagagacaggtggacgtagcagccttagctcttactctgaaatgccccttctcatgggcgtcttgctagtccctgccaccacctccttgtcagccccagggacagcccttccattgcctgcagtgcagcccagctaagccaaactgatcacaaaagcaagattttactgaagaatcaggagagccaaagggcagcccacccagacagcgccagtcacagtttaccatgtaacacctggttcaggtcgagtgcagtggctcatgcctgtaatcacagccctttgggaggccgaggcaggaggatcacttggggccagaagttcaagaccagcctggacaacatactgagaccccatctctacaaaaaatttaaaaattagctgggcttggtgtcatacgcttgtagtcctagctactgggaggctgaggtggaggattgcttgagcccaggaggtaaaggctgctgcaagccatgattgcaccactgcactccagccagggtgacagagtgagaccatgtctt

SEQ ID NO: 16354 - DNA, 1519 bp, Homo sapiens
  CDS (705)..(1157)
gattcctgcggacccagctgtggcgacgccaggagaccccaagctgcatcgccgagtggaagcaactagaactccagggctgtgaaagccacaggtgggggctgagcgaggcgtggcctcaggagcggaggacccccccactctccctcgagcgccgcagtccaccgtagcgggtggagcccgccttggtgcgcagttggaaaacctcggagccccgctggatctcctggctgccacccgcaccccccgccagcctacggtgcgcccgcgggcccagcttctctctgcgctgctccccgttaaattccctggggagacggaagaaaaggcaaaggaagtcggttctccaggggccagaagtgttgagcctaattagtcttcagacttctcaatgaggaatcgcttatcagtttcttatctgggagagttgaggatggagggacagaaggcacccaggatttgcacgggggggattcagggagagagggtgatgagggacggggtgggccttccagtcttggcccagtccccatcttgcacacattgttggcttcctcttagagccgttcgcccccctggggaggggagacccatagtgacctctcctgacacccgccgaccctgaccagtgttgccgggttcttcaaaggccacgctctgactgctggtctgtgtcacctgcaccccccagccccaccgtagagatgccttcttcggtgacggcgctgggtcaggccaggtcctctggccccgggatggccccgagcgcctgctgctgctcccctgcggccctgcagaggaggctgcccatcctggcgtggctgcccagctactccctgcagtggctgaagatggatttcgtcgccggcctctcagttggcctcactgccattccccaggcgctggcctatgctgaagtggctggactcccgccccaggtgaggcgtctgaccctgctgccagccatatctcagaaacagtgcagaatacacagtatcaatcccagacaccatcagcgattccaggtttccagcccctgggccccaaggaacctttggtttacagtgtgtgacgcagattgtctctgggccgacccaggctcctatgcctgtttggcacacacagacactgagctggttatggaggggccagcgagatgactcatggaggcctcaggagttcaagaccagcccgaccaaaatggtgaaaccccgtctccactaaaaatacaaaaattaggctgggtgcggtggctcaagcctgtaatcccagcactttgggaggccgaggcaggcggatcgcaaggtcaggagatggagaccatcctggctaacagggtgaaaccccgtctctactaaaaatacaaaaaattagccaggtgtggtggcgggtgcctgtagtcccagctacctgggaggctgaggcaggagaatggcgtgaacccgggaggcggagcttgcagtgagccgagactgtgccactgccctccagcctgggcgacagagcgagactccatctc

SEQ ID NO: 16355 - protein, 151 aa, Homo sapiens [sequence omitted]

SEQ ID NO: 16356 - DNA, 2294 bp, Homo sapiens
  CDS (421)..(804)
ataaggtataaggaaggggtccagtttcaattatctgcatatggctagccagctctcccagcatcatttactaaatagaaaatcctttccccattgcttgtttttgtcagggttgttgaagatcagatggttttaggtgtgtggtcttatttctgagttctctattctgttccattggtctatgtgcatgtttttgtaccagtaccatgctgctttggttactgtagccttgtaatatagtttgaagtcaggtagggtgatgcctccagctttgttcttttttgctgaggattgccttggatattcaggctctttttggttccatatgaattttaaaatagtttttttcctaattctatgaagaatgtcaatagtagtttaatgggaatagcactgaatctataaattactttgggcagtatggccattttcacaatattgattcttcctatccatgagcatggaatgtttttccatttgtttgtgtcttctctgatttccttgagcagtggtttgtggttctcctcaaaaaggtcctttgcttcccttgttagttttattcctaggtattttattctctttgtagcaattatgaatgtgagtttattcatgatttggctctatgcttgcatgctgttggtgtataggaatgctagtgatttttgcacattgattttatatccccaggctttgctgaagttgcttatcagcttaagaagcttttgcactgagacaatggagttttctaggtacaggatcatgtcatctgcaaacaaagataatatgacttcctctctttctatttgaatatctttatttctttctcttgcctaattgccctggccagaacttccaatactatgttgaataggagtggtaaaagaggggatccttgtcttgtgctggttttcaaggggaatgcttccaggttttgcccattcagtatgatattggctgtgggtttgtcatatatggctcttattatttagaggtatgttccttcaatacccagtttatttagagtttttaacataaagggattttgaattttattgaaggccttttctgcatctattgagacaatcgtgtggtttttggctttagttctgtttacgtgatgaattacatttattgatttgcttatgttgaaccaaccttgcatcctggtgatgaagccaacttgatcatggtggataagctttttgatgtgctgctggattcggtttgccagtattttattgaggatttttgcattgatgttcatcagagatattggcccgaggttttatatttttgttgtatctctgccaggttttggtatcaggatgatgctggcctcataaaatgagttagggaggagttcctccttttcaattatttaaaatagtttcagtagaaatggtgttagctcttctttgtacctctggtagaattcaactgtaaatccatccagtcccaggcttttttttgtaggctatttattactgcctcaatttcagaactcatttttggtctattcagggattcagttttttcctggttcagtctttggagggtgtatgagtccaggaatttacacatttcttctagcttatgtgcacagaggtgtttatagtagtctctgatggttgtttgtatttctgtggggtcagtggtgatatcccccttatcatttctgattttgtctatttgatacttctttcctttcttccttattagtctagatagtagtctcttttattaattttttcaaaaagccaacccctggattcattgatttattgaaggttttttcgttctgtatctccttcagttccactctgatcttggttatttcttgtcttctgccagctttggggtttgtttgcttttggttctctagttcttttaattgtgatgttaggttgttgattcaagatgtttccagcttttatcagccaggggaactcttgtacactgttgatggaaacgcatactggtgcagccattatagaaaatagtatggagatttcggctgggtgcagtggctcacacctgtaatcccagcactttgggaggctggggcaggaggatcacctgaggtcaggagtttgagaccagcctggccaacatggtgaaaccccgtccctactaaaaatacaaaaattggctaggtgtggtggcacttgactgtaatcctagctactgaagaggctgaggcaggagaatcatttgaacctggaaggtagaggttgcagtgggccgaaatggcaccactgcactccagcctggatgacagagtgagactgtcaaat

SEQ ID NO: 16357 - protein, 128 aa, Homo sapiens
MAIFTILILPIHEHGMFFHLFVSSLISLSSGLWFSSKRSFASLVSFIPRYFILFVAIMNVSLFMIWLYACMLLVYRNASDFCTLILYPQALLKLLISLRSFCTETMEFSRYRIMSSANKDNMTSSLSI

SEQ ID NO: 16358 - DNA, 1793 bp, Homo sapiens
aagtcccctatacccaaatatggtttaggcttgattgaaaacttagcttgggcatttttctttaaacataacgttttgtttagcaaaaggaaacttgttcttttttggttcatggttttcttactgaagattctactacttatttgaggctaaactgtagctagtatctttgagcttttcttgaaggagtttgaagttcactattagtgatttgggcttttggaccatgtctataagtgacatgggaccggctgtcactgacaggacccttccagggaggctgtgtaacacccacgggcccctgacagtaactctgtgcagtgagtgggtgggggcctctcacagtggctgggaaccagccagagcagggatgagggagcagactgtctgggccccagggcagactgaaaaggatggagagaaaccccaggatggggtcctcctccttatgtgtttttaagttgatgtttggcttggctgggtttccgtaataaaaatccttggagtgcagggctagtcctgctggccccagcagaaagtcgaggacttcctagatgtctgtggtgcaacagggcaggatggggccgtgttagcgctcccaggagacattaggaggcacaggcatgggtgggtgtcatccttttcctcaactgtatctgaagactccacccaacccttcaagaagatggaaatgcagttgcccagaaaccgtacttctcagtggtgttttttgatgtggcatctgatgtgcactgatctgtgtcttttgttctgttctgtttttctgtcctgcctcgctcgaaaggaccgcaagtctcagctgctacaaaatcaaagacagcaagttgcttaggagcagcacagccttttctgggattgagaccagagaatgcttccctcggggttcttaaggggcccccgtatctgtggtcagctcagtatgtggggctacaggaggcactcagtggagacaacagcctagggggagatgaaccccagagggagctggctgagccttgggctgagcagccactgggagagaatccagaggacgtagagagagaaacagcctcctgcagccagtgtgggaataacgtaggggatttcacttacttcccacccttggaattgtagcaagcccagcatcacctgagcctgagctctgccctttgtcactggggcaggagccagtagcgagcatgctgggtgctgtggctgtcagggcgctcccctcccctgggcctgctgtagcaggaatctggggcttctgacgcagtgcctgcaaggagcaaacccaggccttaggagtgatcaaactcactacagtcctgacagaaagtccccaacaagcaggaaccgggatgtcagtgacatcccccagccatgctccggggcctgcctctgagtagcacttaggctcagggctgcctgcctggcttggccccagccccttcaatggtgaccagatgtctacccaggtcctctgcaagactgactgctgtgagaaccctgcactctgtggggagggaccccccaagggcacctggaagcaggcatgggtgttgaggtacatctgggctcagaatgggagatggattttccccccattcccccagccactctctgtggcaggcttccaaagaaaccctctcagaaacacacaattatcaagctgtgacaactgcttgaggtgaggctcacctggaccagtgaggttgtttgtttgttttgagacgaagtctcgctctgtcgccactgcactccagcctgggcacagagcgagactccatctc

SEQ ID NO: 16359 - DNA, 1483 bp, Homo sapiens
ccaggcattaaatatatgatataatatgcatgtgtgttatttttgtaagtggattcttagaaaatataatgttctgtttctggtttttcacttaacagtattgtaggtaccttctctgccttaatgcgtacaaatctgctctaccccctccctgcataagcattctgatacatgactcttgtaattttaatgtagctttctgttggtagatctatatattttcctttttttttttttttgttaggaaaatatattgtgatagcgtgggggtaagttgcatgttacatactatgtttttgaacacttacaaagtttctaaaagtaaattcctagaaatgttatagctctttctggggagcaagcagggattcagaataatccccatatttcattttgttcgtttgttttaatttgttatcatacagtgttatcggcaattgaaatacaaatattgtgtgaactttgaagaaaatatttttatttgttcattccccttagcagagttgctgagtctcattcctaatttgaggcctagacttttgggaaaacacagaggacgtccaccttttagagaacagtgataacttaccaatgggggtttgccggttgggagttattctggtatgcataatgcatacaggccacttgaaggtagaaggcaactattcttttttcttttgcttctggtggtttttgtttgtttgtttgtttgtctgtttgtttgaagatttgggggaagttatgccaggaggtagggggcagaacttggaaaaagaaatgaacttttgaaaaaatgtgacactgggttactgagtccaaaatgtcttagagttgacatcctaggccaagtcattatctctgtaacaggaaacattgtaagcttgattgcctgttcctgaagtgacttgcaatgaacccctcaatatcagggatcagagtgcctctcttcatgggtagtgagaaaggcagtgccctattctgcagcctaggctgctgggcaaaggggagaatttggtggtggtgaagggaatcaaggagggtttctgtcataagaaaccagtgtggtttacctttgccaggcgtctgagttcctgatgatgttcctgcagttatccttttccttatgatttaaaagtctttagcagctgagcacggtggctcacccctgtaatcccaacactttggaaggctgagggaggaagatagcttgagctcaggagttcaggaccagcctagacaacatagcgagactgcatctctactaaacatttaaaaaacaaaataaaaagaccgggcgcggtggctctcccttgtaatcccaccactttaggaggccgaggcgggtggatcacaaagtcaggagttcaccgtcaggagatcacaggaggtggaggttacagtgagccgagaccgcgccactgcgctctggcctgggcaacagagcaagactccatctcaaataaataaataaataaataacatt

SEQ ID NO: 16360 - DNA, 1999 bp, Homo sapiens
  CDS (143)..(1999)
acttaaagtacatatatctattgataaggcagcaatacaagaattgaatagatgtgtggcagagagaagagaagaacagctctttagatctggtgaagatgatgaggtcaagaggagtactccagagaagaatggaaaagaaatgttggagcagacattacagaaggtcactgagttggaaaatcagctgaaatcttttgagaaaaggtcgagaaaattaaaagaagggaataaaaaattaatgaaagaaaatgattttctgaaatccctcttaaaacagcaacaagaagatacagagaccagagaaaaagagctagaacagataataaaggggagtaaagatgtagaaaaagaaaatactgaacttcaagtaaaaatcagtgagctggagacagaagtcacttccctgaggagacaagtggcagaagctaatgcattgagaaatgaaaatgaagagctgatcaacccaatggagaaatcacaccagtcagcagacagagctaaatccgagatggccaccatgaaagtgagatctggacgatatgattgtaagacaactatgaccaaggttaaatttaaagctgcgaagaaaaattgctctgtgggtcgtcaccacactgttctcaatcattccatcaaggttatgagcaatgtgtttgagaacctcagcaaggacggctgggaggatgtgagtgaaagcagtgattctgaagcacagacctctcaaactttgggaacaattattgtagaaacatcccagaaaataagtcctacggaagatggaaaagaccagaaagaaagtgatccaacagaagacagccaaacacaaggaaaagaaatagtacagacatatttaaatatagatggcaagaccccaaaggactattttcatgataagaatgccaaaaaaccaacttttcaaaagaagaattgcaagatgcaaaagagttcacatacagcagttcctactagagtcaacagagaaaagtacaaaaatataactgcccagaaatcaagtagcaatattattttattacgagaacggattatatccttgcaacaacaaaacagtgtacttcagaatgccaagaaagcagcagaattgtctgttaaagaatataaagaagttaatgaaaagctcctccatcaacagcaagtatccgatcaacgatttcagacaagcaggcagacaataaagaagctaaatttggatttggctgggcttcggaaagaaaaagaagatttactaaagaaattggagtcctcatctgaaatcacaagtttggcagaagaaaattcccaggtaacatttccacggatacaagttacatcacttagtccttcaaggagcatggatttggaaatgaagcaattgcagtataaactaaagaatgctactaatgaactcactaaacagtcatcaaatgtgaagactttgaaatttgaactcctagcaaaagaagaacacataaaggaaatgcatgaaaagatatctcgaatggagagggatataactatgaaaagacatttgatagaggacttgaaatttcgacagaaagtaaatttggaaagtaacaagagttttagtgaaatgttacaaaatcttgataaaaaggtaaagacattaactgaagaatgttccaacaagaaggtatcaattgattcactaaagcaaagacttaacgttgctgtaaaagaaaagtcacagtatgaacagatgtatcagaaatctaaagaggagttagaaaaaaaggatctcaagcttactctcctagtatcaagaataagtgagactgaatctgtaatggcagaaattgaaacagcagcatctaagcagcttcaagaattagcattgcaaagtgaacaggtcctagaaggtgcacagaagacattgctgttagccaatgaaaaagtagaagagttcaccacatttgtgaaggctttggccaaagagttgcaaaatgatgtccatgtggtaaggcgacaaataagagagctt

SEQ ID NO: 16361 - protein, 619 aa, Homo sapiens
MLEQTLQKVTELENQLKSFEKRSRKLKEGNKKLMKENDFLKSLLKQQQEDTETREKELEQIIKGSKDVEKENTELQVKISELETEVTSLRRQVAEANALRNENEELINPMEKSHQSADRAKSEMATMKVRSGRYDCKTTMTKVKFKAAKKNCSVGRHHTVLNHSIKVMSNVFENLSKDGWEDVSESSDSEAQTSQTLGTIIVETSQKISPTEDGKDQKESDPTEDSQTQGKEIVQTYLNIDGKTPKDYFHDKNAKKPTFQKKNCKMQKSSHTAVPTRVNREKYKNITAQKSSSNIILLRERIISLQQQNSVLQNAKKAAELSVKEYKEVNEKLLHQQQVSDQRFQTSRQTIKKLNLDLAGLRKEKEDLLKKLESSSEITSLAEENSQVTFPRIQVTSLSPSRSMDLEMKQLQYKLKNATNELTKQSSNVKTLKFELLAKEEHIKEMHEKISRMERDITMKRHLIEDLKFRQKVNLESNKSFSEMLQNLDKKVKTLTEECSNKKVSIDSLKQRLNVAVKEKSQYEQMYQKSKEELEKKDLKLTLLVSRISETESVMAEIETAASKQLQELALQSEQVLEGAQKTLLLANEKVEEFTTFVKALAKELQNDVHVVRRQIREL

SEQ ID NO: 16362 - DNA, 1851 bp, Homo sapiens
aagcgtcattcagtcattcgatgctgcaatacttcaagagggcggctgtgggccatgcaccaaccccacccacgttcacccgggcccttccagctccaatccagggggtctggaggatgcctgcaatgtccccttttacactaaagaaaacaagcgccagtcaggtggaagtggcctctaactagtcactccgctgggcacatggtctctgtagtcagagactcccctttgaccttgcccttcactttagaaatgcatatcacaggctacttcatccagaccagaaaggactccagtgttttcagttgggagaaaaagccctcatcagaaatgggatcattttcctggccccatcagcccttcgaaatttggcccagctccctaaaggtgtgtttcaggaaagggtgcaggcacgcctgtaacctggcccacacctacaagcttggggctccaggctctgaatatctggggacgtgcagtgtcgggtgacttcttcgtcaccacgctgtgttccttctccgagtgcccacctactctgtccagcttaaaggatgaattgcacagatgcaaacatttcccacagaggagagtgaggggcatgccaggatcactgcaagggtccctgcagccaggtttctagggatcaaggtctctacaggactctcccagcaaaagcaggtcccctcgtggaatgggtctctgagtgccctgttgaatatattctccatgcctgctttgaaaaaatcccctttgtctctctttggttcatcgtgatgaaacctcttttaattataccttcactggtgttctgcacggcgcatgctgcctgataaatggagattgctttgctcttttgtttatagagaaaaattaaaacatttcttctgagctttgcatatttttctctaatgccttttcaaggagacaagatagaaggttttacatattatgtgcttttctccctctgacttattctggacggaggctggtgaaagaattaagctgcttgtctctgctcagaaagttgcacatgtacttccggctgccttctgccaccccggccacctctctagacacatggcgctggagtgatgcctgtgtctctgagagccacttgggacatagcatctcctccatgggctagtccagacaagccttccagaaagagcttctctgcagtgttgatttccttcttttttaaaaatatgaaacaccaacggtcattatttctcctaaatgtgagccagaaacttatttctcagcaaagggctaaggtcatattctgtcctcaacagccagggtggccgagggccctggggaggccttttttgtttcgtgttaactatgacattagcaaaacttaaccaaggctccgatctcccttcaggctcttgagctcttctccccgggtccactgagcagggcatgcccttgacacccatccaccgttccttacttctgaccccataagtgcaatgaacattagaaacgatcattctagcccacagctgagctgggcttaaagaggcgagccctcctagagtttgcaaagaagctgagtctgggctgggcacagtggctcacgcctgcaatcccaacactttgggaggccgagatgggcggatcacctgaggtcgggagtttgagaccagcccggccaacatggtgaaaccccgtctctactaaaaatacaaaaattagccaggcatggtggcaggcacctgtaatcccagctactcaggaggctgaggcaggagaatcgcttgaatccgggaggtggaggctgccgtgagccgagatcgtgccattgcactccagcctgggcaacaggagtgaaactctgtctcaaac

SEQ ID NO: 16363 - DNA, 1673 bp, Homo sapiens
aatcatgttagattttctgagagtgaaaacacctgccatctacaaattacaaggctggataacagctcactccatttgaaattcagtggaaacccaagagctaggttcttactgaatttgcatctcaatttgggaaactgaacttagctttcaaagatcataggaagtctggttggagaaactagggattattctggcaatgggtgcaggaaggtggtcagaataacccagtcgccattggttttgagaaacggaactatcttatgcagagcccggagggcaagtctcagacccatgggttgaagccatggagaaggaaatttggatccaatgtaatgaagcgctttctaagtcagaatttccctgcaatggtgtggcctgattcaataaaaattaagaataataaatataatggaaaaaaatctccactgattgagtgtttacttggtgccaagcactatgctaagttgttcattattttatttaattgttacagcaattttgagtatgcatctttcactattttataagtggaaaagagaagtgcccccaaaaagttagagctcaaacagcagcttattctaccagcccctgctcttgcggaggcctctggaaaagacctgaatgacacctattggagaatcacatctacaaggggcttcaaacagaccaaatagatcatcacctctgtggtcccttgttaactatatgttctgagacaaaggaaagctaccctaagggttagttaacctttgctgaggaaatttacattcatacttagagtgaattactcaggtgtgcttaggtgtgcaaaagggaaggagacctgaattcaccaagttaaatcttgctaaaccttatcataagcattttttgagcgcttagcatacaccaagccttgtggaaggtgctttcctgccatatctcatttaatcctcacagcaaacctatagaatatggcattatcgtctgagtctcacagaagtttagtcgtgtactcaaggtcttaccagctagtgaacagcagaccaagactggaaacccaggatagtctgatacctgagccatctcttcttgtgctacgcctagttattctgtcccccaaatcaaaaggcatgacctttataagaggcgctttactgacaatagctgcaattttaactttgaaaatgattcagaattatcaaagatagtagattcgaatgacatgattgtctataatctcgctagccttgtactgtgtgtgcatagcaattacagggaagtaatctagctcctgactattatgtcgaactatgtcgctgctttttacaaacttgtcttgatccaaagcagtcacaatgataaccctgcatatctgggaatcataagtcaactatgtatccctgtgtgtgtatatatatgtatgtatgtatctattttcaaactgtgatttaatatttaaatattcctactgccatttttgtgactgaaaaactacacatgaggaaacgtcttagaattttccaatagaggaaaaataacacttgggcaatctgtcatgtttcacaacagttctcatttttctcatgatttgtgtagcgtggaatgtgtttgctcaatgtgaagggttttcattgctcaatttctctgtgtaagtcttttccttaaggtaataaaccatcagcaaagtc

SEQ ID NO: 16364 - DNA, 2672 bp, Homo sapiens
tggcttgatgccatgttaagaatgatgtgaattcttcccagttctgccctggtgctagacattgccccatactttcaattagacactagctgtatctaaatagtcccactcagtaaacttacatcttgaaaaacaagaccagtaagaggccagtgaaagtactaaagaaagaaaccaatgttgtgtgagtttcaaagcagctgcaatgctgtgtaaaagtagagtgttcattctccatttccaagagtgtttcagaataggatgtcttaagacttcagtcatgtcagagatttttttttttaggtgattattgagtttctccttctcctttaagtcatcaccttccttttatgaaatgatagtaaggaactcgtctattctgaaaggcatttgagaaatagctgaattcctggctgcttttttgctgggggtagatggtggaatacttctggtctagatataacttaccactaagaaacccccagtatgtcaccactgcctaaatctaactagaccagggtccaaatgccatccaggccaggcaggaaatatacctcatgtgaaagacagtaaggagttgtgggcagtgtaacaaacaggagagctatgccccaactaaaaggagcagctgctactgcttagtttcagccagttgcaacagtatgtgggaatgtaggctgcatggttgttaacaagatagatggtaaaaagatgccagaagatacagaagatagcaaagaatgtggggaatttggataccacacatagcgagagacaatgaagcatgcttcccagctcgccagagtgtcacacagctgctcattctgccacctgccagacattaatgtcttcctgccctacctaaaccccctctttacctgatattttaattcgagactctagctacatgcccacctacttaacaggtactagtgacaggtacaaaacattatgggtaacaattctgagtgtttaatgcaagcccaggtgaagcagggtagcttccatcagcaggtacagacgttacgctgaaaagaggtgcattctgcattgcactcctggatctaagtttctgtattctcagagcatcaatgcagcaagcttattgttcctcaattttttacaatatttatcacaactctgggagaaaacaaaacaaatcctatcctatttactatttgtgctacctagtgaggagataccgctctgtttagacaaattaaggcacttcacattcttccaccaattgaaagttttgtatcttacagttctttttttaaataatatatttattgagcactttctatctactagtcactgtgatacagtataagtaaagtgggttgtctcatttaatactcagaataaccacatgaagtatgaactgccattatctttcccctttgtacaaatgaggaaagtgaggctcacagaagttaattggcccagggtcccacaactagtcagtgcagaggtgggaaacataaccagatttgttcggcatgaacttgtgccaaatttcctccaaagttctcaaaaggcaaggcatgttattttatcccaatttagcataccaacaactataatactagatatgtaggaaagtgcttaataatcgttttttactgatgattcagtgtctaaattttgaacaaatttgggtaagatacaagtcacacataaattgacagaaaatgtagttcttcattcaatggttagcagtcattaaaaggtactttccctttgtttgtggtgataatcagtattagtagttttcatattatttggcttccatattaatcatttttatattttcttctccttcttaccatgtttacttatatcatccatcttttagaatcccagggagctaatttctggtccctgtgttgctatcaaatctgtatcttgcagaaagaataatttatttcaaacaagggacatacaatagaaagataagacctactgaggtctttttcccatcattttattatgaaaaatgttcaaacatacagtaaaattgaaagaattttatagtaaatactgaccacggggattctacatcttactctacttgttttattattttcctatccagcgtactttttgatggatttcaaaataaattgcagttgctgatatacttccccctagtacttcaactgcagattattaactagagtttagtatttatttagtttttaaatttttttgatttaagatttacctgcaataaaatgtacaaatcttaagtataaatttactgagttcttgcagacatatacacctgtgtaacccaaaccctttccaaaatttagaccattgcaatcatcttcagaaagtttcctaaatccctctcccagtctatcccctccccacccctcaggtataactactgttctcattcttttatatcaaaggttaaatttacctgttctaaacttcatatgagtgaaattatacaaaatgtaatgcttctttcacttagcataatgtttttgagatttattcatgttgttgcatgtgtcagtgattcatttctttttattgctgagtattctttcgtatgaatatatcacagtttgtttttttatctttctgttgatggacactgggctctttctgcttgttttttactgttatgaataaagctgctatgaacattcttagac

SEQ ID NO: 16365 - DNA, 2281 bp, Homo sapiens
  CDS (104)..(1648)
aaaattctggccatttgccctccttccccccttcgtccgctctcattggctctgctgcagccctgaccaacgctccaataggccgggatccagccatacttcaatggatcccaggggtatcttgaaggcatttcccaagcggcagaaaattcatgctgatgcatcatcaaaagtacttgcaaagattcctaggagggaagagggagaagaagcagaagagtggctgagctcccttcgggcccatgttgtgcgcactggcattggacgagcccgggcagaactctttgagaagcagattgttcagcatggcggccagctatgccctgcccagggcccaggtgtcactcacattgtggtggatgaaggcatggactatgagcgagccctccgccttctcagactaccccagctgcccccgggtgctcagctggtgaagtcagcctggctgagcttgtgccttcaggagaggaggctggtggatgtagctggattcagcatcttcatccccagtaggtacttggaccatccacagcccagcaaggcagagcaggatgcttctattcctcctggcacccatgaggccctgcttcagacagccctttctcctcctcctcctcccaccaggcctgtgtctcctccccaaaaggcaaaagaggcaccaaacacccaagcccagcccatctccgatgatgaagccagtgatggggaagaaacccaggttagtgcagctgatctggaagccctcatcagtggccactaccccacctcccttgagggagattgtgagcctagcccagcccctgctgtcctggataagtgggtctgtgcacagccctcaagccagaaggcgaccaatcacaacctccatatcacagagaagctggaagttctggccaaagcctacagtgttcagggagacaagtggagggccctgggctatgccaaggccatcaatgccctcaagagcttccataagcctgtcacctcgtaccaggaggcctgcagtatccctgggattgggaagcggatggctgagaaaatcatagagatcctggagagcgggcatttgcggaagctggaccatatcagtgagagcgtgcctgtcttggagctcttctccaacatctggggagctgggaccaagactgcccagatgtggtaccaacagggcttccgaagtctggaagacatccgcagccaggcctccctgacaacccagcaggccatcggcctgaagcattacagtgacttcctggaacgtatgcccagggaggaggctacagagattgagcagacagtccagaaagcagcccaggcctttaactctgggctgctgtgtgtggcatgtggttcataccgacggggaaaggcgacctgtggtgatgtcgacgtgctcatcactcacccagatggccggtcccaccggggtatcttcagccgcctccttgacagtcttcggcaggaagggttcctcacagatgacttggtgagccaagaggagaatggtcagcaacagaagtacttgggggtgtgccggctcccagggccagggcgccggcaccggcgcctggacatcatcgtggtgccctatagcgagtttgcctgtgccctgcaaggtggggcctggccgagtgctgcccactcccactgagaaggatgtcttcaggctcttaggcctcccctaccgagaacctgctgagcgggactggtgacccatggctgggggtgctgaggagagccgagttggactggctacccctcctggccacccagtactccctccagcctcagctggctgaacctcgccgctccaaccaccagcttcctcagcgagcagggcccagggctctgggcctgaagcaagagccagcccggctcccagtgtctgcccggctcccagtgtctgcccagccctctcccagacaggagcaggctgccaccccttctacctcaccactgcccctcgaagaattttgcaaatggccccttgccccattttaagcaggagcaggtggctggtttgaagccccaggtatcccccttccctgctatgggaaaggccaagctgctgggtggggacagaagctgcaggggagagggaagcagccgtgctgtcaacatcatccggcaccctctggggtaggagaacagccattccacatgtgttccctctatccgtcctgcttcctgggcagctggtggtgctgggaatggggtgccccagccttggtgaggacagtgttgggaggcccaggggcccagtaaagtgcatttgacattg

SEQ ID NO: 16366 - protein, 515 aa, Homo sapiens
MDPRGILKAFPKRQKIHADASSKVLAKIPRREEGEEAEEWLSSLRAHVVRTGIGRARAELFEKQIVQHGGQLCPAQGPGVTHIVVDEGMDYERALRLLRLPQLPPGAQLVKSAWLSLCLQERRLVDVAGFSIFIPSRYLDHPQPSKAEQDASIPPGTHEALLQTALSPPPPPTRPVSPPQKAKEAPNTQAQPISDDEASDGEETQVSAADLEALISGHYPTSLEGDCEPSPAPAVLDKWVCAQPSSQKATNHNLHITEKLEVLAKAYSVQGDKWRALGYAKAINALKSFHKPVTSYQEACSIPGIGKRMAEKIIEILESGHLRKLDHISESVPVLELFSNIWGAGTKTAQMWYQQGFRSLEDIRSQASLTTQQAIGLKHYSDFLERMPREEATEIEQTVQKAAQAFNSGLLCVACGSYRRGKATCGDVDVLITHPDGRSHRGIFSRLLDSLRQEGFLTDDLVSQEENGQQQKYLGVCRLPGPGRRHRRLDIIVVPYSEFACALQGGAWPSAAHSH

SEQ ID NO: 16367 - DNA, 2158 bp, Homo sapiens
  CDS (618)..(1046)
ggaggcaaacaacccatctctcttggagaatccacacttcgtttcttctaggtccagcctaaatgttacctcctccagggagcctttccagatactgcttctcctctctcccccaactccctcccacaaatgaagttttctcttctgaattccttgctggtactgtcacttatattcttttgggtagatctctgggcatgcatatgtcacctcctgtgactgtgggtttcttgacaacctaatcaatgcattgaacaaaggagatgtttagacaacccatataaaatgaataagagaaatagggtgaataccgtctaccccaattgcaatcagattagtttcctttattttgaaaacgattagaactagtagaggagttagatgtggcccactagggaacaaattttcatctccaagccgtcctctggctcgatcgggtctgcactgggtctgcatcaacttgcgctggctcagagggaggctcagccccagcctggccttcctggtgcccactcccaacatcctgagcagggccgactctaggcaccccacgattagctgagtgatctagggcaaggacctaggcgtctctaagtcttagtttccccatctgaacaatgtggataatgacacgtacctggggtgggcaggctagagtaaatgggaaaatcaaagcgccagccagagcgggtcgcactgttagttcctgtattttctcctcctgcctctggtttcttccgttccgttctagctgcctgaagacccagcccgacagcgatgcctgtcagcccgcgtcgcccaccagggcagctgctctcccaactcgcatggggggcaccaccccgcctcggtgccctagagctgagcgcagccgcggctccacggggatcgccagggcctcagccctcgcggccggcggcgcgggagtgttgcggggcagggaccagagcgcgatcagagcggccacccccgatttaggtcgccagctttccagtcactgcgatggccactggggcgccccttccatcctggttaaattctcattgtgatccccagccctcttctcggttccccacacccaggaggccggttctccgccgctcaggctgggagaggtcaccgctccgggcagggtggacccccagctccgtctcggaggacctttcgccggaggcgagcaggaaggggttaaccatgagcctcccaccctcacctcccagaccctggtgccgggctaaggcctccgcttccctcctgaggtctcattaggaaaccctcaccgctattttcaacatttcctcaatcaagtgcctttaaatagagctgcacaaacagattggcggcaaaagcgtagatcttgtcacgattgagaccaatccagtatttcagccttgtttgctttgcaattacgggttggcttgtggctacggtgccaccggggcaaatctgcagccgctcgctttctcctctgcgctccgggcgggtggaggaagcgacccgcggagtcactgcagggaggagagggggacgcgcgcggggggaggcggcggagggcggaggagactcgcttgcaccccagggccgcgggcacgcagagctgtgttgaaggacatacttttcaggttcctgacagtcactgagctatacgcaataataaagtgcgtgattcgcgtgtggaaaccagtgtcgtgtccttaccggcttccttttctgtccaccttccctctctcttctacctccgtctcgcttttcttcagtgcatgttagcggtttgctggatttcccttctccctcgctgttcaactgctagcatgatttgttacattttccacagctgtttattcttgtttgactttttgtacaaagtcactttaaatctgctgcagaaagaataaagcacctagccctttggatggactcctgcaggcgtgtggctgtccctggcccacttttaattctttggagatggctcttctgtgtaaatcagctgctgggtgcgttcggtcacctcgtaggccagcctagtttgtatcagcagaacagtagtggactcgactcaggtcgtaagccttatatttcacagacaattaaatcttggctgctgttgaacaaaactgtaatatttactttgttctataccgagaagcacttttaaagt

SEQ ID NO: 16368 - protein, 143 aa, Homo sapiens
MWIMTRTWGGQARVNGKIKAPARAGRTVSSCIFSSCLWFLPFRSSCLKTQPDSDACQPASPTRAAALPTRMGGTTPPRCPRAERSRGSTGIARASALAAGGAGVLRGRDQSAIRAATPDLGRQLSSHCDGHWGAPSILVKFSL

SEQ ID NO: 16369 - DNA, 1698 bp, Homo sapiens
  CDS (357)..(659)
actttttgcttcaaaggacactagcaataaagcgaaaaggcaattaaaagagctggaaaaatatttgtaaaccatatatcaggtaacagtctagtattcagaatagataaggaactcttaaaactgaccaataaaaagataaaccatttaaaaaatgaacaaaaaatttaatagacatttgccttagtctgttggaactgctattacaaactaccatagactaggtagcttgtagtaacagatttatttctcacagttctggagactgggaattcctatatcaaagtgccagcagatttggtgtctggtgagggccttcttccaggttcacagatagtgtcttactaagttctcacatgatagaagaagtaggggtgctatccagagtctcttttataacagcactaattccattcataaggactctgccctcatggccttatcacctaccaaagtgcccacttcctaatgccagcacattggagattagtatttcaacatatgaattttgggggatacatattcaatccatagcctgccaccccttgcctcccaaaatttatgtttttctcacaagcaaaagacattgcatcccaacagtcctcaaaatcttgattcattccagcatcaacctaaaatttaaaacccacagtctcacctaaatatcatctaaatcagatatgggtgagactcaagatatgattcatcttgaggcaaattgctccctagctgtgacactgtgaaaccaaataagccatatgcttccaaaatacagtggtgggacagggatagaatagacatatccattccaaaagggagaaatagcaaagaagaaaagggtaacaaatcccatgtaagtccaggctacaagccaaactccatgagatcttaaggcttgagaaaaatcttttttggcttgatgctccttccaggcccactacagtgggactcctgccttcaagaactgctaggttagaggttctgctcccatggctctgtcaggcagggcttaggctccaagccttttggcagtcctgctgtcactattttgggtggaggagatctggctgattgtgcaatgatggtcttcccttttgaaaccaaggaaggcagccctgatgatctctggaatcatctttggggtcattcttccattgtcttagaggatcatacctggcttctgttgagatggctgatccatacaaatttcattagcaaatggttgcttggtcacatctttactgttatcttgttttgcaatatggatagtctaagaattttctaaatctttacgttctgcttccttttttacctaacaatttcatatttaagtcatttctctcttctgttattttactataagcagtcggaaggagccaagcctcactttcaacacttctcttagaaatagttttggggccgggcatggtggctcatgcctgtaatcccagcactttgggagactgaggtgggtggatcatgaggtcaggagttcaagaccagcctggccaagatggtgaaaccccatctctattaaagatacaaaaattagctgggcacggtggtgggtgcctgtaatcccagctactcgggaggctgaggcaggaaaatcgcttgaaacctgggaggcagaggttgcagtgagccgagatcatgccattgtactccagcctgggggacacagcgagactccgtctc

SEQ ID NO: 16370 - protein, 101 aa, Homo sapiens
MIEEVGVLSRVSFITALIPFIRTLPSWPYHLPKCPLPNASTLEISISTYEFWGIHIQSIACHPLPPKIYVFLTSKRHCIPTVLKILIHSSINLKFKTHSLT

SEQ ID NO: 16371 - DNA, 2051 bp, Homo sapiens
atgtatgatctgttggtgtacacaccatgggtaaggtattgcttgcacataatttgctctgcatattatggaccattgtggtttcttccagtcacttagatggaaaggaggttaaacctaggtactttttagcaaggatataaagtcaaattcagcatatgtttttatttttaggcttgacttttacaagacattaatctccatttgtacatatgttattttatttgtaaaaccaaatatgactcaacacctttttgatgagtagtgacttaactaagatttacaagtaatatttagacagattcagtcagacaccacttagccatttttacattccctctggttagatttggtacagtataattaagactttaatctgaaatttaaagtagttttaattctgaagaagttacatcctctgtattatttacatgcaacaaaataaaagtggattaatatagtaatgccatggtaacaatagagctatgtcttatgcatgaaggcaactttggatgttttaacacatttgactgactttggtttagtgaatgctgacaatgctgctctacttaggtttcctatgaaatttttaagaatggctatgagactgtatagaagcttctagagaactgaaagtcataatgcagagttgccttttctagtgcagctaagtggcggacctcaactgaagatatgagtttctttgggttcttggagttatcaaattgatcttgccattatgttactttgcaaataactgaagtaaatgattcttacctaaataaccacaacctgtacacatttgctcacaatttatagtagttattttctatctacctatatttaaaattaggatgattaaaaaataatttatagattttgtgactgtaatgatttacatatgcccaatatatgccttatttttaaataagtcattctgtataaagtcattttgttgttgttcagagaaatcaagatcttattcacaaagaaaaacattttataaattgatcgcattttctttaagtcaaaatgttaaactggaggcagtattaaactttgcaattaggagtttcagagatgccttggcataccacgaaaaacactgtcaatatccaactcattataaattgttatcagaattaacctaataactttaagtaaggacaagcagcatcctagcaacttgtagtagtcttgggttcccagcagagtatcacagttaacctctctgacaacttcatcagaatttccaagctgccaaataatcttcatagacctaattacagatttaaaaaaatttcctaggcgacgaaagtatagaaatgtgaatatgatgaatacattgagaagctgtactttttaattagttatattacttctggaagcacatatctaaggaatattttctaagactcagagggaaaaaaactcgttttcataggatcatctgaagatactttagtatatttgtgatcatttttatctattgcaaatacaaatgaattagataagtgccacatcctggatacatctcggaggggtagtgggcaatggtatacaaaaataccaaatataaaattttcatctgggggaatgttcaggttctaaatactaaattagatttcaatgttttgtgtttttttaaaaaaaatcatattgcaacttgttttattgtgattttctacaagtattaaatacatttaaagatctttttatcttaccaagaaataatttggaatagcattggtatatttgaccttttgagtgtctgtcatcctcagagaatggcccatagtgtgttgcctgtggacatagtgtccatagtccctttcttgtccttctgagatattttggtttgataacattttgttttttgtcttgatgcacagggacttttttataatatgagacttcagttggtattaataggagttacctacttaattctcccagtcatcaatgaggtaatcatcaattcctatagttcaaattagtcataaacaagagctacagcaagactgatagagtaaaaactatataaatacagt

SEQ ID NO: 16372 - DNA, 1685 bp, Homo sapiens
aagagttaaatgaaatactggttttttaaatggttagaacagagactgatgcacataagtattcattattataattcagtttttgcattctttaaagtgaagctgtgttgttgcagtattttaaggatatattgttccccaaatttttgggtaaaattgactgttaaggaagatgagtcatgtttaaactgtaattgtgagtagaccaccctttatccttgaagggctttctcaaccaggtgaatggcatggctgtggtgggaaatacagggccctgtgagacaggaaatctagggggttgtctagctccattaccatcctcttcttttatggattcagtgtcttgttcttttgttccatgtgagaatcatccctgccctgcctacgttataaagctggagaaaaatgaaataagtaaaaacacatggaaaacgtactaaaatattaatgcaaggatgcaaggtataatctttgctggaacattagttcctcatttattagtaacattacaggcatttgaaattatgtactttatatgggacctatattttaaatatatgctaatcatcctagaagccctacaaggtaggtgttacttttttccattttaccattaaggaaattatccaggtttacacaacttgaacccaggtctctgtcagtaaaaaactgtctactcttccaaaccattttatctatccatatttatttcctccatcaaacattagttgaatgcaatgtggtgtatcacccaaggtcggctggcatcttgaaaacaataactatgtgttactcagcatcttagcacctagcaaagagtggagaatataacagtctttcaattaagttttgtcgaagaaagaaatgaaggctcttggtctttagaaattcacaaatcagctgaggagacagacatactaaccaacagcatatgatcagcatgttctaattggtactgtctctggaataaaacagctggcagcaaaaaatgtctgacttttgcagagaaactcctaatatgagtttgactgctgtcccacatctacctatgtggtcgtagtgctgtagtcactgttgttaccctaagaggacagccttgttcctccaggtctcttacaactctcttttaaggagcttgtattagatccctagagctgctgtaatgcattgcccaaatcttgtgacttaaaccaacagaaatttattatctcatagttctggaggctagaagcctgaaatgaaggtgtctgcaggcttcactctctctgaaatttttatgagaacatttttcatgtgatttagagcccacctgggtaatccaggatgatatcatctcaagattcctaacttaattacacctgtaaaatccatttttccaaataaggtcatattcacaagttctgaagactaaggcatggacagatctcattggaaaccatcattcaacccactgcaaagctttagccaattcccagctatgaattcttccaagatgaaaggataccaagctcaagactctcccttgttcatttgaggccttcccaaagatgactgacattttcacaaattttatttggtttcatttcctatcttaacgaaaacaatgataatttcctatcttaatgaaaaaaatgataatgtttatactgtatgataattaaaacatcatgtaaagattactcttt

SEQ ID NO: 16373 - DNA, 1438 bp, Homo sapiens
ttctcctttcgcctatatgtaagtatgtgttctgcaggctgatatcataggccaggttaccataggccaagttaccaggattaattacaggtcagatcacaatgtaataagcactaggaaagcaaatttttggcctactcagttcaagaagtgttcactgtcagaatttaaaataagtaaatgacctcagagacaatccagtccaagtcccttattttatacttgaggggactgaggcctgaagagattgacttgtctaagctcctagcagttagaagaaccagaaatagattgcagattgccagatatccaaagaatctggtatcttttcttctactataatggactagatgtagtttttaaatgaatcagcaactggccctatacctggcaacaaagtgagcactcaaattgtcaaaggcacaaaaaggccagatgtaacatggcgcccacctcttccaaggtcagtgggggggttttcagttgccacttgaggggaacaggtgtagaagagtagtgagcaacttacagctctccaaccacgctgttgcaggaagctccgagatgaaactaccttctccttctgtctggagagtgactggcctggaggggtgaaggtggaccttgctggcaggggactcgcactagtctggaggagacagattcagcagctgaaccgagtcagcctggaaatggccagtgcagttgtgaatgcctatccctccccacagctcctggtacaggcttatcagcagtgtttttcggataaagaacgccagaatttgctcgcagacatacaggtgcgccgtggggaaggtgtgacatccacttctcgccgcattggaccagaactatccaggcgtatctaccttcagatgaccactttacagccacatctctctttagatagtgctgactgattctagccctcagggatgaggatgaaaagctggaaacttccacttccccaacctcagagcctgactgtaatgaagagactggcagcacctcctggaacacaagcctaggtgaggcccagtctttcttgggtcttattatttgtgaaggtctctctgcctgtcggctggggcagagactgaaatactgccacctacctttggcatttaatgttcctctcctggcaaaaattcactgccacagacaaaccacccccactcctacccagccagccctcaaaacacaaaggaacaaagacagtccactcagacacttatttaataactgtagaaatccaaaagaattagcatcaaatcttgaagtcgtgagtgaagctgcgggttggcttgactgggctcagccactgagctgcctcaaccggccaaggaacgggattatgatgactatgcggacttctatattgtcttcatctcattgtgtgtattatgtatttagtttcaataaagcatttgtaccaatg

SEQ ID NO: 16374 - DNA, 1965 bp, Homo sapiens
  CDS (350)..(673)
attgcctccccgacccacactggctggactactgcccaggacagaagaggggggttggctgtgagtggggaggaggtggaagcggtagattcccagcacaaccttcttcctcccacccccaaaacctccatctgaagaaggcctgaggaagctgtcaggctgcctgcctgattcatcccttccctctgggcgtagccactgagtctgctgggctgatgcttctgaatacaaactatggcacctggaaggcactgcagagaaaggggggacctcagggctcccattccatcactcttgagtctaggtcataccctccacaatccccaagaggcccgtactgtctcttctgatgggactcctgggttctgtgttgcccaccctgcaaatctgcatgccagcaagtatgggtgacccggctggctgctgggtcaccttcatttgggtgctagccttgctgccttcctttggtgctgttgagattgtccttgccgtgttcactcccagcgcaggcatgccctggccccaggctgtggctccgattcactcttactgccatgctttgttctcattttttgcttccacagtaagtctgcacaaaatactgtcctcacagctgagcttacctggtgatctattcttttttctcggtcactacttgtccagcttttttttttagacttttggagacagtgattgacaacagaacctagcagccagggctgcgctagtcccctagccccctccagagcctgtgtcaggcatatgactgactgcatcctctcccctctctctcctctctgccccagatcagtggaccatcccctgcccggatcctctctctccacagactatggcagctggcagatggtaacgggctgtggcagtattcaggagcgggctgtcctgcacacagactcctctctccctttcagcttcccggatgagctccctaacagttgtctgtaagtgtcttgcttgagaaggcaggatgctcccctgcccatgggaaaagctggtgagcagtcaggagtgctgggtaggaatgaggctggcgctcaggagctggcctggcctcctgccctcccctctctcagctgctggacccgaggtatgaaggaggcctgtggctggtcaggaagtgcactggtttgtgtgttcactctgcagcctctaaaacccatccactggtgtctcaggtgcacccaaagggaaagctgctggactgtaactatagaagattctatttctgtataagcctttgcctgacatgagaatcgtttgaaggcagaacagtgggatagtgaaggtaggtgtatggtggaggccagagccagagtggtgctgggttagcccgaagctttgctcctgagcagaacctagggttacttgctgtctctacccgccttgtcttctgtttttgcctctgggcaggaataagaattggatggggattctagatcccacacctacaaaaccctgagtttccagcccttaacagtgtgtccacctgactggagcagctgcctctggggaaaccacctgcccctggcctgttctgccgcttcatggatgtcaggcaggagaaagcctctggtggccaggggagcaagccctgctcctcagctgtggtgcctgagggcctctcagcaagccttccataccatgggctggatgaatggcacatgctggggccttaccaccagcaccgcaatccagctcatcccccccacccctgttggcaggtgggaggcagggtgccttggggagttgggaagggaaagggggccctggatcctagctgagggcagtcaggagccagtcagaccttgaaattccaggatggcacaggtcctggctctgcagctgtgaagtcatcaaagagcttctgaggtcactgtgcctggcacagcctcctctgcagccagcccctaggctagaaacaagatcttagatgttcgaaggctt

SEQ ID NO: 16375 - protein, 108 aa, Homo sapiens [sequence omitted]

SEQ ID NO: 16376 - DNA, 1935 bp, Homo sapiens
aatccattgcagctcgtcttatcaatgctacctttttatttttttcttttttgagttagggtctcactctgttacttaggctggaatacagtggcatgatcacggctcactgcagccttaacctcctggggtcaagccatcctcccacctcagcctcccaagtagctgggactacaggcacatgccaccacgcctggctaatttttgtattttttgtagggacggagtttcgccatgttagccaggctgcttttgaactcctgagctcaagcaatctgcctgcctctgcctcccaaagtgttgggattacagaggtgggccactgtgcctggccttctaatcaatgatacctaattctgtcttcggtcagtggaactcaactcaatttgtctcctgagtccttttgaaactattctaatcttgtcagtttcctcgctttctggtatggtaagatttccaggatcatgttgtacattttcagtccagatctgaaatcagtcatttctccaaggagccctggttttgttggaaatggtatttagcaaccagtctgggcaataagcaaattcattgccacttgtttggtcataggccttttcggtggacagagctaggaaaatattacctgattctccctctagccacacaaatcatgttaccttctggtcatctgaaggtcctctcttctccaagcggaaaccctctcaaccctgcctcagtcagtgccacagttttgaatctcctaactatatgttgtctttctgcactcttaatttgtgagtgccactcttttttttttttttttttttctgtgacagagcaagactgtctcaaaaaaaaagaaaaaacagaaaactacgtgggggcgagtgcggtgtcccacacctatgggaggccaaggtgggaggagttcaaggagttgaaggccaggaggcagaggttgcagtaagccaagatcaccccactgcactccatcctgggcgacagagcaagactctgtctccaaaaaaaaaaaaaaaaaaaatgccttaccagatgtgtggtagattacattactataagaaatatttattgtctcccttttctgcatttatgagtacttccctcacttgatgttggccaatggaatttagcaggcatgatctatttggtaggctgaatgatgccctcccccaccccccaaaaggtccacgagctaatctccagaacctgtgaatatgtaacttaacattgtaaaagacactttgcagatgtaattaaataacgttctggagatgtaattatctggctaggcccagtgtaatcacaaagggaggctttttttttgactctccagcctcccttataatctagagaggctggagagtcaaaaatcagaaaaagttggtgtaaaactggaagcaacagtagattggagatgctctactgtcagctctgaagatggacggagccacggaacaaggaaacggattctccctaagggagcacagccctgccgactccctgactgggcccatgcctccctccctcccttgattggcccagtgaaacccatttctgacttttgacctccagaaccataagacaataaatttgtgttattaggttggtgtaaatgtaattgcagtttttgccattactttgaaaatattttaggccgggcgctgtggctcacgcctgtaatcccagcactttgggaggccgaggagggcggatcacgaggtcaggagatcgagaccatcctcactaacatggtgaaaccccgtctctactaaaaatacaaaaaattagccaggagtggtggcgggcacctgtagctccagctactcgggaggatgaggcaggagaatggcgtgaacctgggactcggaggttgcagtgagccgacatgtgccactgcactccagcctgggtgacagagcaagactccatctc

SEQ ID NO: 16377 - DNA, 1574 bp, Homo sapiens
cattttaaaaagaaacttctccaaaactacattagatatttatatctcacatgtctttagattccattttcctaagctgggtttgggtggatcactctggtaatatgagatgggccatgttctgcatcttgaagttagagtttggccaatttaggctacatctggagggggtgatctcattctcattctgcttctgggaatggtgtactagtgtggggatgtgcttgtggtaaatggagaagagcaagaaactccaatgtggaagccatctcaaagacgtatacaaaatttactaatttccagttcatcaaagcaaattacatgagtgagctcagattccaaggtcaaggtagtcaccctgcctatggcaggaggacactgcaagataatatatcaaaggatgagggagtcaagagtatttacaaaacagctgaatagtttaattaaataattaatatttaaacattaaatagacttgagagtaactttaccaaaggcctaagcatgagaaatatgtttgatagatattattctggtctgaaaaccctgagtgggaaaacagaactaattccacctggatgaccttctggaaactcattttttcatttttttaaattaaaagaaaataattccttccaaccccaatgggtttaagtgtgtgtttttgtgtttatgagcttgttaacaataaagtcatataaaagtattggttagcagcaacctgattttaaggcgtattggccttcttgtggttcccaagaaaaccttggatgattttgataaaaggtttgggttctgtatatttaaatctagcattaaaaaataaatccatatttatacgatcctaggtatgaccaagctcttttaacaatttagacatttactgtatgacatatgtattgggttttaaaatttccctatgaaacaactgaaaatgctgaatacaaattatggagaggttaaacaaggaaaaacattgcaaaacaatgaaaaagaatatgtctttttttgcatactagcaaacgggaattcacctttcacttcaacatcacttttaaaaatttcagcgtatagcaagaacagacagtggaataggattcaatttcagctattttgggaataagaaaattttccataaatgcagcattgaactcatccattagcatatgctggtgcttttctgttgacattagtcaaataatttagaagcacaaagaatattattacacatttaggaatgaagtgtatatccaatttaaggtctagatattaaaggaatcacaatctgtgttattaggcctgcatttttcctttctttttgtctcttcagacatgttaaaatttctacttatcattttgtcaactctgtgtgtttgcattcgttcttggaaatttgtctccacaaaaatgttaaaattagcaggcttgctggtgcatgcctgtagttccagttacttggcaagctgaggcaggaaggcaagagtatcacttgtgtccaggagctcaagactacagcgaggtatgattgtgccactgcactccagcttgggtgagagagcaagagcctgtctcag

SEQ ID NO: 16378 - DNA, 2075 bp, Homo sapiens
gaaacagaaacagaatgcatggctgctcaaaaagagtatctttttgtgctttcttgagggagagggttgtggaggggaaaccctccaactcgggctggctaacagggatgcttccttatgaaacgtgctcacctaagaataccagtgagaccatcggcactttctgtaattggcagcaatagagctattagaagaaacatgaaagagatagatggatctgaaatcaacatttgtaacaaaaggcctcaccatgttccccagcacaaatgtgctactgattagcagctaaaatgtgagcatccctactcaaattcaccctgttctccccatcctgaaggttctgatattaatgcataacattgtagcttataatgcttttacttaacattatcttattcatgcatcatcagagaatgatctaccaaaatgtatggagagaaagctaaaaatgtaaagtggctgttctcaatcttagctacatattagaacaacttggggagtttttaaattctgtgataaccacactgccctcagaccaatccgaattctggggcttaaatccaggtggagtgctagccacatgtagagcagctttctgctttcatatatatctgggcttaggcctcggtgagggttgggaagggcctatgacctctgaagagccttcacattacagcccaggaacagctggcccacagcaggagagatgcagagcctgaggtggagggccaagcctggggaatagggggtgctttgaagagcgtggtggtgaatggaggcttaatgaagcagaaactctactgctgtccagctgccccaaattacctgaatttagaaaggaacacaaagttacagtgagtgcattttattttagctcagacaaatccaacaccatggatagaaggagggaaagtaaagatcccattcagagccttcctcctccaagaattgaggggctttctcatttttctctctgtaaaggatcatttcataattcagctctcttacttttataagccacttttaaaacccacattcctgtgtgtatttatatctatttctgtgctttctattctgttctattagtaatcagtccattcaagtgtcagtaccatgctgttttaattatggaggctttatactgtgttttaataactggtcaagctatgtcccttactgtgctgcttttttcagagtcgaaaaagatttaataaaatcacaaatttaattggatttaatccttcatgtaaacaatatacaaattattttcctccttgcctctggttcttattcttttttaatcatctttggtgaatttttttctttcatataagatcttaggagtagatggagaggagtgactaaatctcacaagaacagactcaatattaccacacagtaccgaggggaaaatccacccccatgattaaatcacctcccaccagaccccacccctaacaccgagggttacaattagacatgagatttcagtggagacacagatccaaatcatatcagctactttggaagacagtatagaagtttctcttaaaactgaacgtactcttaccatatgatccagtaatgatactccttggtatttacccaaatgagttgaaaacttaacacacacacaaaaaaaacgaacccacacatggatatttttaagagtttcagtcataattgccaaaatttgaaagcaaccaagatgtctttcagtaggtgaatggaaaaataaactgtggtatatccagagagtggaacatttttcattgttaaaaagaaatgagcaggccaggcacagtggctcatgcctgtaatcccagcactttgggagttcgaggtgggtggattgcctaaggtcaggagttcgagaccagcctgaccaacatggtgaaatcccgtctctactaaaaataaaaaaactagccgggcgtggtggtgggtgcctctaatcgcagctactcaggaggctgaggcaggagaatcacttgaacccgggaggcggaggctgcagtgagcagagatcacgccattgcactccagcctgggcaataagagtgaaactccagctc

SEQ ID NO: 16379 - DNA, 1305 bp, Homo sapiens
gttcagctaagtactagggaggcttcattagtcatgaggatgtttttatatataaatgtagcaaacatatattacagttttcactgtgtaatagattatccataataattcataaatattcctgctgaagttagtttgtaacttcaagtcaaagatgaaaaatatcaatggtgaagattgattgttcatatagagaggacgttttttttccagactgtaaaactgaatcttgttgaatttaaagagaaattctggcagaggcagatgaatcacctgaggtcaggagtttgagaccagcctgatgaatatggtgaaacccagtctctactaaaactacaaaaatagccaggcatggtggtgggtgcctgtaatcccactcgggaggctgagtcaggagaattgcttgaacccggaggtgaagattggagtaagccaagattgtgccgttgcactacagcctgggcgacagagcgagactccatataaaaaaaaaaaaaaaaaaaaagctgggcgtggtggctcacacctgtaatcccagcactttgggaggccaaggtgggcgaatcacttgaggtcgggagtttgagaccaggtgaccaacatggagaaactccatctctactaaaaaatacaaaattagcccggtgtggtggcgcatgcctgtaatcccagctactcgggagactgaggcaggagaatcgcttgaacacgacaggtggaggttgcagtgtggcgagattgcaccattgcactccagtctgggcgacaagagggaaactccatctgaaaaaaaagagaaattcttttattttctacttctcttcagatttgtcttatgcattttccaactatgtatgcatcacagctattctttttctgagttatagctacagttttcttactgttgtcttcatgccatttcatttcacatggtactttgtagattttgatgaggaagttggtatttttagtgcacacaaaaattggttttaactgtagagtttgcttatcagaacagttaaaaggcagccaggtgtggctcacgcctgtaatcccagcactgagataggtcaaggagggtggatcacttgaggtcaggagtttgagaccagcctgaccaacatggtgaaaccctgtgtctactaaaaatacaaatttagccacgcgtggtgacgcacgcctgtaatcccagctactcggaaggccgagggagcagaatcgcttgaacctgggaggtagaggttgcggtgagccgagactgggccactgcacttcagcctgggcaacaagagcgaaattctgtct

SEQ ID NO: 16380 - DNA, 1938 bp, Homo sapiens
attttgttcctcagtaagagaaataaagaaattcgcagccctttgttttaagaagggagtgttttacatgctttttttgcttttttttttttttctcctaccctagcgatgacctcttccaggtagcggtcccttgtgcgcggttggtagtacccagggcttagagcgagcgcgcacccggggctgcggtggaggctcctctgtgagctctacctgcctcccatcccgaggcctaggagaaggcgggtacctggccgccagctgacgccctggtggtcactgtggccctttagaaacacacagctccatttcataagcaaaacctcctcccccagccccggctcaagcaccattcacactgccatccaagccgcgggcggccgtggaaagggcactggaccacccgtctcgcgggcgccgtgaggtacagcgatggctcccagtgccgggcagttcaggtgacaggagctttccaaagacacctagggtccaaaaagcagggttcccatctcacaatttggatttgctcatagaggagcagataggacaggctgctcacatttctcctttgaaggcacttccacagtggactgtcgctggcgggcccctgggcggtgaccatcggtgccccgggagacagcgaggaattgaccctttggtcactgtgtaagcccccactaggctgctgctctttccaaagggaaggggctgggggaaccaggaaggaagcccacccccacacctgcatctgtctgggttcagccaggtaaagggactcactgtgatcgtggcccctccacggggcaggacgaccctgcctccgtctcgtgacacaatgagggagcagcccgatccctgagcggtctcttttttggtgcctcctacatttcttgaggaaaaaaaaaatgtgtccttagctaccctgttttgagcagcaatatgcagcctcttccttccaagattacctccggagaacaccgttcttggccaaggacactgaggagctaaatctgcctcactaaggaacgagcttgtttccaagaaatgaggataagatgggtaaaatcctcactaacaaagaatactataaaacctgtgagagccttagaatagcttctaataatcctaggacaggagaaagcgcctggctttgctgtgagtgtatcctcagaaaaagcaggaggtcgaccatctcttcactggagccagcttctcctctagaaacgatgcttttttccctaactaaagagcagcaaaaacaaaaaaagggggggcgaggggattttttttacttgtttgagaaattataataaaataattgagtatctcctgtgagtaatgcctttttgtttttaattattccacagcaggtggagttttcagtaatttgttcaagttttgcataagtggttccttaaatcaaaaattatttattaaataggatctttaagaaattttttgaaagttttacttttcctgctgaacaatattttcaatgtgtggtaattactgtactaacatccatgtccctaatattactggggtttcttttattactcagaaaacaaaagtggttttttaaaaatctcatggagagggtctgtggcagctttctggactgattcttcgtgtcacgctgagcagctgctttggcatccaaagctgtgggatcacagaaagtgttgcttcaggtgtggatgccagccactcctcatgctcgtcactcttaaaagattgagacacccaaccttaaaaatgctccaataatccattcagaaaccaaactcatatgcacaagatgtcagggaggcataaagtcaattcttgcttgtttttttcatttcttaatgtaaaaacagccaaccagaaatttctaaaactggctatgctaattcagatattttctttctcacgctatctgccaggtttgtctaattt

SEQ ID NO: 16381 - DNA, 2062 bp, Homo sapiens
  CDS (387)..(941)
atccatggcacggagcggcggcggcggcggcagcaggagcccggcgcgatccgctaggtcccagcccagcgcccagcgagcaggcgacgcggaggggccgggcctccagtgtcccgagggccgggcgctgagactccggccgcgcagctgggagctgcccgcgctgcgctgacagccgcgccgacgtcctccccgccggggcgctcgcaggacatgcccccggggcgcggcggcggggaccccggggctcgcctccgcccagggcccccctccacgccctcgggagccccgggcccccgctgagcactcctcccgcacgcctgggtccctccggccggcgcgcagcccggccccagcgctgtgggtccccgcggggcgatgggttgatgggcgccgggggacgcaggatgcggggggcgcccgcgcgcctgctgctgccgctgctgccgtggctcctgctgctcctggcgcccgaggctcggggcgcgcccggctgcccgctatccatccgcagctgcaagtgctcgggggagcggcccaaggggctgagcggcggcgtccctggcccggctcggcggagggtggtgtgcagcggcggggacctcccggagcctcccgagcccggccttctgcctaacggcaccgttaccctgctcttgagcaataacaagatcacggggctccgcaatggctccttcctgggactgtcactgctggagaagctggacctgaggaacaacatcatcagcacagtgcagccgggcgccttcctgggcctgggggagctgaagcgtttagatctctccaacaaccggattggctgtctcacctccgagaccttccagggcctccccaggcttctccgactaaacatatctggaaacatcttctccagtctgcaacctggggtctttgatgagctgccagcccttaaggttgtgtgagtatctcttcctagctcaaggacccagacccctgtccctttctctgcccaggagagatgtataagtatcatgaccaccaggactggtctcacgagtggccacagcagacagtgcctgaaatgcccccatgatcaccttcccgcgatggcccggggcagagatggtacttaaaccagacagcagggttcagaggtggcacaccgggacaaagctgaggccctgcacctcaacagctgactgccaggtgcctgtgggtgaactgaggggagtagagggagagggcaggtggaactggggcagaatctagtcatgccctaaagctagtcctgtaaacaatggtgccccagaaagctgcaggtggtgtttggagaagcagttacttttcagttacaagacccatctccctagtctcagccttacaacaccacgggactaaggaagagcacttccttgcctccgtaaggccagaggaagaaccatcccaatcatttgatctccagctccacagtagagagaaacctacaaaatgtcaaaccagcttcccgactcccaggagctcaagccaagcccagaggcagtggctggggtccctgcaggtcatgaggggcctatgcctttactccttttaaacaccagcacccgtcttttccccaacctaaaaccaaccaccagcatttcactacaggaccaaatggaaaccgagggaaccctgggtcttgggaagaacaacaggaaaccaaggtctgacctagggttccctcccagtcttcacatcactctggcctcatcaccaaggtgacagaggacacaggggagggggaaaacccacacacactccttggaatgggtcctgttatttatgcttgctgcacagacatattagaagaaaaaaaaaagctttgtattattcttccacatatgctggctgctgtttacacaccctgccaatgccttagcactggagagctttttgcaatatgctggggaaaggggagggagggaatgaaagtgccaaagaaaacatgtttttaagaactcgggttttatacaatagaatgttttctagcagatgcctcttgttttaatatattaaaattttgcaaagccctttgagctac

SEQ ID NO: 16382 - protein, 185 aa, Homo sapiens
MGAGGRRMRGAPARLLLPLLPWLLLLLAPEARGAPGCPLSIRSCKCSGERPKGLSGGVPGPARRRVVCSGGDLPEPPEPGLLPNGTVTLLLSNNKITGLRNGSFLGLSLLEKLDLRNNIISTVQPGAFLGLGELKRLDLSNNRIGCLTSETFQGLPRLLRLNISGNIFSSLQPGVFDELPALKVV

SEQ ID NO: 16383 - DNA, 2035 bp, Homo sapiens
cattccaaatggtcaacattggctcaacactgagtgagaagaaaaggcagaagaaaaccaaagggcagaactgatagcttcaggtcagtctgagtgcagaatgaaagactcagctgtttttattatttccagcttgttgaccttgctatacattcacagaagtttgaacttttctagataatcagcaaaacaaagcaagatgagaagagagtttgaagggtttgtttaggctcctctttgtagacttagagcagcagtttcaaaattcagttccagcagcatcaggtcacctgggaacgtgttagaaatgcagattcttgtgccccattcaggcctactgaaccagaaactggagagtggggcccaggaatctgtgggctaatttttttttaatgttgtagttatatatataaaacatagcattttctattttaactgtagaattcagtgacattcacagtgttttacaaccataaccactatctgtttccaaaactttttcatcaccccaaacagaacctttgtaattattaagcaataattcctcactccctccaatccccagccccagataacctctaatctccttctgtctctatgaatttgtctattctagatgttatgtacaagtggaattatgtggcctttttagtctggtttattttgcctagcagaatgttttcaaggttcctacatgttttagtatatagcaatacttcgatactttttatggctgaataatattccattgtatggctataccatgttttgtttatccattcatctgttgatggatgcttgtgttgtttccaccctttggctattgggaataatgctgaaatgaacactggcatacaaatatcagcagtctgtcttttaacaagctctccaggtgactctgatgtacactgaagtttgagaagccctgaagtttccagagaccaagtgctgtttttaaacaggaactcagaacgctaggtggaggctgtgtgccctactgcagctttctgcatcccagccaggggtcaaggctgtagccacttacatcttatttctgctgccaagatcaacatttagagtttctcgaaggtcctaagactagacccaggagaaaaatgcctttctggattaagggttctctttgaccttgtttcaaggtgatgtttcaaaatatttcaaagggatggcagaaaaacatttattaaaaatacatagccattcagttgtttttgactagactgtctggactcagatgttttatgttactccatgattaccttgatattagatataagaatgactcattctacttttatgtagagaaatcaggtctgttttctgagaattatagaagtagtaagtgagaggaaaaggagaaagaaaaaattgtttgttataagttcacagatacttggcttatgtttgattatgattgtataagaatttccaggttcaaagaccttcttaactaattccttcatgttcagaaaggttaaataattttattgcagttttacagctaggaaatgacaaagtcaggattagaatccaggtctaagtccaaagttgctgaataaatcaatttatactggcttctagaagcttaaaacagtatgcctttcagagatatttgggtttttaacaggggactcctggatatatcatattttaacctgaagaaatctgccttcaaaggtagaatatacctaaggcagaggaaggggaggccttttcaacaatcacaaaatgatccatgtaatctgcaagctcagctctagcaatctctgaggtgcaggttcagaagtatgttgtgtttcatcttgtgtcacatgttaagaatgaaatggaagtgtaaggcagagcagcctggcccatgatggtctggatgttatgatgccttaagtacagtaggagtaaggcaggcgcagtggctcacgcctaaaatcccagcactttgggaggctgaggcgggaggatcacttgaggccaagaattagagaccagtctgggcaatatagcgagatcccatctctac

SEQ ID NO: 16384 - DNA, 1653 bp, Homo sapiens
gttaggattcctggttttaaactagagaaaagaacatgtatcaagaaaatcataaggaagagaaaacacatttacagtactgtactgtatttattggtaccatacatttatgttgctgtttacaagatgaagcatctgtctgaaatggccagcagctacagctgtacctatctactgtacatatcaagcaagtcactttattcttataatgtctatgacttctctctttgaaagcgcttccatcatcactgttggcacttcatatgggtctcatggtgttaaggtttacggcattgcactagacacaatgaaaactacacaagagggccgggcacggtggctcacgcctgtaatcccagcactttgggaggccgaggcgggcggatcatgaggtcaggagattgagaccatcctggctaacacagtgaaaccctgtctctattaaaaataaaaaaattagccaggcatggtggcacgtgcctgtaatcccagctaatcgggaggctgaggcaggagaatcgctttttcccagaaggcgtaggttgcagtgagccgagatcgtgccactgcactccagcctggatgatagagggagactctgtcgcaaaaaaaaaagaaaagaaaaagaaaagaaaagaaaaacacacaagagccgtgagagagatagcttttgattgcaatacacaatttactggagagatgagctgatcatacagagatgattagtgtcacacagtgttttaaacagattcttgcaaccctggagttcactgcagtagcaacagaagttagctatgagattttaacagtagtatagtatgtactacagttaatattaggtagctatgatttaatgctgcatctttgcatttgtttacatttatcttgactacaagtggtattatgtctggtcttaaggtttgtgtgcatatgttttgatgaattttaactttttataataggtttgtgtatattttatggcagtaaatgataaaacagactaatctacatatattttatgtagtcatgacataaacctaactttttcttaactttttgatatttctagtctatgtgtttcatctgcaggttttttcaaattgttgaaatctctgaaaaattttattgaaaaaaaatccatatatgtaagtggacccacacatttcaaacctgtgttcaagggtcagctgtgtaaataattttcctcaaaattaaagtggaaaaggagagttactactagtagaaagtagaactgtacccttgggcaggggtgtgtgtgtgtagttaaagatcaatttaacttaaaaggtcttggttagagaataaaactggcccttattagctttaatttacatgaaaaatgaaaaattttaggccaggcacagtggctcaggcctgtaatcccttaactttgggagaccaaggggagtggatcacttgaggtcaggagttcaagacagcctggccaacatgctgactcacccttccctactgaaaatacaaaagttagccaggcgcagtggccatccctacagtgctagctactcgggaggctgaggcaggagaattgcttgaacccgggaggcaaggttgcggtgagctgagatcgcaccactgcactccagactgggtgacagagcgagactccatctc

SEQ ID NO: 16385 - DNA, 1973 bp, Homo sapiens
  CDS (700)..(1023)
gatccttttggttctgttcctttcatttctcattcaggcaagttacacatgtaacatcatcactgtcacaaataaaacacacaagaacaacagcaaaatcttataaagtggaagtaagactctgatgttagttagctacagaaagtagaaaatattttaacctttagccatcctactcttcttaatgatgttctttgcattgagttattattcagttgtatctttgccaacatagaaaaatgctgatttacacaatagaaacataactgcttcttttcatctttattattggatactgttgaaaaaaatatttaaagatatttttatacttggcttttgcttaaaaatttgatattttcctagtttgtacatgctctcttgtagatgcattttaaaagtattaatagttttgtatttgtcacaatcactttgttttactcttgtcttcttatatccctcttttgatttcaattcagaattcaaatattgatgtttttcactgttaaaaattttcagtaataatttcaaattacccagttaacacttggaagatactaggatggaataggatcgtgcattggcataaatgaattttcatgtatgtatggttatagtggaaaaaaagagttttaatcttggcaaagggaaatatgttagaagaagttatgctttattagaaggtaaaagttcgatatattcatggtaactgtcggccatgttcttcagttctgttccttttgtttctcactcaggcaagttacatatgtaacaccatttgaaaactacagaattaacaacaaaagaaaaacttacaaatgtaaagccaaaagaagaattgagtgtttaggatttctgctgagtacattgaacagcttttcaacattcagacttgtttggttatctggaatatacaggatagttttttcattgctttcatactccatatttttctctttgacatttattaaaaacagttcctattcttgctgttttctgtttgctgctttcaagttttctttttcataaatgacataattaactggggaacatagcttactgtgtctgtttacttattctgcataaatgtgttcccttatacccccaataccctgggtaatggaattattactgtctaaaattataataactcaaaatagtcattgtaagttctcaagaacatagtattcaatgacttgagatactgatctctgtgtggtagaaggcagtttcagtactagctcttttacatcctctgttaggaattgcattatccctttcaggtttgcatggacctatacaactacttctctgatgtttaatagcatctgaaagaaccctggggaaatgaatagtagagttaggagaactgaagtaagcttcagtgattggtcttttctctggacacccttatttggaggttggcctaaagattttgtacttcgcaacatgttcacaggtttgagctcgattgctgctattttgtttaactgtttactatgggtatttatattagattttaagctaattgagggtgggaaatatgaattgtctatctttgaatcctgcccagtatacaacccagtaggtacctaatactgttcattgaatgtgcagaaaaaaatcatgactatctataaaaattcatattccttagatttaggacagtggccttaaaaaaaatgcccattaatgggccgggcgcggtggcttgcgcctgtaatcccagcactttgggaggccaaggcaggcggatcatgaggtcaggagatcaagaccatcctggctaacacggtgaaaccccatctctactaaaaatacaaaaaatcagccaggcgtggtggtgggtgcctgtaatcccagctactcgggaggctaaggcaggagaatggcgtgaacccgggaggcggagtttgcagtgagccgagatcgtgccagtgcactccaacctgggcgatagagtgagactctgtctc

SEQ ID NO: 16386 - protein, 108 aa, Homo sapiens
MVTVGHVLQFCSFCFSLRQVTYVTPFENYRINNKRKTYKCKAKRRIECLGFLLSTLNSFSTFRLVWLSGIYRIVFSLLSYSIFFSLTFIKNSSYSCCFLFAAFKFSFS

SEQ ID NO: 16387 - DNA, 2178 bp, Homo sapiens
  CDS (743)..(1837)
ggtaatccttgaaatatttaaattataggtcacatttgaaattctgcttagccgtttgtatgtaacttggtaagaactaaatgaattaccgcattttactcaggttgttttcttgaggtaataacattatagattttgtaaaaagagaaaaaagtattagaattatcttaacattaggcttccctaagtactctttctgagttaaccaattgctttttaaattatagctttatcagctacccctctaaaaatcatgcttcagtagatttttttatagggtgtacagttctatactttgaaaagctcctggaataattatgatattgcaaacagattttatcataacacttttcattagttttgccatatgcacgtcctttgttttatcctatgacatgtttcagaattcttttattgagttctttgtgaaattttccttaaaactttcctatgcagatgatcacaaatcatatttgagtttaaatacaagtttgtttgtttgtttgtttagagacggggtcttgctgtgctgcccaggctagtcttgaactccggggctcaagcaatcctcccacctcagccttccaaagtgttgagattacaggcatgagccaccacaccctagcctaactacaagtatttttgacaggtgattttgaaattttgggggagctaatgcaagtaaactactttacttgttgacatttgacactctaaattttaactggcaaatactttagatatggacaaagaagatgcattaatttgctttgaagaacacattcgggctttagaaaaggaggaagaagaagaaaaacagaagagtttgctgagagaaaggagacgacagcgaaaaaatagggaatctttccagatatttttagatgaattacatgaacatggacaactgcattctatgtcatcttggatggaattgtatccaactattagttctgatattagattcactaatatgcttggtcagcctggatcaactgcacttgatcttttcaagttttatgttgaggatcttaaagcacgttatcatgacgagaagaagataataaaagacattctaaaggataaaggatttgtagttgaagtaaacactacttttgaagattttgtggcgataatcagttcaactaaaagatcaactacattagatgctggaaatatcaaattggctttcaatagtttactagaaaaggcagaagcccgtgaacgtgaaagagaaaaagaagaggctcggaagatgaaacgaaaagaatctgcatttaagagtatgttaaaacaagctgctcctccgatagaattggatgctgtctgggaagatatccgtgagagatttgtaaaagagccagcatttgaggacataactctagaatctgaaagaaaacgaatatttaaagattttatgcatgtgcttgagcatgaatgtcagcatcatcattcaagaacaagaaacattctaagaaatctaaaaaacatcataggaaacgttcccactctcgatcggggtcagattcagatgatgatgatagccattcaaagaaaaaaagacagcgatcggagtctcgttctgcttcagaacattcttctagtgcagagtctgagagaagttataaaaagtcaaaaaagcataagaagaaaagtaagaagaggagacataaatctgactctccagaatccgatgctgagcgagagaaggataaaaaagaaaaagatcgggaaagtgaaaaagacagaactagacaaagatcagaatcaaaacacaaatcgcctaagaaaaagactggaaaggattctggtaattgggacacttctggcagcgaactgagtgaaggggaattggaaaagcgcagaagaacccttttggagcaactggatgatgatcaataaattataccaaatatatgtttacagtatgatttaaagtctgattcagaccagggactctattttaagttcaactgaaataacactgggttttaattatatcacaggaaaaaaaaagtgcatttaagtattgttatcgtggactttataaaagcaaaggaaattgaaagtaacttttgattctgtatcaagaatcatattttcatacagtcataactgtctttctgtgaccctttcacagggcactgtaggatggattaaaggtggcaatttactgat

SEQ ID NO: 16388 - protein, 365 aa, Homo sapiens [sequence omitted]

SEQ ID NO: 16389 - DNA, 2209 bp, Homo sapiens
  CDS (428)..(1753)
acagctagggctgctcagtaactgccccaaccactaccacgtccccaagtgcaacgggacccacggaactacaggtgtggggcagggtgagcgtggaagaagggacgcggatgggggtgcgctttgcagacgatctggagactgctgtgtgttgagggaagatacgaagtcgcgggagcagttggggactcaatgtgtgggcaacaagggtcctgctgagctcaggagctgcacggaatggtggcagtcaccttgccagtgcagcaggcatggatcagactgcaagctaggggcacgaggcatcagttgggaagaggggacgcacagctaggcttgaggcctcttcatcgggatgtccccaggccccccagcccaggcccagcataaaggccgtgttggggggcccccctgacccaaggggggcttcatgcgccacgtgcaggcggagccgtctccatcctcagagccggaggctggcccttcacagcctccagtcaggcagggggccctccagggtggcctgctcatgggctacagcccagcagggggggcgacatcccccggggtctaccaggtatccatcttttcccctccggctggtacctctgagcctcatagggccctgaaacgacaagccccatccactgagggtccccgggagctgaagagaggccctgggctgggggccagagagggactaccccctgaagaaccatctactgtggggctcttaggcccagagggaccggggctgggactaggtgtggccagccagcatttctcccaccgtggcctctgtgttgtggaacagagaagtagtgtcacctcatcttggacttcaggggcctggagtcccccctgccccccatcaaatgcttcctgcaatactttgcacaccagagactgggcctccccagatccagggggacaggggtccctgggggagtccccagggccagcccctccaggccagctgcacacacttgacactgatttgcacagtcttgcacaaatagggggtaagagcccagtggctggggtgggcaatgggggtagcctctggcctagggagtcccctggcactgccaatgggcacagtcccgagcacacaccccctggccctggacccccaggcccctgccccaccaagcgaaggctgcttcctgctggagaagccccagatgtcagctctgaggaagaggggccagcccctcggaggcgccggggatccctgggccaccctactgctgccaacagttctgatgccaaagccacacccttctggagccacctgctgcctgggcccaaagagcctgttttggacccaacagactgcggtcccatggggcggaggctgaaaggagcccgtcgcctgaagctgagcccccttcgaagcctccggaaggggccaggcctgctgagcccccccagtgcctcccctgttcctacccctgctgtcagccgtaccctgctgggcaactttgaggaatcattgctgcgaggacgttttgcaccatctggccacattgagggcttcacagcagaaattggagctagtgggtcatactgcccccagcacgtcacgctgcctgtcactgtcacattctttgatgtttctgagcaaaatgccccggctcccttcctgggcatcgtggatctgaaccccttggggaggaagggttacagcgtgcccaaggtgggcaccgtccaagtgaccttatttaaccccagtcccttcacttcccctaccctctgacctatctctgaaagccaagttatgcgtatgtgtgtgtgcacaagcttgtctttgtgtggtatgtgtgtgtgagtgtgcatgtatgcacacacacaggggttaaccacccctcacctagggctccagactccagttgtccctctcctcctacctgtgtctccttgttttggggtcctgactgaagaaggtgtccagggggcagagtcagggccaagcactggggtgcctcctctcacctggccagactctgacccacctacctcagctggggtgaggggcacccctcaaactcagtcatgtggttccaaactaccccattccccactccagactctgacccagcctcagtcctaactcctggggctgggctgaggggaacaagcatttgctgaaacttgaaaaaacaaagcaaatcaaaaacaggaaaaaattgtacctggtacttttttttag

SEQ ID NO: 16390 - protein, 442 aa, Homo sapiens
MRHVQAEPSPSSEPEAGPSQPPVRQGALQGGLLMGYSPAGGATSPGVYQVSIFSPPAGTSEPHRALKRQAPSTEGPRELKRGPGLGAREGLPPEEPSTVGLLGPEGPGLGLGVASQHFSHRGLCVVEQRSSVTSSWTSGAWSPPCPPSNASCNTLHTRDWASPDPGGQGSLGESPGPAPPGQLHTLDTDLHSLAQIGGKSPVAGVGNGGSLWPRESPGTANGHSPEHTPPGPGPPGPCPTKRRLLPAGEAPDVSSEEEGPAPRRRRGSLGHPTAANSSDAKATPFWSHLLPGPKEPVLDPTDCGPMGRRLKGARRLKLSPLRSLRKGPGLLSPPSASPVPTPAVSRTLLGNFEESLLRGRFAPSGHIEGFTAEIGASGSYCPQHVTLPVTVTFFDVSEQNAPAPFLGIVDLNPLGRKGYSVPKVGTVQVTLFNPSPFTSPTL

SEQ ID NO: 16391 - DNA, 2465 bp, Homo sapiens
  CDS (380)..(835)
atttatttcctgcttacaaggcagtcttcagcatgtgtatgtccatgtggtcattcagggatccaggctccttgtgttttctggctccacctcaccctagttcctaatcatcatccatatccacctgatggaatagaaaatagcgtgaggtgtgttcccaggaggctttgcatgggttagacctggaaggcaaacacatcacgtctgcttatgttccatctggaaaaacatttgagttgccacagcaaattgctagtgagaatgagagatggagttccctgtgtctccaagaagggtatgactttggcagagcagctcttctgttccctgacttctctttctcctgccagaacccagcaccgagagggaccatcagaggatgttccatgagaacttggtgagggttgtggagaggttggctggtgcttctccgtcttcatacagatgtccagacaggggaccagaagtctcaggtctgagctctacctggaagcccctcacgtctgtagccatcaaacctccagataagacgagccctgaagcattttggttgcatcagaaaacagatggaaggccagtcttcacagatgcatatacttcatcctggcttccacccacagaggttgcatctgtgcagaaattcatcccagagcaccaggcaggtgggtgtcaactcctgctgagatttcgctgtatcaggaaactcatgcatctggtgcagatgtcccggagtggctctgacagtccagggctgggcagtggagacactgatgacagccttgagcagagtggttttagtagaaatggcagagacaaaagccaggctagaggagtttaaggaaggaacagaggtaagtaagctagaaatgaacttttccagtcacttggaaaaaataagaccaaagatgattatgcatatcacaactgatacacacatagcccagggccaggttccctcctctctggaacccctgattcctgctggtgctgttttatctccccaggtagccactgtgtctttatctccctccagagaagcaacgcgctccagactctgatgcactggaggcaggagacagctgcaggtggtggtgtgctctggaagagtagaaacagagacccctcatagataccctgtcttcagaatagacctaggctcttcaccccaccacccctgccaccacccccacccaagccactgcagtgtcttgcccagacaaggggcatagccaactaactgatccctcagatcttgccctggtccccctaagataactctttatatggcagctttctccatcttagcactttgggaggccgagacaggtggactgcctgagctcaggagttcaagaccagcctgggcaacatggtgaagtccagtctgtattaaaactataaaaaattagctgggcatggtggcgcacacctctaatcccaactactgtggaggctgaggcatgagaatcacttgaacctgggaggcagaggatgcagtgagccgagatggtgccacttcactccagcctggacaacagagcaagactctgtctaaaacaacaacaacaaaaaaaaaaaaaaaaaacaaacaaaagaaggaagaaagaaagaagggagggaaggagggaaagaaaaaggaaggaaagaaagagaaagagaaaacactataacagagatgatgaaggcatttgatgggaccatcagtagactggacatagatgaggaaaaaatcagcctgaaggtatgttaatagaaccttcccaaactgtaatgcaaagaaaaaaatggggaaaaaaacagattatacaagaactgtgggatattttcaaaaggtatatgcacaattgaaacaccacaaggagaagaaagggagaacagagcagaaaaatcgtgaaagttataatggctcccaattttccaaaagtaaaggcagaccccaagccacggatccagtaagcttagagaacaccaaataggatacatacttaaaaaaaaaatcaacacctacatatatcatattcaaactgtagaaaaccaaagacaaacacaaaatcttgaaagaagccatagaaaaaaacccagcttacttatacaggaaacgaataagaattacagccttcttgtcagaacacgcaagcaagaagagaaaagggtgaaatatgtaaagtgttgaaagagaaaactggctgggcaagtggctcatgcctgtaatcccagcactttggaaggccgaggtgggtggatcacgaggtcaggatttcaagaccatcctggctaacacggtgaaaccccgtctctactaaaaatacaaaaaaattagccaggcgtggtggcagacgcctgtagtcccagctactcgggaggctgaggcaggagaatggcctgaacccgggaggtggagcttgcagtgagccgagatcgcgccattgcactccagtttgggcgacagagcaagactctgcctc

SEQ ID NO: 16392 - protein, 152 aa, Homo sapiens
MFHENLVRVVERLAGASPSSYRCPDRGPEVSGLSSTWKPLTSVAIKPPDKTSPEAFWLHQKTDGRPVFTDAYTSSWLPPTEVASVQKFIPEHQAGGCQLLLRFRCIRKLMHLVQMSRSGSDSPGLGSGDTDDSLEQSGFSRNGRDKSQARGV

SEQ ID NO: 16393 - DNA, 1860 bp, Homo sapiens
tttttgttttgttttaacttccccttgtttcaagacaatgctaaggaactttaaaattgtagcagttcatatttgctgggctcttactgtgtagtggcagggttgtaattgcgttacctatattaactcagtcaatccttacaacagccctatatgactggcataattatacccttgttttgtgcatgaggaaatacagggaattgacatactggatggcagggctgggactcaaggacagtctgactctggagcacagctcttttgtttttctttttttcttttttctttgtgtttgtgtgtgtgtgtgtgtgtgtgtgtgtgtgtgtgtgtgtgtgtgtgtaggagagagagacagagtctcgctgttgcctaggctggaggtgcagtagctcaatcttggctcactgcaacctccacctcccaggttcaagggattctcctgcctcaccctccccagtagttgggattacaggcgtgtgccaccacccccagctgactttttgtgtgtgtatgtgtatgtttttttttttttttttttgagacggagtctcgccttgttgcccaggctggagtgcagtggcgcgatctctgctcactgcaagctctgcctcatgggttcatgccattctcctgcctcagcctcccaagtagctgggactacagacgcccaccaccacgcctggctaattttttgtatttttagtagagatgaggtttcatcgtgttagccaggattgtctcgatctcctgaccttgtgatccgcccacctcggcctcccaaagtgctgggattataggcgtgaaccactgcgcccggccgactttttttttttttttttttttttctcaagacagagtctcactgtgttgcccaggctggagtgcaatggtgagatctcggctcactgcaacctccacctcctgggttcaagcgattctccttccttagccccctgagtagctgggactacaggcgtgcgccaccacacccagctaatttttgtatttttagtagagacagggattcaccatattggctaggctgatctcgaactcctgacctcaggtgatccgcttgccttggcttcccagagtgctgggattacaggcatgagccactgcggccggccgaggagcacagctcttaactgccacactgtgctgccacctgccttttaatgtgcagtagagtcgtggcttgttaattccatcacttaaaactcatccttagtggcaggggcaggggcttgaacacacttctctcaggagagcaagccggtgagtagaagttcctgggacagtggctgacacatgctaggtggtcagtgagtagttagttgttcgtgaaataaatggggctgggcacggtggctcacgcctgtaatcccagcactttggaaggccaagatgagcagatcacttgagcccaggagttcaaagccagcctgggcaacatggcaaaacctcgtctctaaaaggaatacaaaaattagccagatgtggtggtgtgtgcatgtagtcccagttacttgtggggctgaggtgggaggatcacttcagcccaggtggttgaggctgcagtgagctgtgatcatgccactgtactacagcctgggggacagagcaagaccctctctcaataaataaataattaacacacaattcatggaagagtcatgcactgggattagcccagctctacagctgatggtcttaggcaagtgcatctctcttggagtaaatcattctaacccataaaatgggtgtaacagtttgtcttgcctgcttcttttggtaattggaaggattgaatgagacaaggtcctgtgtaaacagaataaaaatttttgtaaagtc

SEQ ID NO: 16394 - DNA, 1808 bp, Homo sapiens
aatccattaatctgatgctatgatgaccttggaaataatgtacttttaaaaaatatcctaaagtcctatgacttaaagttcacattatcttccttcataaatgaaaaattttcatttaaaacatggaatcagtttatcaaagtacagtttacaggttttaagtctgttccatttctggttagacaaactcaaatacaatgatcaaactaaaagatttcttaaaagtatgatgactattaattgtctgctaatgaagtctgaaggtctgataagattatccatgaagcaaaagggaggaacaaaaaaactgttacatttctttcttctaatttttgagcctaaaaaccattttttataaacgtggtttcattgttctgacatcttaggtgtggcagttctctgcctcaagaaaatttgtaaaatttatattttagattttagcataatttctgaaacaaacaataacaactacttaccagtttttactgtagatactggactttgcctcttagggtgaatacttgtttgacttcaagcggggagagtatactttttaaccaatgacttgctgattttgcagttaagaaagaaaaacagaatccactgaaaataaaatttctatttgaaagtttcataagtgtaattgactaacggtgagtcctcccccagctgttactggtatttcaatgtttaagaaattattttatttacactaaatagtctcaacaattccctatcttatactggcaggcagaaactgaagaggttgtatcaactggcagtttgcactgaaagaaaacaatcttaaatcacttttaatcttgcagagcatttttgaaggtcaaggttgaaatcactggcaggaaagtaggtgaacaaaatggtttgaccctgcctgaactagacttgcactgatttgtagagctggagtggaagagagctaaaatagtagcgctttccttaaaagacacccacaccccaccacctcaccagcagcacaccagcggcagcagcagtataaccacagacattcgtcactgtgccagatcagggcataattctcttaaggcagctgaggccttcacattagttcttgcctcattcaggcatccagaggtcctctctctttgatactggtgacataaaccagaggggcaagactaggcatagttccttgatgagttcagtggtgcctcaccgtacccttagaaagccagccctgctgtgctaggtcttgtctcacacaaagacatgctcccaggggtgggcaccgtggatcatggtattcaggtcttctgctattttaagttctttcttctctaaatatgtgaataatattttaagcatagtgttatttgttctttttccagaagttcccttctggaaaagcatatctttgtataattgtaggaaaaataatcttgacttacttggtccaaagcacattattaactggggattaatttcctagtagtcatctgtcgggagggctgatccaccccgaggcacattaactggcgtgactttcaggacggcggggctgtgggagccactggacacatctgccccccaacccctagcctcttgaattactcaagtccctcagctctgttggcacaaatacgtgctggatgatagaagaaccgtttttcccatggatgaactttttttggcttgaattcttacaaggcctgacttctggatctggagaaagaagacttctttgtgtcccatcttcaaaatgcctcctccacttgttgcagaagcctaaaattcctttagttggggcagaaagcctattattattt

SEQ ID NO: 16395 - DNA, 1387 bp, Homo sapiens
ttcagaatcataaaaacatttttaaaaggaattgagaaaaaaaaaacctcaaagaagataccatatgagtatggtagtaatacccaaagataaccaaagcaatggaacaaaataaattttataatgagaaattttaatccttgttatatttaacccatttgttcattcaatgctgttatacattccctttgttgtgggttgaatctaggaaaagggtcttgtccaatataattaaggatctcaagatgaagcatcctgtatcgtcacgggtacgtcctaaatccaatgacaagtgttcttataaaagacaagagaaggcacaaagacaaagaaaaagccacgtgaaacacaatagaaggcataaataaaaagccacgtgaaagcaaaggcagaaactagagcaatgcagctacaaagaatgctgacagctaccaaaagctgaaaaagacaagaaaccattctcctctcttgtcttcagagggattgtggccctgccaacaccttgattttgtacttctgtcctccagaaccatgacagaatgaatttctgttattttaagccaagtaggtggtacagcagccacgggaaactaatatatgtggtttgctttatatttatgttggacagcattctcttagatcctacaaccaattcacagaaaacacagggctgaggaaccagttaaacttcaccagggaatacagttcacaaaatttagcccatgggaaattccacagagtaaactatctaatctccacaaataaattgaaatggaagccttctatggatgaaaagagacttagacatatcaaccagtcacaaccagtttggaacctgattaaaacaaaatgtaaaaaaaaaactccaatttatgagaaaattgaaaatgtgaacactaaccatatgtttgatattaaggaatttattgagatttttttaaagtgtagtaatgatattgtactcttatgtatctttaaatcctttagagctgtatactgaaatatttatagataaaatgataggatatctaggatttgaaatagcacaggggaagcaggagaagcagatggagttaaaggtgtgacaggatggccatgggccaggcgtggtggctcacgcctgtaatcccagcacttttggaggctgaggctggtggataaccagaggtcaggagttcaagaccagcatggccaacatggtgaaaccctgtctctacttacaatacagaaaaaaaaattatctgggcatagcggcaggtgcctgtagtcccagctacttgggaggctgaggcatgagaatcacttgaacctgggaggcagaggttgcagtgagccaaaatagtgccattgcactctagcctgggcaacaagagcaaaactccatctc

SEQ ID NO: 16396 - DNA, 1614 bp, Homo sapiens
  CDS (1296)..(1595)
atgtagcccggtccgtgccgcaaagcgaacggcggccgcggcgcgggccccgcgggggttagagtcaccacgcccagcccacagatgtcacttctgcctttccattattactcagttttctgaatgccagttgcttctagcatagtgcctgctctagagaggcactcaggaaccaaggcctatctttctgtgttgttccactctacacctaagttgctgtgatggagccatgtggtcggggtcagggttcccactgcactttctgcagtgctcccagaactcagtatgtactgggaagggcctgctgtcgtgacagcctctctttggggccagcttctgcttttgcccccatctttgcagtacagggggtaaattaaacaagaggatgcctgaatgaacgatatcctgggttcttgagagacaagtgggagctgataattctgaaaattcattagtcaaagcatggagataaaggtggcagcaggaaggggagaggcaaggagtagacccgtgacagttttagaatcttatttgtgccaaaatactttactgcattggcttggacctctaatacaatgttgaattgttaaccatgatagcactgtatcctggtctaattcctgaattgaatggctagtcttaccattaagaatgctatttgcggccaggcacggtggctcacacctgtaaccccaccactttgggaggccaaggcaggtggatcacttgaggtcaggagtttgagaccagcctggccaacatggtgaaaccccgtctctactaaaaatagaaaaattagccgtgtgtggtggcgggcgcctgtaatcccagctgctctggagtctgaggcaagagaatcacctgaacctgggaggcagaggctgcggtgagccgagatcgcaccactgcactccagcctgggcaacagagcgagactccgtctcaaaaaaaagaatgctatttgctatgatttttggatgatatctttataatattaagggatgtcccttccttggattttgctttttaagggaaggtaatgtctaagataagcctttgaaatcttgaaattcagagtgatttgggatttatagagagctgtacagagcattggtgattgttattccttgagttcttaaaacgtaaaccaggcctgggcccttccttcctctgtgcccaactctcatcctctgtggtttgtggtttcagttattgccttgtctgtcaagatccgcagttatgaagaacacttggagaaacatcgaaaggacaaagcccacaaacgctatctgctaatgagcattgaccagaggaaaaagatgctcaaaaacctccgtaacaccaactatgatgtctttgagaagatatgctgggggctgggaattgagtacaccttcccccctctgtattaccgaagagcccaccgccgattcgtgaccaagaaggctctgtgcattcgggttttccaggagactcaaaagctgaagaagcgaagaagagccttaaaggctgcagcagcagcccaaaaacaagcaaagcggaggaacccagacagccctgccaaagccataccaaagacactcaaagacagccaataaattctgttcaatcatt

SEQ ID NO: 16397 - protein, 100 aa, Homo sapiens
MSIDQRKKMLKNLRNTNYDVFEKICWGLGIEYTFPPLYYRRAHRRFVTKKALCIRVFQETQKLKKRRRALKAAAAAQKQAKRRNPDSPAKAIPKTLKDSQ

SEQ ID NO: 16398 - DNA, 2140 bp, Homo sapiens
  CDS (72)..(1400)
aactcattgatgaagacctgtgcttgggcaaagctaagaaacaagaacaaactgttgaggagaagaagaagatgcctatggaaaatgagaaccaccaggtattcagtaatccaccaaagatccttactgttcaagaaatggctggattgaataacaagacaattggatatgagggaattcatagccctagtgtgcttccttctggtggagaagaaagcagatcaccatctcttcaacttaagcctctggattccagtgttttacagttttccagtaagtacaaatggatcctaggtgaagaaccggtggagaaacgaagaaggctccagaatgagatgacaacaccttctctagattattccatgcctgctccttacaggagggtagaagcacctgttgcctacccagaaggggagaacagccatgataaatcgagttctgagagaagtacaccaccataccttttcccagaatacccagaagcaagcaagaatacaggtcagaatagggaggtttcaattctgtatccaggggccaaagaccaacgccaggggtccctgcttcctgaagaattagaagatcagatgccaagattggtggcagaagaatctaacagaggtagcacaaccataaacaaagaagaagtcaacaagggaccttttgtagctgttgtgggtgttgccaaaggtgttagagattcaggagctcccattcagctgatcccttttaacagagaggagcttgctgagagacgaaaagcagttgaatcctggaacccagtgccttattctgtggcctctgctgcaatccctgctgcagccattggggagaaagcaagaggctatgaggagagcgaaggtcataatacaccaaagttgaagaaccagagagagctggaagaattgaagagaaccacagaaaaattggaacgtgttttggctgaaaggaatttgttccagcaaaaggtggaggagctggaacaggagaggaatcactggcagtctgaattcaagaaagtccaacatgaattggtgatctacagtacccaggaggcggaaggcttgtactggagcaagaaacacatgggttatcgccaagctgaattccagattctgaaagctgagctggaaagaaccaaagaggaaaagcaagagttaaaagagaaactgaaggaaacagagacacacctggaaatgctgcagaaggctcaggtctcctaccggaccccagagggagatgacctagaaagggctttggcaaagcttacgcggctacgtatccacgtcagctatctccttacttctgtcctccctcacttggagcttcgtgagatcgggtatgactcagaacaagtggatgggatcctgtacacggtgctggaggcaaatcacatactggattgagcaccagactgtatacccttctcttctcttatcttctgtctgttctcttttctctccctccctcacgtctctctctctctctctctctctctctctctctcaccctcacctttatgccttatatagagaatctctgtgtaaatcctggctcataatcagtctcctttttatcagttttggtgtggagaaagaggccagtttaaataggctttcaagagtctagggtcagagaagcaatagtcactaagctaggtgacctgaaagctttaattttcatgacctggatatgtggtctattgtatatctttttctgaaatggtttgtattcatttaggttagatcaatcagcagatattgggtccggtataccaggtattattttggggtaagctaacaagtacaactcatgtttgcagccttcgaagatgtaacaatctcgttggaaacataagacatacatcacattatacacaaaagtgtatgatatgtacaactgagtggtacagatatgacatggaagatctgggggaggaagttcaaggaaggcaccacaccagaaatgggacctaaattaaggcttaaagaatgagcatggccacactgtcagtgagtgttctttaggtggtaggactatggttgatatttttcttcttcctatcttcctgcctttttcagattttcaatattaaacttgttattcttacattggaaaaaaataaattgtttttaaaaagatc

SEQ ID NO: 16399 - protein, 443 aa, Homo sapiens
MPMENENHQVFSNPPKILTVQEMAGLNNKTIGYEGIHSPSVLPSGGEESRSPSLQLKPLDSSVLQFSSKYKWILGEEPVEKRRRLQNEMTTPSLDYSMPAPYRRVEAPVAYPEGENSHDKSSSERSTPPYLFPEYPEASKNTGQNREVSILYPGAKDQRQGSLLPEELEDQMPRLVAEESNRGSTTINKEEVNKGPFVAVVGVAKGVRDSGAPIQLIPFNREELAERRKAVESWNPVPYSVASAAIPAAAIGEKARGYEESEGHNTPKLKNQRELEELKRTTEKLERVLAERNLFQQKVEELEQERNHWQSEFKKVQHELVIYSTQEAEGLYWSKKHMGYRQAEFQILKAELERTKEEKQELKEKLKETETHLEMLQKAQVSYRTPEGDDLERALAKLTRLRIHVSYLLTSVLPHLELREIGYDSEQVDGILYTVLEANHILD

SEQ ID NO: 16400 - DNA, 1353 bp, Homo sapiens
tacattaaaatgcacttaatatcactttgtaaagcccagatgagtgcaaatgtgcctgtaacttcctcctttaatctgtccaggtagtatttagtctttagtcttacattttctttctccctttatttcatgaaattccttgagaaaacttcaacagtaaagaaagaaatttcgttcatctcacaactcttccaaacgaggaaacttagtgaaatatttcagagcttctagatgtgaggtacaaaacttgggatcaaatggaatcttgattcactaaccaatttaagatctgacttctaattttaggaactttgggttatgaacgcttccattttatacctgtgtctagttagtttctgcctatctatccaagaagcttttatcaagggtccaccatgtgccagccactgaagtagttataaatacaaggatgtgtaaggtatggatgatggtatacgaactgtcatcttactggatttgtccgctctgttaaagatacggttccgaaaactttttaaagccctagagagggctttaaggcaatgtagcatcatatatagaggcatcaacctgttcatatctttctatttaacagaactgtgcacctgggcacaagggtgtgcacaacaggatgtgtacagcagcactgttaaagtgtagcacatccatactacaggatcttatgcaactgttggaaagaatgaagcgatgctgcactgtggtcatgcagtgatctctaagacatattaactagaaagcaaaaggtttaacaatgtatagcagctgggcgcagtgactcgcgcctgtaatcccagcactttgggaggctgagtagggcggatcacctgaggtcaggagtttgagaccaacctggccaatgtggcgaaacgctgtctctactaaaactacaaaaattagctgggcgtggtggcgcgtgcctgtaatcccagctactcggcaggctgaggcaggagaatcgcttgaactggggaggtggaggttgcagtgagccgagatcacaccactgcattccagcctgggtgacagagggagactccgtctctaaaaaacaacccccccccccccaaaaaaaaaaatgcatagcaagctgtaatgctctttgtgttttagaatagtagaggtctggaaagttgtttgcttttccccagttttttttttgctgtgttacctctgaagggaattgaggtagaggggagagttagaaggaatattcggcttttctattttatatcctcctaggtgaaatttttacaacaaacatgtactggtgtattttgaaatgtttttaaatttttgtatttcaaaataataaaatataaattcaaactgcag

SEQ ID NO: 16401 - DNA, 2716 bp, Homo sapiens
gttatgaagatagtctgtcttgataaaatcccaggcttaatttagataatgtcagtctgccacacggagttggtagccataaaatgctacttctgagttctacacttagctgtagaatgcaaattgagtgacacctttaaggctacagtacttgattttttaacatcttttctgttggggctttgactagttctgcagaaagggattgggacaaaaccaggagtttgttatttttagtttttctttgccatttagcagcagaaattcgatccccactgataaacagaacctgctggaccacctttgctcagataatttctataacacagaggttaactcactattggttgaaataaatgcttaaactttgaagcactttttaaaaaatcataagtacaccagtgctgcacctccaatgataatcatttaggaaacacagaaaacaaaaattaaatgaatggtccacatgtgaataaataaccttaatccactcggatatgcagcagctcttcccactgcaaatgggttttgtggtggtaacttgaattggaggagagagacagctggcctggtgctgctgctgctgccaaaagccatcttgttaacatggtttatttccattctgtcttcctgctacccacaagagccctgtcctcctgtctccctcctctttcatcagttttcagtggcatactgtcctcagtcacatttctcctgctttgccagtaaacagcatgtagctgattcttctagtcctcgcctgcattcctacaattcctgctcattccgaattggttctgttatctcctaagttgttgcaactcctagaactcagccttcttttacatctccaattctcattatgtgtttgaatggcttcagcttttccctccgctagctctttgagctccaaatcatcaactcagacaaaaaacacagagaagggagtgcatactgtatgtacatgaacatgtttgtgtgtgtgttttatatatatgtacatgtttgttttcatctctacctgggtattttttgggaaatttatggccatatgtctttaaaaaaaatcccatttaacaacaaatacaataccttctgttgggccaaccaatatgacatagatccaatatgtgagaaagttgccagggaaccccaggagtccaaaatgattttatttcagaagagaataaaaataggaagagtccctgtacatctgcattgttcatttccgctatttctgtagagtaggaaaggctttgtcagaactcagcttgaccagcagggagcagcagaggcccatgggaaacggaatcctttgtaggtctgtccccatcaccactggtaacaggacatggaagaaggcaccacacgcactgcacatggaactccagcaagaacctgtctttactctttaattttgataggaagtagaatagcaaatccccatgcccaaatcccgtgatggccaagtagtcttagctatttgaaaaacacccttaaaagacaggtttgttgtttaggccatcactcaggtgtatggaaaataaactttagaacacttaggccttgacatatttagtgtaatttgtgctcattgtgtatcagtggaagagatttgtgtcaaataaaaaattgagagtgatagcacaaaaccacaaagagagggtacactgtaggtacatgaacatgcatatgtgtatatatgtgcatgtctataaaccacattatgaggtgaaaacttagtgaaatgtgtttgaaaataagtggtgcatttgcaaaatatatataaaataacactatgtttactttgatgtcgtgttgttctaggaatacatcaagttcatttgcataattcatattttccactggtataatgcagggaacaccagccaagaggtagcagcatgaaaagaaaatctggatttcatataatttgatctaaaaggcagttaaagattactgggtcaagttgcagataatatttcagatcagaatcagaaagtattttctaactgaactggccttgagtggcatgtgctgagctgcctgtgaagttcatgtggacacctgcagctggagctgtgcaaacagactggaggaggcccagctggggtattgtccaggtcacttaagcatgccatgaggagttggatggcgtggcttgtcaggccccgtttaactccgaaatgtctttgttacctaaagcacaagcaggaaaatgaatataggtgatcattaaattcctttactgtacatcatattgaattaatatgaaaaatacagagaatgtagacatctctgagttaaaatattttccaaaagttttaaagcatggataatatatctttaaaattggataaaatgtgcttggatgctttaaacatatactcaaaatagtaaataaatgtttgtggccaggcatggtggctcatgcctgtaatctcagcactttgggaggctgagacaggcagatcacttgaagtcaggagttcgaaaccagcctggacaacatggtgaaaccccgtctctactaaaaacaaataataataataataataatgcagaaaaatctgggcatggtggtgcatgcctgtaatcccagctactcaggaggttgaggcaggagaattgcttgaacccaggaggtggaggttacagtgagccgagatcatgccgctgcactccagcctgggtgacaaagcgagacttcgtctcc

SEQ ID NO: 16402 - DNA, 1702 bp, Homo sapiens
caattaaatacagtggacacaagccagtgttatttattaaatcctggtgctcaataagggtgcctgctgagggttgggagcctggggccactacatcctgccttttctctaaggagattagctagtattaaagaagtgttaagactagcccagactgagtctttctcctcaaagcatgaagcacctgagagcatcctgctttcagcaggagggagccactcagaaactgttccctagaaccctgttgttcaaagtgtggtaggaggaccagcagcctggctggtcaaagtagagttctcacctaggagatgtgggaactacagaaacttggccccctagatcttcagaatcagaatctgcactttaacaaagttcctaggtacctcggtgcccattaaagccagaggacccctgacctacaggccacagacccagataaagcagcccaagctatcgtttcctcttgttctcttgagtcacaccagcgaggcttttgtggtgcctttcattcactgcagtgtcgagatgtgccgccaagtcacgaatattgtccacactgtccctgcagtgtaacattatcagggcctaggaacgactgagcccctcgtaggcatgtgacactgtgttcctaagactgcttctctcttttcatgaataaaagcagacacaacgcaggtgtttagaaaactagtctggtattaatattttaagctagaccttggatgccatcagactttatattcgtgtttattttcaattctgttcattttattgtctcttacattaaatatactgtttggccctagaaatgcaaaatcacgaagtcaccactctgcctgcccttaaggagctcacaagccattaggaccattagacattagcttttcgtttcttcttaaacaaccagaataagggcattctccatctctagcccctttgaatggttaccctagagtactctgagtccatagcagccaggaagtcttgctttaacattttgtccacagcaactcagatgtcaccaggtcatttctcttacctaagtaccttctcataaagtgaacctggcagttttggacagatgtcgtcctcagtcctgtggtggtgatggctcaggcctcctaggctaggaacatatcagctaaggcctactgcagccactcaccagaagggtctctccactagagaacagtagctgcgcctcaagcattgctctgtttcagaggtgtgtctctctggtcagtcagttcgagaaggttaattaataaagcccacatgctgagaaatgagtttcctcaagtgggcccagttttcagggagactggcacatgcctgtcatccctgcttctacacgagatttcttagaacagtcgcagtctgccttctagattccatcctgttttgttctaactcttgggttcaattttagaaaaatcaggctgtaatcccagcacttcgggaggccgaggcaggtggatcacaagttcaggagattgagaccatcctggttaacacggtgaaaccccgtctctactaaaaatacaaaaaaacaattagccaggtgtggtggcggtcacctgtagtcccagctactcgggaggctgaggcaggagaatggcgtgagcccgggaggcggagcttgcagtgagccgagatcatgccactgcactccagcctgggcaacagagcgagactccgtctc

SEQ ID NO: 16403 - DNA, 3393 bp, Homo sapiens
agttaaaacaattttttaagagaaaggagataaccagagcatagccagcagaaggactcgcatgaggtttggtgggactgcctagggagaaggaggcagctggctgcgtgacagagcccagtgataggggagggcctgtgaccccttaaggagctgagacgctgtcacagagcaatgggagcgctgagtgatggagctggatttgtgcttttagaaaagctttgttggctgctgttgggagaatggattggaagggggtgagactgcagtcagagactcccataaggaagctgttactgtaatcacaacaacagatgcctacactccttcccaagacttccctctctgatcttagaagcattgtcaaatctgggttcccagcctgccatggcaagctgcttgctacttgggagtgaaaagcccttgtggagctttttcttattcggtgactgctcataaagtgccttcacctcgcttgccttattagccagtcctgcctccaaattaccaccacttgctcctttcaggagtctcttccccctaaagtccctattactccttctctctgctttcagatcagaaacagaaaaagtcaccttccctaagagtctgctccagtccagtagaaatgctttaaaatttttctggcctcagctgcccttcttgagcacagaaatttctagaatattgaatgaatcactggttctttataatcattttgtccagtttcaatcactgcattttaggaaagatttgaaaaactgaaggacaaagtggggccttagaggacttaggattctttcagaggaaagtaatctaaagaacaagttaatgtttcttcatcgtttgggaattagttattaaatggaagatgcctgaaaaattattctcttaatacagttcttcaggaggacagcattaaaaggcctggaattaaatagccacaaggcacatttagatgacacagcaggaagaactttccagtaaaaactattgaataggataccgtgttcaggcagaagtcaggagactctctttaggagagctgagaaataacttgagggggggggccacatctgggggaggattttataatttttaaatctcttaaactatacagctttgagatggaatgattaagctgagcaggcatttgttaacatcctgaaatacgatttccatcctgtccctagagcctgcccttggggtccactgtagactggccttctagaagaaaccgccttataaggctctcttggatagttcagtgacagaacacccttggatggagtccaaggccagctagccttcactgattcaaaattcctccctacagtggatgagattatgatgcttcctttacctcaagccacccctaccccacaaacaatctgacctcatctgtgtttttcattgttagacaaataacatcttgtttttagcagctggggaaccctgaattatcgtcaaaagaatttttaagccagggaatatgagtgtaacctttatttgaaatttaggagtggcacaattagaaagctttgaaatggaaggagacttaggtatatgtgaattaataagcccacttatttaaggtaatttcaaagatttcccagtgagtcttttactcttatgtggggatagcagtggaggactagaaatgttcaagggaagcttcccccagcctgtcatatatggcttttccaggtcaatcaagaccgtctcctccaccaggcctctgagagaaaatgagatcagaagaaaaaagccaggatgataatggggggagggggggaaacgtttacttatttattttttttacttaaaattgattgtgttaaatagttgacctctgttttatcccaagttggattaatggcaaaatgatatggcccttttgaaaaagctaatgtgttgaattgcctttactgttttacagaggagagcggtcaaagttaattagaaacagctggagctaacagtaagcctcacccccatcaatgtccctaccaggagagggttaccagggagaggagcagtcccgggaatccagggaggggcctctggtcccaaaagcaggccagagttgcagagaagttttgtgtctgaaaaataagaaaggttcatttcaggtgaaacagacctaggaaccctgtgttgacaaagccccattcatatggtatgaagttcccacagtaaagagcactgacaaggccaaggccaacccgacaggttcaaagcaggcttggccactgtgaaaaaacaaccccctcaaaacttcaggagaatgtatataataaatgaaggtacaatttcataccttcacaggattattgagaaggtcaaattacataacagatatgaaagcactgtgtaaactatgcggactatgctgcaccaaataactgtaaagaattattaactagactgtaaatgccttgagggcaaggaatgcatctgcaacgggtatttgtgaagtacttgacagtttgctaaggacttctgtggattttcctcatatgctactcataacaaccctggaaggtaaggggaattgttatcccaaattccaaataaagacactgcaggtcagacatcacacaggtggtaaatagcaattctggtacttactttagatattctgctacaggcttgctattcaaagtgtggtatgtagaccagcaacattgactctctgtgctatctttcttttttataaactcggaattatttcaaaataagaagtttctaacaaaagagattcagaagagtcaaacccttgggtgtgaaaaagttttaggaagactttcctgaatttattttgcctatattttgtttctgatgaatgagcaagggggttatatgatatatttgtgtctaaatacatctaaaagagctctttcattcgcataaaataaacatgctgtatgataacaaagtttatgtcagagttgagatggctctttatggtacatatatgctgtgccttctaaaaaatgtcatattatattcagtgaaagatgatgtttcttaaaatgaatgaatgtctctgaggtggccaacattagtccttctatagccagattagcaatcttagagcctggtcaggcacagtggctcttgtttgtaatcccagtactttgggaggccaaggtgggaggatctcttgagctcaggagttcaggaccagcctgggcaacatagtgagatctcatctctactaaaaataaaaatgaaattgttaattggccaggcacagtgggaagcacctgtagtcccagctactcaggaggctaaagtgagagggtggctctagcacagtcatcaaggctgcaggaggctatgatggagccactgcactccagcctagatgacaaggtgagacgctgtctc

SEQ ID NO: 16404 - DNA, 2286 bp, Homo sapiens
  CDS (770)..(1093)
tatgtacttagaatttgagttctgataattcatttttttatgggaggtggggaggtttattttttaaattgcagtccaaaggagtaaatttgatgttacattggacagtttattcagataccacaaactttacagatttaattagatagataatggatgatgttaaaaactaagcagcatcttaagtttaaatttttatttttatttctttttctgtcatcattatttatgaaaactggttgaaaatgaagttaaaagattttctgtacatcataagattggacagaaatattatttaccttaaaactttttctgagtaaaaatttaaacataaactagaactcagcctgaatttttttttaaaccatctttggaagcacatataaaagtagagtaaatacatcgaatgtagcttacctactgcatttgaagaaaatcttttgtgtatgtctgtaagctatttgtgtgttttgaaacagtttaccagaatagactgaaactggtagaaacaggcataagtaactctgcagtggtagttgtattgaaaactggaatggtagtctctttcaaaatcttgaagagatggaaactaatgaatctttttttttttttggtaaaatagtatttttttttgttcacttaaatgaaattatttgtactttaagttttgttccaggaaattacttcagttgtagctaatttattggcaccctttactaacaaatttctgttctgtattaagattagtattggaaaaaaaaggagatgtatggaaattaagaaagcaacaaaaattataagaataattgcccttataaagaagtcattatatgaaaaagatacttgcacacgcatgtttatagcggcacaattcgcaatggcaaaaatgtggaaccaacccaaatacccatcaatcaacgagttaataaagaaactgtggcatatgtatacgatggaatattactcagccataaaaaggaatgaattaatggcattcgcagtgacctggatgagattggagactgttattctaagtgaagtaactcgggaatggaaaaccaaacatcctatgttctcactcataagtgggagctaaaccacgagtatgtaaaggcataagaatgacacaatggactttggggattcaaggggagagggtgggtagagggtgagggataaaagatgttgggtgcaatgtatactgctcaggtgatgagtacatcaaaatctcacacatcaccactaaagaacttactcgtaaccaaagaccatctgttccccaataacctatagagataaaaaaaattcaaaaaaagaaaattgtccttatatacatgtcagacaaaagatttaattatatttggtaagaacattgtagattgttttgtagtgtattctgagaacttatgtcagaggccagaaatggccattgttaccagaagtaatggaaggaaaggaaaagtaagggtatgcttactattttaggtaatctgatttctgcatattgtagtgtaaaaatatgatagttctattcaaaattttggagaaacatttgaacttcgtttattttaaattaggaaatcagctcaaataggcattggcctttgatttaagagtgttaagtcattcttatgtagaaatgtgctatctcccgagaaagcatcagtgtgggatgccttcagctcatgccatcccctcttccattaggaagcatttgtaaatgcttagccgtgttagggatcatgttagatattgggggcagtgactctgaagagattgtgcgacataatctcaaagagcttagggtctggtagggagacaaccaagcaaacagctactctaaaatagagacatgcttatggcttgagtgagtacataagaggggcacctgacccagactgggagggaaggaggcacttgtgagatgcttatgcttgaactgactcctgaagaacaaataagaattagattaataaagatgagagagaaggctgggtgaggtggctcctgcctgtattcccagcaccctgggaggctgaggtgggtagatcacctgaggtcagcagctcaagaccagcccggccaacatggtgaaaccttctttctactaaaagtacgaaaattagctgggcttggtggtgcatgcctgtaatcctagccactagggaggctgaggcaggagaatcgcttgaacctgggaacctgggaggcggaggttgcagtgagccgagattgtgccactgcactccagcctggacaacagacaacaaagcaagagtccatctc

SEQ ID NO: 16405 - protein, 108 aa, Homo sapiens
MEIKKATKIIRIIALIKKSLYEKDTCTRMFIAAQFAMAKMWNQPKYPSINELIKKLWHMYTMEYYSAIKRNELMAFAVTWMRLETVILSEVTREWKTKHPMFSLISGS

SEQ ID NO: 16406 - DNA, 3469 bp, Homo sapiens
  CDS (799)..(1179)
gtagctggaaggggaggtggggcaagggaggggacccccagcctgtcacctgggttgcctgcatggtactgagtgagctggtggcttctgtgtgggcctctggctgtggggatggtcagacaggaatagacacaatgctgcccaccctctgcatgcatgtgtgtgctggcatgcacacacacgtgtgcacacacatctacatgcacatacccacacgtgcatacatacatgtatagacatacacctttgtgcatacacacaggtatagacatacacctttgtgcatacacatacattatacacacatgtacatagacacacatacacatgtgcacacacctataggcagagcccactccttttcccctgatgaggttgtggtggtattaataatcataatggtagatgatatttactgaatgcttactgtgcatgatatgttccactgacagttttacatccattatcttaatcttcacagccccttgtgggataggaagttggccacattgcccacatccagtagccagtgaatagttgtgcttggagtttgccctgtaggctgacttatgagccatagcccaagccacatcccgagaacacacaatacggggagcccctccttaggggaaaatttctttccaaaatatcacctcataccttgctcagggaatactctttcggttataagtaataggcgtctaattcacaccagctagaggcccaaggcagcctcaggcggggctggaggtatgagcagcagctggcactctcccttcccaccagcccacaccagccatgcttgcctgtctctgcaaacgcagtctctgcttctctcatagcaccagccgagcgcagggtagtcacacctgtccctcaacccctccagattcttgggagggagagctggggtgtgtccagcattgtttcttgagtctgaggtcgggggttcttctggagatgcaggtcagtttatgcctgcaacaattctcctccctcaccaaagggccctgcctctggaggggcacctgtcttctccccatggtgcctacttccccttctgtctcattctccagagccaacatcagtctccctctctggaccttctacttggggtctgatcttggggctgctcagacatcagaatccctgagctcctcaggggttgcccctcttggctaagccctgcagcagcccctcctctcagtggcctgggggcaactttaagatctctcctcctgtaagtcagaaggcaggttctcctcccatagaatccagtccgtcgacagagttagatgcctcttcctctttgtcctattgtgcttaccacattacgttgtcctgtgctagtttgtttttctgtctcctctgaagttcccaaaggatggcttattattcagctaagtggtacacaacctggggccagtccatggtaggcacttaataaagtcttgtcaggaaggtggatgaatgaacgcttaacacacaggtgtgtgtgtatctgctgtgctccttgctagggggatctccagctggttgtctctggtttgtgtcagatgcagccctgccttgacagaagctgtttctgactccctgtgtaacactaacaggactttcttttacctcctgtagccaaacaaagtcaggaatgaaactaaagagctgaggttgctctgtgcagaggacgagcaaaccaggacgtgctggatgacagcgttcagactcctcaaggtatgtgacatcttgcggtttgtgttgagtgcacatctcttcgtggaaaattggcctctggacttgatgtctattctggcaggaaaatgctcgtaacttttccgctgttctgtcacaatattttatttatcaaatgtagttaagcatctttctaaacaagatctcaggagcttttaacagagggcctaatattaaacagggtagagctaggttttccggactcagtactactgacattttgggtagaataattctttgtcgggggtctgggggacatccaagcattgcaggccacttagatgtgtggcatacctggtctctgcctgctagatgccagtcgcacgcccggccagttgagacaaccaaaaatgtctctaaatgttgccaaatgtgccctgaagccagaggatgggggattgcccctggttgagaccactagattagaagaataggattcgaaaaatcaggaccagggagaaaggaaatagtacatgaggtgttaattattttcacgactgaaccaactctcaggttcccaaaaagccagggccatgaagtaaacatgatgaattatacagttgactgaagctcctcagcagagacagtacctcctgactgtaagttctaaaggaaatttatcacgtggtactgcatatagagtaatgcccttgacagcaatttcatgccagttgccagagtgatttcatagggctgtttactgtagtcactttggatttcccacagtgtttctgtgcacatataccatatcccacatgtctggaattaagtctacagagtccttgtgagttgtaagttagctggcccaggtgagcttggctaaagtccaggggtctccataggagatgttcgtttagtcaactggagccaatggatacaatggtctagggatttctttacaaaaactcccagccttcgttgaactgtagtggcctttgagctggtccagagactcaaggtgaagtcaattaaggagatggaggaactgaaggaagcatagctcaaaactttcctggaggtgctgcagatccaattctgaatgtagtcctgttgtcccatccacttggcaggtagcattttgcacccagtaatccacagattccagagacattaaggatacatcctagtgccatttttataggatgctggggcccaaaccaaaagttccacagattggcttcctgtatctctctcccagaaccttattttatgttttcactgattaaaaaaagaattatggaaatcaaaactttacaaattcataatggaagaggaaatgtccatgttaatacatcatagatcatagaccactcctgtgtaagccggttttcagtgtaagggtcatcagtgggaactggtcacataggtgacatccattgagggcagtattctgcatggacctccagaaagaatgagattgctctttgtgtcctgttgcggaaaaattactaacaattaaaaagcaaagtacagaacagtatatagagagaaggctacatttgtgtgaagggaacaggaaaaattggaatatttgtatttgatggtatgctcatgaacattgtgtgagctgcaggagagaagaaagaggttgcttagtagggagaggagatgggagaggcagctgtgcagataggggcagcggccaggggtgatcttttgaagctgtctgtatatggttgaaattttaatctgcaaatgaatcatctgttttggaaaaggc

SEQ ID NO: 16407 - protein, 127 aa, Homo sapiens
MLACLCKRSLCFSHSTSRAQGSHTCPSTPPDSWEGELGCVQHCFLSLRSGVLLEMQVSLCLQQFSSLTKGPCLWRGTCLLPMVPTSPSVSFSRANISLPLWTFYLGSDLGAAQTSESLSSSGVAPLG

SEQ ID NO: 16408 - DNA, 2658 bp, Homo sapiens
acataagcaagggaacaccaaagtcctttgatagtgcttcagcactccttcacaaaatcaaattgaggtagtagtgaggccactgtggggatgtagtagccaatgatgtatcatttatcttgggacacacctgaaagttttaatggcaaaagctgaagttttggaaatctgtcttccttttgagctaaggctttaattctgcctcctctttgatcttcccttccaaaaagctgcctttgagaaatggtacaatttctctctcatgtttaagaggtttgtgacattagctacctggggacattattgtccatcagagaacttatataaagaaaacaaaaaaagatattatatgcacagacactgtctaatggattcttcctgtttcccactcctcttatcttccttgactcagcacaaaagtgctcaacaggccataaactcaaaagaccctcctccctgttagagctaaaaatcctgcgtgataacctttcagatgctcagttaagggcaaatttgtaactgagttttaaaacttggtgtgttaccctaagacttatcaagaaaagaagaaagagactcgaggggttttgaacaaggagttaggaataggtgaaactttttatcatgtttgttcctactgtgtggggttttgggggagtcaggaatggtatccacaagactttggcatttatgatgatattcctgccttgttccggaattcctctatttatccctttgcatgaggacagtgtcaccactgtctattgctaggccctaaattatctcaagaaagggcttaagggtggtgaaggggttgtggaattaccttcccctctcacttttccattctctcttctgccctctccctccttcctcatttcttttccctttactctccttccttcctctcttcttctcccctccctccctctctctcttccttcctttctatttttttacagtacttgctaagtatctactattgtcagtcaatgcacaatgatatgcaataatcatgatagacgtaaactgaggaagtttataagataatgggagaaaacaatttcccaaatcaaaggatcacaaaaatgcactttagcctaggcaacagtgagacgcgatcttaaaaaaaagtagaatgaacaattgtggtgaatcatttggtgaaaaggcacatgatgctataagagcataaaacaaagggatcttataaatatgtgagatttccgagtaatactatttcttggtaatacttaagaaaagaaaaaagctaaatcttaggtagtatctcatctccaccacttactatttaaacttgggcaatttgtttaagctctttgactcataatttgcttatcagtaaagcagagataataatatctacccccatcctcagtttatgtaattggaaatactaaatttgaaatatttagttgacgtacagtgagaatttaatgaaaggtatttcttatcactaagttcttatttcagtggtccttttggtcactgaaaggtgtcaaattcttgctgctatttggtttgtatattaattgcaagtgtaagaaactgaagttatacagactgaagtgagaaagggagattattctctgatgtaatttaaaagtccagtttatctgcaggtacagtttgattcaggtgttcaaatgatgtaattgggaatgtttctctgattctcttcctatgccattctctttgttcccttacttctcaggcaaagagggtctctttccacagtgaaggcttatattctattagccaagcaaacccagtggggaggaaaatgttcccttcctcactagtccctgcagacgttcctgggctggatctccttggactacccctgaacctgttgctgaactggtgctttcttctctttggctatgcttaagtctcctgcctgttcttggagaggagctggaggaggatcacgagacacccaaactacatgatctcagaaagtggggaagagtggcttcccagaggaaaattattgttattactaacaaaaagtaatagaggccgggcgtggtggctcatgcctgtaatcccaggatttggggaggctaaggcaggaggactgcttgagttcaagagtttgagaccagcctggacaacatagtgagatcccatccccacaaaaaaataaaagattagtccgacatggtggtgtatgcctgtaatcccagctactctggaggctgaggtgggaggatcacttgagcctgggagaccaaggctacaggaaggaaggaaggaagaaaggaaggaagggaggggaggggagtggaggagaggggagggcagggcagtttaggtgggaaggaaggaagggcagtttaggtgggaggattgctaggatggaaggaagggaggaaagaaggaaagaaagaaagaagtagagctgaggtgggaggattgctgaggccaggagttcaagaccagcctgggcaacatagggagaccccatctctacagaaaaattcaaaagttagctgggcatggtggtgcatgcctttagtcccagctactcgggagactgaggcaggaggattgcttgagtccaggagttcagagttacagtgagctttgattatgccgttgtactccagcctgggtgacagggagagaccctgtctc

SEQ ID NO: 16409 - DNA, 1691 bp, Homo sapiens
  CDS (372)..(1604)
gggccgggcagggccggggcgtgggccggcaggaagatggcgaacgtggggctgcagttccaggcgagcgcgggggactcggacccacagagccggcccctgctgctgctcgggcagctgcaccacctgcaccgcgtgccctggagccacgtccgcgggaagctgcagccccgggtcaccgaggagctctggcaggctgccctgagcacgctcaaccccaaccccacggacagctgtcccctctacctaactacgccaccgtggctgccctgccctgcagggtgagccggcacaacagcccctcggccgcccacttcatcacgcggctggtgcggacctgcctgccgcccggagcgcatcgctgcattgtgatggtctgcgagcagccagaggtctttgcttccgcctgtgccctggcccgggccttcccgctgttcacccaccgctcaggtgcctctcggcgcttggagaagaagacggtcaccgtggagtttttcctggtgggacaagacaacgggccggtggaggtgtccacattgcagtgcttagcgaatgccacagacggcgtgcggctagcagcccgcatcgtggacacaccctgcaatgagatgaacaccgacaccttcctcgaggagattaacaaagctggaaaggagctggggatcatcccaaccatcatccgggatgaggaactgaagacgagaggatttggaggaatctatggggttggcaaagccgccctgcatcccccagccctggccgtcctcagccacaccccagatggagccacgcagaccatcgcctgggtgggcaaaggcatcgtctatgacactggaggcctcagcatcaaagggaagactaccatgccggggatgaagcgagactgcgggggtgctgcggccgtcctgggggccttcagagccgcaatcaagcagggtttcaaagacaacctccacgctgtgttctgcttggctgagaactcggtggggcccaatgcgacagggccagatgacatccacctgctgtactcagggaagacggtggaaatcaacaacacggatgccgagggcaggctggtgctggcagatggcgtgtcctatgcttgcaaggacctgggggccgacatcatcctggacatggccaccctgaccggggctcagggcattgccacagggaagtaccacgccgcggtgctcaccaacagcgctgagtgggaggccgcctgtgtgaaggcgggcaggaagtgtggggacctggtgcacccgctggtctactgccccgagctgcacttcagcgagttcacctcagctgtggcggacatgaagaactcagtggcggaccgagacaacagccccagctcctgtgctggcctcttcatcgcctcacacatcggcttcgactggcccggagtctgggtccacctggacattgctgcaccggtgcatgctggtgagcgagccacaggcttcggtgtggccctcctgctggcgctcttcggccgtgcctctgaggaccctctgctgaacctggtgtccccactgggctgtgaggtggatgtcgaggagggggacctggggagggactccaagagacgcaggcttgtgtgagcctcctgcctcggccctgacaaacggggatcttttacctcactttgcactgattaattttaagcaattgaaagattgcccttc

SEQ ID NO: 16410 - protein, 411 aa, Homo sapiens
MVCEQPEVFASACALARAFPLFTHRSGASRRLEKKTVTVEFFLVGQDNGPVEVSTLQCLANATDGVRLAARIVDTPCNEMNTDTFLEEINKAGKELGIIPTIIRDEELKTRGFGGIYGVGKAALHPPALAVLSHTPDGATQTIAWVGKGIVYDTGGLSIKGKTTMPGMKRDCGGAAAVLGAFRAAIKQGFKDNLHAVFCLAENSVGPNATGPDDIHLLYSGKTVEINNTDAEGRLVLADGVSYACKDLGADIILDMATLTGAQGIATGKYHAAVLTNSAEWEAACVKAGRKCGDLVHPLVYCPELHFSEFTSAVADMKNSVADRDNSPSSCAGLFIASHIGFDWPGVWVHLDIAAPVHAGERATGFGVALLLALFGRASEDPLLNLVSPLGCEVDVEEGDLGRDSKRRRLV

SEQ ID NO: 16411 - DNA, 1727 bp, Homo sapiens
caccaccaggccttccttgcaagagttcctgaaggaagcactaaatatggaaagaaaaaaccattaccagccactacaaaaacacactgaagtacatagaccaatgacactataaagcaaccacataaacaagtctgcaaaataaccagctagcatcatgatggcaggatcaaattcacacataacaatactaatatcaaatgtaaataggctaaatgccccaattgaaagacagagaagtgcaagctggataaagagccaagaccgattgatacgccatgtttaagagacccatcacatgtgcaaagacacacataggctcaaaataaagggatggaggaaaatctaccaagaaaatggaaatcagaaaaaagcaggagtcacaatcctagtttttgacaaaacagactttaaaccaacaaagataaaaaaaaaagacaaagcaaggcattacataacagcaaagggttcaacaagaagatctaactattctaaacatatatacgcacccaatagcagaggacccagattcataaagtaagttcttagagacctacaaagagacttagactcccacacagtaatagtgggagactttaacactccattgacaatattagatcattgagataaaaaattaacaaagatgttgaggaccttaactcagctctggattaagcagacctgatagatatctgcagaactctccactccaaaacaacagaatatacatttttctcatcatcacatggctcttaaaaattgatcacataatcggaagtaaacactcctcagcaaatgcaaaagaactgaaatcataacagtctctcagaccatagcacaatcaaattgaactcaagattaagaaattcacccaaaaaattaaaacaaaaatgaaattaactcagaaccacacaactatgtggaaattgaataacctgcttgtgaatgactcctgggtaaatactgaaattaaggcatagatcaagaaattatttgaaactaataagaataaagacacaatgtaccagaatctctgggatgcagctaaagaagtgttaagacagaaattaatagcactaaatgcccacatcaaaaagctagaaagatctcaagttaacaacatcacaactaaaatagagaaccaaaaacaaaccccaaagctagcagaatacaagaaataagatcagagcagaactcaaggagacagagacacaaaaaatctttcaaaaattaacaaatccaggagctggttttttgaaaaaaaattaatagactgctaactagactaataaagaagaaaagagagaagaatccaacacaatcagaaatgataaaggggatatcaccactgaccccacagaaatacaagcaaccatcagagaatattataaacacctctctgcacataaactagaaaatctagaaaaagagaataaatttctggaaacatacaccctcctaaggctgaacctggaagaaattgaatccttgaatagaccaataacgacttctgaaattgaggcagtaatagtctaccaaaaaaaaaaaaaaaaaaaaaaaaaagcccaggaccagacaaatttacagctgaattctaccagaggtacaaaaaagagctggtaccatttctactgaaactattccaaacaattgaaaagaagggattcctccttaactctttttatgaggccagcatcatcctgataccaaaacctggcagagat

SEQ ID NO: 16412 - DNA, 2161 bp, Homo sapiens
  CDS (44)..(1657)
gctgagaggcgggcgggccgggggcgccgggcgcggggccgccatgtggagcggccgcagctccttcaccagcttggtggtgggcgtgttcgtggtctacgtggtgcacacctgctgggtcatgtacggcatcgtctacacccgcccgtgctccggcgacgccaactgcatccagccctacctggcgcggcggcccaagctgcagctgagcgtgtacaccacgacgaggtcccacctgggtgctgagaacaacatcgacctggtcttgaatgtggaagactttgatgtggagtccaaatttgaaaggacagttaatgtttctgtaccaaagaaaacgagaaacaatgggacgctgtatgcctacatcttcctccatcacgctggggtcctgccgtggcacgacgggaagcaggtgcacctggtcagtcctctgaccacctacatggtccccaagccagaagaaatcaacctgctcaccggggagtctgatacacagcagatcgaggcggagaagaagccgacgagtgccctggatgagccagtgtcccactggcgaccgcggctggcgctgaacgtgatggcggacaactttgtctttgacgggtcctccctgcctgccgatgtgcatcggtacatgaagatgatccagctggggaaaaccgtgcattacctgcccatcctgttcatcgaccagctcagcaaccgcgtgaaggacctgatggtcataaaccgctccaccaccgagctgcccctcaccgtgtcctacgacaaggtctcactggggcggctgcgcttctggatccacatgcaggacgccgtgtactccctgcagcagttcgggttttcagagaaagatgctgatgaggtgaaaggaatttttgtagataccaacttatacttcctggcgctgaccttctttgtcgcagcgttccatcttctctttgatttcctggcctttaaaaatgacatcagtttctggaagaagaagaagagcatgatcggcatgtccaccaaggcagtgctctggcgctgcttcagcaccgtggtcatctttctgttcctgctggacgagcagacgagcctgctggtgctggtcccggcgggtgttggagccgccattgagctgtggaaagtgaagaaggcattgaagatgactattttttggagaggcctgatgcccgaatttcagtttggcacttacagcgaatctgagaggaaaaccgaggagtacgatactcaggccatgaagtacttgtcatacctgctgtaccctctctgtgtcgggggtgctgtctattcactcctgaatatcaaatataagagctggtactcctggttaatcaacagcttcgtcaacggggtctatgcctttggtttcctcttcatgctgccccagctctttgtgaactacaagttgaagtcagtggcacatctgccctggaaggccttcacctacaaggctttcaacaccttcattgatgacgtctttgccttcatcatcaccatgcccacgtctcaccggctggcctgcttccgggacgacgtggtgtttctggtctacctgtaccagcggtggctttatcctgtggataaacgcagagtgaacgagtttggggagtcctacgaggagaaggccacgcgggcgccccacacggactgaaggccgcccgggctgccgccagccaagtgcaacttgaattgtcaatgagtatttttggaagcatttggaggaattcctagacattgcgttttctgtgttgccaaaatcccttcggacatttctcagacatctcccaagttcccatcacgtcagatttggagctggtagcgcttacgatgcccccacgtgtgaacatctgtcttggtcacagagctgggtgctgccggtcaccttgagctgtggtggctcccggcacacgagtgtccggggttcggccatgtcctcacgcgggcaggggtgggagccctcacaggcaagggggctgttggatttccatttcaggtggttttctaagtgctccttatgtgaatttcaaacacgtatggaattcattccgcatggactctgggatcaaaggctctttcctcttttgtttgagagttggttgttttaaagcttaatgtatgtttctattttaaaataaatttttctggctgtggc

SEQ ID NO: 16413 - protein, 538 aa, Homo sapiens
MWSGRSSFTSLVVGVFVVYVVHTCWVMYGIVYTRPCSGDANCIQPYLARRPKLQLSVYTTTRSHLGAENNIDLVLNVEDFDVESKFERTVNVSVPKKTRNNGTLYAYIFLHHAGVLPWHDGKQVHLVSPLTTYMVPKPEEINLLTGESDTQQIEAEKKPTSALDEPVSHWRPRLALNVMADNFVFDGSSLPADVHRYMKMIQLGKTVHYLPILFIDQLSNRVKDLMVINRSTTELPLTVSYDKVSLGRLRFWIHMQDAVYSLQQFGFSEKDADEVKGIFVDTNLYFLALTFFVAAFHLLFDFLAFKNDISFWKKKKSMIGMSTKAVLWRCFSTVVIFLFLLDEQTSLLVLVPAGVGAAIELWKVKKALKMTIFWRGLMPEFQFGTYSESERKTEEYDTQAMKYLSYLLYPLCVGGAVYSLLNIKYKSWYSWLINSFVNGVYAFGFLFMLPQLFVNYKLKSVAHLPWKAFTYKAFNTFIDDVFAFIITMPTSHRLACFRDDVVFLVYLYQRWLYPVDKRRVNEFGESYEEKATRAPHTD

SEQ ID NO: 16414 - DNA, 2595 bp, Homo sapiens
  CDS (226)..(2169)
aactcgcacccgggtcctggctgcaccgcatcccctcctgcaccccctggatggcccttcagccaacgggggcctgggcgatggtcgaccacggagctgcgcaaggaaaagtcccgggatgcggcccgcagccggcgcagccaggagaccgaggtgctgtaccagctggctcacacgctgcccttcgcccgcggcgtcagcgcccacctggacaaggcctctatcatgcgcctcaccatcagctacctgcgcatgcaccgcctctgcgccgcaggggagtggaaccaggtgggagcagggggagaaccactggatgcctgctacctgaaggccctggagggcttcgtcatggtgctcaccgccgagggagacatggcttacctgtcggagaatgtcagcaaacacctgggcctcagtcagctggagctcattggacacagcatctttgatttcatccacccctgtgaccaagaggagcttcaggacgccctgaccccccagcagaccctgtccaggaggaaggtagaggcccccacggagcggtgcttctccttgcgcatgaagagtacgctcaccagccgcgggcgcaccctcaacctcaaggcggccacctggaaggtgctgaactgctctggacatatgagggcctacaagccacctgcgcagacttctccagctgggagccctgactcagagcccccgctgcagtgcctggtgctcatctgcgaagccatcccccacccaggcagcctggagcccccactgggccgaggggccttcctcagccgccacagcctggacatgaagttcacctactgtgacgacaggattgcagaagtggctggctatagtcccgatgacctgatcggctgttccgcctacgagtacatccacgcgctggactccgacgcggtcagcaagagcatccacaccttgctgagcaagggccaggcagtaacagggcagtatcgcttcctggcccggagtggtggctacctgtggacccagacccaggccacagtggtgtcagggggacggggcccccagtcggagagtatcgtctgtgtccattttttaatcagccgggtggaagagaccggagtggtgctgtccctggagcaaacggagcaacattctcgcagacccattcagcggggcgccccctctcagaaggacacccctaaccctggggacagccttgacacccctggcccccggatccttgccttcctgcacccgccttccctgagcgaggctgccctggccgctgacccccgccgtttctgcagccctgacctccgtcgcctcctgggacccatcctggatggggcttcagtagcagccactcccagcaccccgctggccacacggcacccccaaagtcctctttcggctgatctcccagatgaactacctgtgggcaccgagaatgtgcacagactcttcacctccgggaaagacactgaggcagtggagacagatttagatatagctcaggatgctgatgctctggatttggagatgctggccccctacatctccatggatgatgacttccagctcaacgccagcgagcagctacccagggcctaccacagacctctgggggctgtcccccggccccgtgctcggagcttccatggcctgtcacctccagcccttgagccctccctgctaccccgctgggggagtgacccccggctgagctgctccagcccttccagaggggacccctcagcatcctctcccatggctggggctcggaagaggaccctggcccagagctcagaggacgaggacgagggagtggagctgctgggagtgagacctcccaaaaggtcccccagcccagaacacgaaaactttctgctctttcctctcagcctgagtttccttctgacaggaggaccagccccagggagcctgcaggaccccactgaacttacccaattccttctttcagtcttaagttttcccattctagacccctaccctctaggctgtgctgctcctggacttcatgcctctccattctcattgcctacaatctctgtgccccagaaccccctccactccccaccccagccctccagacatgcacttaccttgactttaccccacatgtttggggcacctggggctccctcaccccttgggtggtttgcaatctgaagacttctccagccacacaggcacatgcacaggcacggtgctgtctgcatattgccaggtggggagagaagccaggacccctcagctgtctgccaccatctatgtgcctcccttaccccccagctttctttctacagatggtgctactcttggtctcccacaggaaaaggcctccccccttcttagccccatttaccccgtttgtggaaggcactgctcgctctgttttgtcagagagtggcctatccagattggtgctatgggggggtctgacccctccctcctccctctggaggtgatgtgggccctcaatggagggaattgtgctgggctagggaaaggggagggactagactggccacactggctctgaaactcaccaacctctatacaccataaagacctcaccttggtaggcaccag

SEQ ID NO: 16415 - protein, 648 aa, Homo sapiens [sequence omitted]

SEQ ID NO: 16416 - DNA, 1449 bp, Homo sapiens
  CDS (64)..(1113)
acatcttgcccactccgcgcgcggggctagcgcgggtttcagcgacgggagccctcaagggacatggcaactacagcggcgccggcgggcggcgcccgaaatggagctggcccggaatggggagggttcgaagaaaacatccagggcggaggctcagctgtgattgacatggagaacatggatgatacctcaggctctagcttcgaggatatgggtgagctgcatcagcgcctgcgcgaggaagaagtagacgctgatgcagctgatgcagctgctgctgaagaggaggatggagagttcctgggcatgaagggctttaagggacagctgagccggcaggtggcagatcagatgtggcaggctgggaaaagacaagcctccagggccttcagcttgtacgccaacatcgacatcctcagaccctactttgatgtggagcctgctcaggtgcgaagcaggctcctggagtccatgatccctatcaagatggtcaacttcccccagaaaattgcaggtgaactctatggacctctcatgctggtcttcactctggttgctatcctactccatgggatgaagacgtctgacactattatccgggagggcaccctgatgggcacagccattggcacctgcttcggctactggctgggagtctcatccttcatttacttccttgcctacctgtgcaacgcccagatcaccatgctgcagatgttggcactgctgggctatggcctctttgggcattgcattgtcctgttcatcacctataatatccacctccacgccctcttctacctcttctggctgttggtgggtggactgtccacactgcgcatggtagcagtgttggtgtctcggaccgtgggccccacacagcggctgctcctctgtggcaccctggctgccctacacatgctcttcctgctctatctgcattttgcctaccacaaagtggtagaggggatcctggacacactggagggccccaacatcccgcccatccagagggtccccagagacatccctgccatgctccctgctgctcggcttcccaccaccgtcctcaacgccacagccaaagctgttgcggtgaccctgcagtcacactgaccccacctgaaattcttggccagtcctctttcccgcagctgcagagaggaggaagactattaaaggacagtcctgatgacatgtttcgtagatggggtttgcagctgccactgagctgtagctgcgtaagtacctccttgatgcctgtcggcacttctgaaaggcacaaggccaagaactcctggccaggactgcaaggctctgcagccaatgcagaaaatgggtcagctcctttgagaacccctccccacctaccccttccttcctctttatctctcccacattgtcttgctaaatatagacttggtaattaaaatgttgattgaagtctgg

SEQ ID NO: 16417 - protein, 350 aa, Homo sapiens; identical to SEQ ID NO: 14642

SEQ ID NO: 16418 - DNA, 1494 bp, Homo sapiens
  CDS (116)..(457)
gtcggcagtcggacacagcccagggcactcgactgagagggcttaacgggactgtcggggcacggaggggacttcactcagcctcagggccaaaggaggcttcctggaggaagtgatgactaggcagggtcttgaaggaaaagttcacctgccaggcagaggaagcaggggcactagcctggcatggcatggcgcggggctggctgatgagcggagcagctggggtgggggccttggtctccgaggacctgggagcaagctaaggaacttgggctttctcctacgggcagcgggaagccctggcaagtttaagcaaagagtggacacactcaggctgggaggcgtctttacccctggggagtggagaggagaggatagagtcaggggttcagcaggagtaggagaggatgtgtggcctgggggcttctccgagtcagcaatacataaggggaagccctaggaaggcccctcacgcctcagagccagagccactgacccctgtgtcttctccctgcccagaggagaccaactcacaggaccaccgtccccctagcggtgctcagaaaccagccccctcggtgagtgacttgagtggggatccaggcctctcattccctgctgggggttgtgggttctagagtcggggaatgagccctctgcatggggtaaggcactgcactccccacggcggggcactcccagagtggatggatcaaagatgatcacctcgtgcccttcctcaccaagccatatgctgggcgggcacacagagggcaccactgcccttgtctgatggaagaattcaagtctcagagagtgaagtgacttccccagtgttagtagcatccctggtctccagactcagtccggtcctgagtttaaaagagcatctgggccgggcgcggtggctcatgcctgtaatcccagcactttgggaggccgagttgggcggatcacaaggtcaggagattgagaccatcctggctaacacagtgaaaccccgtctctactaaaaatacaaaaaattagccgggtgtggtggtgggcacctgtagtcccagctactcgggaggctgaggcagaagaatggcatgaacccgggaggcagagtttgcagtgagccgagatcgcgccactgcattccagcctgggcgacagagcgagactccgtctcaaaaaaaagaaaataataataaaagaacatctgatgaggggccaggcgtggtggctcatgcctataatcccagcactttgggaggccgaggtgtgcagatcacaaggtcaggagttcgagaccagcctggccaacatggtgataccccgtctctattaaaaatacaaaaattagctgggtgtagtggcggacacctgtaatcccaggtactcaggaggctgaggcaggagaatcgcttgaatctgggaggtggaggttgcggtgagctgagagcacgccattgcactctagcctgggcaacaagagcaaaactccatctc

SEQ ID NO: 16419 - protein, 114 aa, Homo sapiens [sequence omitted]

SEQ ID NO: 16420 - DNA, 1577 bp, Homo sapiens
ctcttggtttttgttccagctgagcaattttcattgccgacagcacaacatacattaggataaagcaaataaacaatgcaaggcacttggagccaggaagtcgcatctcagactagaaacacatagttttctattgacatttgggaggtgggctgctaaataggcgagccagccaccaaatagaaaaccagtggccatgaggttcttgcacttctagggaagccatttatttaatcgttagatctttgaaaggtgtctgaagttgattttgatgtaacaacagccagtttctttgtaattaaatattaactcaaaactatgtcttgggtaactgttaacctttgccatttgttgtttgccttagacatgtaattaacattcattgaatttaatttgttgttgttcacgtcttttattaactcatacacaattacttgtcttctgtttttaaaaacttttttgggaagacagggtcttgctctgtgcgcaggctggagtgtggtggcttgatcttgactcactgcagcctcgacctcctgggctcaagccatcctcccacctgagccttccaagtagctaggaccacaggcgcgcaccaccatgcctagctaattttttattttttgtagagatgggatctcgctatgttgcccaggctggtctcaaactcctgggctcaagtgagccacagtgctgagccttgtcttctggtttgttgaagcagtaagtcagacaatatttgccacaataatgtctgtcaattgtttgtggctggccataaaaactccagcatcacattcatctgaaggacactgctaatgaaggccactcattttgctgttgtcatccaccttattgtatctcaggacatccagcttaatctttttctattatgtttattcttcttgggagtggtatgactacttctatgaagtcccaacacaagatgaagagtggactccttttgaatgtgtagttagagtatgttcatctttcagttgcttgccagcaaagatcagtctctgttgatcaggagaaattccttctttattctggatcttggcctttggattttctgttgtgtccaagggttcaaccttgagagtggtgctcttcctgtaaggacttttatgaaaatctgcctgttgcttgtggctccatcccagatggtggatcagaaaactgaatttcctattttgaaacaaatttcttgttaatttaatactttactttgaaataatccatgtaaatttggcatacatatttttaatagttccttattttaaaatatgatctagacctggcacggtggctcacagctgtaatcccagcactttgggaggccaaggcaggcgggtcttgaggtcaggagttcaagaccagcctggccaacacagtgaaacccgtctctactaaaaatacaaaaattagctgggcatggtggcgggcacctgtaattccagctactcggggggctgaggcaggataatcgcttgaacctgggaggcagaggttgcagtgagccgagatcgcgccattatactccagccttggtgacaagtgcgaaactctgtctc

SEQ ID NO: 16421 - DNA, 1524 bp, Homo sapiens
tttattaagttttgcaacactaattcccttatagtagctagaaattttcaacatcaaataggcatttagtcatgttgaattgaattttaagttgaattcctgtggcttgggctttcttttttatactagtttgtataaactgttcaactcctatagctcttacgtctcactctcagtgagctggtaacagaatcttcacagacaagtggttgcacattccatttatttagcaatgccctctgtgtgtgtgtgtgtgtgtgtgtgtgtgtgtgttgtgtgtgtgtgtataggttaattttgttagtgttctttaaatttcagaaaatagtcttttagttgaacaaacaaataaatgaaatatgtcagtagatcagatgaaactgtgacccgttcggcaatagtaagtatacagtgtgtctgggctaccagatggttttagaaactgtcaatttccaaaatacagaaatctgagagagcttcataaacaatgtattgctttgctgaagatgacagatcccattgaggaaatgcccctttagttgttttagatcattaatgatactctataaacataataagattaacacggagaaacaaaatacctgtgtttgcagtattctttagttatcagattattgtctcagttctcaaaatgccaaatgtgataggataagtgcaagataagaagtacatttttaacatctattcagttagcattaatgctcaagttaaagctgggctcctaccagggacataatgggctcctgtttaacatatttatgttggttgtaaaattaggaactgtctttgcagcccacatcacctgcataagtgcaaaacatataaatcaagagaagttccagtgacataaaaatgccatcgaatagaatagcatgaaactacttgcaagatacttgtatattatgctagggtgtatgggggtacacactcagatttctagggggtttggagaacaaagaataactatacagatagaactcatggatgaagacatttcctcagagcacagcctgaaccctagtggagaaacagcgggaaaagaaaggccatcagtagccagacttgaataaccgccccaccccccacacccccactgaagacaacagcgtctatgctttcagaaggcatttgagcagctttatgttgttactggagcttgcatcttgggcctcctaagtcagtgaacttttctgtgatgttttagggttccttataacctggtggctattactcccttgccccctcataatccagttctttgtagaatgatttctgttatctaaaattagtccttttttctttttttgggggaggggggaggggacgtgcagtgatttattttgaactttgtaattggagtccctgaagtgcccccccaaattatgagctattaataaggagctttctgaatcctaattactgtctcaaaaacagagtggacacttgagaagtttttcaactcccccgcttctccctcccaaaagccacccacccccataatct

SEQ ID NO: 16422 - DNA, 2189 bp, Homo sapiens
agcgcgcgggaggcgggattgtgcttgcacgacttcccccggcccgcggcctgtgagcccaggtcctggggtgaaccgagcgctcgctcgttcgtcagaccgtagcgctccagcggctgtccttactgtgtagtagccaaagctgagggtgatgactgtgaaccagaacagactgcctcgctgaaaagtcacttggaactcttctgtggcatctgaagcagatggacgaagccaagagggccgagagtatctcagcacctagaaatggacaaggctggttattagaacaaagatttcgcaggtggtgagtctcaaaggcgaagctgaatgaggcaagaatctgcatcaaagagccctggaagcaatcatggctcaactgtgatgcctttagaacatgaagtcctccaagaagatgccataggaatggcctccatcccagggcctggagagcagccagagacaagaagagtagcccaggagggcactggcagtcagtgctacactgtggcctgtcagtctcagagccaggatttaatcactggatctcccattaaccagtcataatgaagtaagaacaagaagatggggaagaggaagtgtaaaaccgtggcttaaatttaccaaggataagctgagtgtacttcagcagtcatttgcacagaatccttatcctaattttacaaccagggaaaaactggctggacagtctcttgtcctgtgtttgtaattgataactggtttcaaaataaaagccagaccaccacttagagagagacacagaatgttcactgccagggaactgcatgattcctctgccaaaggccacccatttacaagaatccaggaaaaccaggtggaatctcccaatgatgaccctgagcagaacttcttgtacccaggaagttctactgggtggagctggccactcttccgtggagacacaggggactcccaattaacatgatggctcaaataactgtagccttatggattaaaaggaaactaagctgtgatttggagtatccaggtgatacagaaaatggcccttgtcgatgtagatcagcattatttccttatccttctgcatctcctcctcagtattctgaaagggacaagcctgagatgggggaaagccagcatgcaaggccctcccctttgtgctgtgttcatggtgtgcacggagagaggcagcagcaggaggaacagaaaggttattttctttactgactctttcaaggacatcagcagaatggttgggaatgtcatcatgagcagcctcagcctcagaattaccaggagaagctggtcttccaggatcaggttctaatgtatatgagtcacaggatttagggaagcaggcactttcccttcagtcccagcagcatggttgatgttcccaagtaatggagagtccctgtgctctcagttgtggcacacacctttgcaaatagtgatcagatctccacaaacgcctcttgggtaagatatgcagcaacatagctggctgcagagcaacccagttcccaaatccagcagctcttggatgagaagtctgcaagtgtttactgctgggaccaggactgtgtttctaggaaatggtgctaggcttcagagagcatcatccacaggtcatcccacaaccatccacacagaagcctgaggaaaagggctctgcagagcttgcacataaagatgctgaactcaggaaggctctgtgagctgctggtctcttctgttagggcagcagtgtcctgagaaggtggagctagagtatggagaacaaaactaacaagcaccaaggcagcaagcaaggcaacccccaaatgacagcagttgccaaatccaaagcaatctgtgcttcagaagacagaggctctgcacagtccctgtctcagacattgtctcctccttagaagatacctaacaacagcactgtgggaggctgaggtgggtggatcaccaggtcaggagatcaagaccatccttgatctttagtagagacggtgaaacactgtctctactaaaaaatacaaaaaaaaattagctagccgtggcggcgggcacctgtagtcccaactatttgggaggctgaggcaggagaatggcctgaacccgggaggcagagcttgcagtgagctgagattgcgccactgcactccggcctgggcaacagagtgagactccatctc

SEQ ID NO: 16423 - DNA, 2518 bp, Homo sapiens
aagctacactgcagtcatatttggcatatgtgacatataggcccactgcatttccttccaaaggcaagatgccaagggaaggtgccagtaattttatgaccaatatgacaccattttgtggtgtttgtaagttgaaacaatatatttccctgcattacacaagtttataaaaaacaaacaaaaaaaagaggccccagctgtggttgatcgatgatgaattgaatagagcctaaccttccaggcttctcacttgcacaggcccttccaaggtcctgggagggcccctggaaatttttgtagtcataatttttttaatgtttttactagataaggctcaggccccacaaaatcctgaaatcatccctgggttccaatagttacaacccagtaaatctcttgaatgaagcctctatgttattgacaaatactgactggccaagttagcagggtgatagggtcagtctattttgaatctgaaatccatctcaaagacaggccaagagcttattagtggacttaactggattctgctggcccaagcgcagtaaagtcaaacaaccatatcgaggttttgcactggggaaaggaggacatttatttgcagggcatccaagcaagaaggaccaggcggctaactatcaaagtccctcactgaatgggggcaataatcatatctcttacagatgaaatcatgaatgaaatggtttatggaaaagcagcaatggttgataatcctaaatgttaagtatgtttatattttttccctgactttaaagtgcttctccttcattcctatacacaggtccagactgatggcttattttttaaaattctcttagtcacttcattggttctaacaataattttagaaactggatgactttgcaatgtagaaaggctatactttattcagatagagtacactcacatattggcttgtctatggcacatcgatatcatgccaagaatgtaagcactaagagagaataagaggaaaatccaggctttatccctattgaattatttatcccactattagaatattagtgaggtaggtgtggccacactgtgatggcaaattgagcttcggtcacaaacatgccttactgttccccccagtctactgacatcagcttcctttacatagcggtagatgcacaaaagtttgcacagttgagggtattgtcatcatgttttggtatgtactggaatcctggcagcttcttctctgattcggagaggcgcaaacattaaagacaaaaagaacaactcgagtctgtcctttggggtgatttagggtggctgtttaaatttgtagtggttgaaaagtcttgagattgtcacacctagcaactcttatacttttcttctctcagctgcagcttgttcttttcacctgtgtaacaagctgtcttctcttctcacagaagcttagcatttcttcctctgccccatagcattttttcaatacttaatttaccaggtgctgtttatgttgtaggcacctaagtacttatacaagtgagataacatgtccgaagttcttagaacagtgcttggcctatggtaaatgctccatacatgttacctcctatgatacctcattttcatttttccaacaactcttgcgatgcggttattattatcatttctattttgtagatgaggaagttgaaactcagagatgctaggtaatttgctaaggttcacatggctaataagtggcagaaccacttacaagctttgcaaataattttcaatgcagctcttagttcccctgtaataggagctgaatgatgacaatttggctttgtgtgcattgtatcttactttctaacttgaagaggacctgtagagcagtgagctccacttccctctgagaatcccacgcttctggagctcctggctgtaccagctctgggcatccccagggtttatgctcaccggtcagtgctggtgtgacatgatggctgagcaccggcactgtgtccagcgcattgctaggcactagacacgtgctctttcatttattcctcaaattgctttgtgctgtaaacgctacccagaaaggctcatgttcattactcaagtcacttcaccagaaagtgacagagccagaattcgaacccaggtctgccagattccaggtcccttgcttcttctgttgttgctcattgcaagggagtcttcttcaaggttattctcaggactttgattaagatacaggctcacagctgggcatggtgtctcatgctgtaatctcagcactttgggaggccaaggtgggtggatcacttgagctcagaagttcgagaccagcctggccaacatggtgaaaccctgtctctactaaaaatacaaaaattaaccaggcatggggacgggcatctatgatcccagctactctgaaggctgaggcaggagaatcacttgactccaggaggtggagtttgcagtgagccaagatcacaccactgcactgcactccagcctgggcaacagagtgagacttcatctc

SEQ ID NO: 16424 - DNA, 2118 bp, Homo sapiens
gaacaggttggttgaacttgggcagaatcacagatacaactccacactaaagaatgaaaataagcaatgaactagacagaaggaagaaatcatgaagacttaggaagcagaattacaatctgtcatattaacaaatggagtttgccttctaagatcagatgttgctcagaaactttcattgtttacctaataatttaatatcactagtttcctagtgggtcaagcagatgcaaaatccagcttattttcttctatgtgctctcaagcttattgcttattttaaagtaaaatcctgaaaaaggaaaatattaggttggtgcgaacgtaattgcggtttttgcattgttgaaatttgccgttttatattggagtacattcttaaataaatgtggttatgttatacatcattttaagcatatttctcactttttttttgctaatgacttattgctgtttatatttattttagactatggaaatgatgttagacaaaaatcaaatttagcgattttctgagttcaaaataggttataaagcagcagagacaacacacaacatcaacaatgcatttggcccaggaactgctaatgaacatacagtgccgtgatggctcaagaagttttgcaaaggagactagagccttgaagatgaggagtgcagtggccagtcatcggaaattgataatgaccaattgagaacatcatcgaagctgatcctcttacaactataagagagctgcccaagaactcaatgttgaccattttatggtcgttcggcatttgaagcaaattgaaaaggtgaaaaagctcaataaatgggtgcctcatgagctgagtgaaaaataaaaaaattcgttgttttgaagtgtcattttctctattctatgcaacaataatgaatcatttctctatcggattgtgatgtgtgccaaaaggtggattttatacgacaactggcgatgaccagctcagtggctggactgaaagaagctccaaagcacttcccaaagccaaacttgctccaaaaaatggtcatggtcattgtttggtggtttgctgccagtctgatccactacagctttctgaatccaggtgaaaccattacatctgataagtatgctcagcaaatcaatgaggtgcaccaaaaactgcaatgcctgcagccggcattggccaccagaaagggcccaattcttttcacgacaacactgggccgcacgttgcacaaccaacgcttcgaaaattgaactaattgggctatgaagttttgcctcatctgccatattcacctgacctcttgccaacaaactaccacttctttaggcatctcagcaacgttttgcagggaaattgcttccacaactagcaggacacagaaaatgctttccaagagttcgtcaaatttggaagcatggatttttatgctacaggagtaaacaaacttatttctcattggcaaaaatgtgttgattgtaatggttcctattttaattaataaagatttgtgtgaacctagttataatgacttaaaattcatggtcccaaacagcaattacttttgcaccaaactaaaaatataagttaaaatggaagagtctaggagcaaaccaagaaaagatcacctacttcatcatctctggtcaaaaacaaaccaaaaaacttaacagctatcacttaagtttgcttcctagcaattatttagcttccagtctagattacaggatatataaaactttctttctttctttcttaactatgacactggcaccaatgagagtcctgtgactgactttcacatttccaccattactcaattactggtaccataccacctctaatcccctaaatcaaactgcaattcaacaataaagggcgtacagagatgactttgtcctgaaggaaaatgaatatccttgtaccctctatatagctaacttccaaatgtaagagaactatggggtaaccttttgtttctattcctatcaagatgagcctttaagagagggacttttattaagctcttgaccaagaagaatacacttgattcagagtttctgatgctcttaatcagaactatatgtattgtctcaatattaaataaagtcaaatgtttccatac

SEQ ID NO: 16425 - DNA, 2242 bp, Homo sapiens
tttaaatgaaaaatcaagacacgcctaattaaacacagatattaaaagttttatttgacctttggctggttcctttttatggtcttaagtgctttagagaatttttaaacagattgtttatttaagctgttggcaaaagcatagtttcattagtaagttccattctgcaagtttagctactggatcccaaccattttcaggttgcgtattgcatattgttgattttcacatcttactctctcactgttcccttgtggaggaataaaagattttagaatagagtactgggaaatatcaaaatgtacacaccttgtatgcatatcactgtagctggcaagtgcaaaaaaagaagtagcatgaagtgtaaaaggagaagggaggtaattgaagtgttagatggtttgattgactgcaaatgggacaggaaaaaaaaggtagtcatcacctatttggagctaaatatgttgggaccacagaagccccctaaaatgtttcctggaagggacttggtacaattggctatgaaattgtactcaaaaccacttagtcagtactgcccagggaaatggaacctgtagctggctgccaacacacatacaatgtggtcatggcggggcggtagggaaggattatttacatttttttagttctggggaaaaatacactaatggaggaaacctggtttgaggacagctctttgatctatcttattgtagtagccatcttatgacaagagtaagaagttctggatctcaaagtggtgatccctgactttaggcagtttctgaaaaacttaagatcagtgagagaaagatgcaattggtcttattcattcagacatgaaataaggcaaatgagtgttagagggagagtgcccctaagtataggtctttattaggcagtcaaatgaagcaaactgtaggaagaaaaaaatgtggattgtattgtatgatttttataaataccaaaaatgtatacagattggaactacttgtatcttccattttcttgaccatgtcatttttaagttagtttattaagaacatctccatagtagcttatcggtagttttagcatgattacatgcaaaaacattcagttatctatgataaaacttgaatctttaaaaccaattcaacatgaacagaattatgttttgaagttgagaggatagtggctccaggttttgcctataggtgttttcttggaccacctttcaatggaagtgtaatttattactttttttccaaaggagagtcttaggtgccctcgtcttaatatctaaattatgtgcatcctacactagcaagaataggagtgctctacgctcttgctaaaggtaaattgtttgccagttctttcagaatcgtggttgagaaaatattcatggagtatggacattcagtccatttgtagtctgaatattaaaattgtgtcttttcatcacgctaaaatacctgcacaagttttttggagacagggtttcgctcttgttgcccaggctggagtacaatggcgtgatctcggctcactgcaacctccgcctcccaggttcaaccgattctcctgcctcagcctcccaagaagctgggattacaggcgcccaccaccatgcccggctaatttttgtatttttggaagagatggggtttcactgttggccaggctggtcttgaactcctgacctcaagtgatccacctgcttcatcctcccaaaatgctgggattacaggcgtgagccactgtgcctcgccccacacattttttttttgagcgttgcagatgtatcgtgccacactgtccttagatgctggtgatacggtgatatgtggtccttgtttttaagacctttataggaaagtggagagaagattaaacttgtgattacagtgcagcatgctagcctgccactgaggtggtattataaaagtgctgtggtgtgggcacgtggcccatgcctgtaatctcaacactttgggagactgaggcgggacgatcacttgagtccaggaattcaagaccagcctggccagcatagggagaccttgtctctaaaaaaattaaaaaattagtctggcgtggtggcacgcacttacggtccaggctatttgggaggctgaggtgggaatgaggtgggaaggtcacttgaatccaggagactgaggctgcagtgagttgtgatcgtgccgctgcactccagactgggcgacagagggaggccctgtctccccggccccgccgc

SEQ ID NO: 16426 - DNA, 1803 bp, Homo sapiens
caataataatattataatgtgtttctcttctaaaataaacagattttatactcattattttaaaatgtgatcaaaaccacataattgtttttagtcttctgattgcgatttttaaaaagaaaattcaaagtttggcattaaatatattttctgtaagataatataactacatatgataaaatgattaagtactctgatagtgtcactatttcaataccattattatctttaacatatgttaaaacactccagtacataactaataaagaggaattcacatggccagcaattttaaactggtgcagcaaacttatcttttgtgtttgcaaacataagagaactgaagaagcaagatgcaaacaatgtctccgttgttcagcatgtgttttatgatataatacattcgttcatgttgtgttatacaaattttgcagggagggtcgctcgttttatcaatttgtgtattttttatttcatattttgtacgcaatcatgagcatttttcttataaattgtacacaacaagaacctgttgaagattagaaggaaggagcagcacatacttttagcaatccttttatcttaccaatcactggaagaaaatgatgccaagaagccatgtgagatatcatctctgtctgtcatgttttcagaacagagtgtggcttactaatgttgccattgcaggctatgctttgtcaagtgaatacggttttcatcttaaggggatagtaagcaagatgttagcaatactcactcatcttcagatttcattgtcaaatatactaatatttcaaaaatatggttttcatctagaaaaaaatggagattttgagtgtacaaatatagccaatgcaggttaaatttaaacagagattttttttaatctctcccttttttatacttttttttttttttttgagacagagtcttgccctgtcacccaggcttcagtgcaatggcgcaatctcgactcactgcaacctccgcctcccaggttctagtgattctcctgcctcagcctcccaagtagctgggattacaggcacgcgctaccacacctggctaatttttgtatctttagtagagacaggtttcaccatgttggtcaggctggtatcgaactcctgacctcatgatccacccgcctcggactcccgaagtgctgggattacaggcatgagccaccacacctggcccccctttttatactttttacaagtaatctgacactaggtgccacataattaagataaagacaaaagtgcaaaaccatgtaaaatattgacttctaattgtgaattagtttcccttttctacttgttttgccttgttggatatgaaacatttcaagtatgtcattgtaggattatttttgacattttattcttagaatggtgatttagttgcataattctcatttgctataccacttttctaaaaaataaatgtttgaattattgaaatatcccaagatactccttgttatataattgtagatcattactttattttcagacaaattatgctattgtggataaatattcaatgtataaaatacaggacttcttttttcctgttttacaaaactccagtgccctttcttatctactattttaatattcctttgctatagtatattgcataatgtggagtcaactattttttacaatatgtacgtgttgatctgaaagttcctattgagttaaataatgaaaaataatttggtggaccatgaattttaaatttgttaaaaattgttttatttgtgtatgtgtataaaattaaattttgcaaattggt

SEQ ID NO: 16427 - DNA, 2176 bp, Homo sapiens
aattgtgactatatcgaataagttcacaatacttattaggatgtggtgaaactgaattatttgaagtaggaagacccgaagttcttcgcctatgagactggtgaagtgatttgtagccaacatgctccaacccatctattaagaaaactatggcatctattaagaaaattcaaaatcttaaacagagaaatccatatttagaaaacatggccagattaaatagggggtgggttattttcttaaatacgttttgtcaatttcacgtgaaaaatgaaaacccctagttcatgttacatattacatttctgttaagatgtatgttcctctgtttctaatagaagttgtggtggtttggaagtgaaaattgaatgtgagcacaggccatgtaaaggaaggagaaagtgtaaatgttaataacaggaaaactgaatttagctctcatgaggcagtcaaggaaatcattcattgaacatgttgggaaatacttttcatttggtgaccaaatacctacaaattcatttacaaaaaagaaaaatgaaagttacctcagaactaaactcagaaatatgtcccacatgggttcttgtaatgtttcttggtgaatgtctttatagaaagaagtgggcatgaaatgatgactcagtaattaaacacatgggggaagggaggctgtagaaaacactggattctatatttaaaatttcattcagttcactaatttgtttttactgaccaaagctttctatacctatgtagagtgtctgagaactagaagggcccatcagttgccactcggatgatccttttgtctcttttcagataaggccccagttcaacagcgtcctctgtgtcaatcagatactcccaggaatgagtgagccctgccgttttcccaagttgcccctcggcacactccagccagttccaaaacttttggcttgtttttgacacaaggccagataagctactcaaactggttttttaaaaaaaagaaaacaaccccaatctatattccttttttaatactgtgtacataacctgctgctcgaaagactaggttttcccctttccagctagttgtgttgtttctttatgtagacagctttaaatcatgtttacatgattcagccattttaaacaacctcttcctatttttttttcctttttgtacaaaaaaaaaaaaaagaagaagaaagaaagcaactaactaaaacctttcctttcaaggatttatgcagcataggatagggcaaccacaagtaaacacaaacatcacgtgagccttcttaaagaaaacatttccagaaatcactccaatgtcttaaaaaacacacaaaataaaacctttctccactgcagtttaactgtggcaatgagttgcagacgatcaccaacactgaaacttaatttagcttttttctctcctctccaatcataaaaagtctctttttggttcttcatgcaggagctattttctttcttttctggcctctaacaggaaaacagagtttctagccgagctgctcctgaggtattaaaagtgatgttcgtgtcatgcggatcaatcctgcccaaacattagtgtgcatgcaaatcacctggcagtcttattaaatgcagaatctgattccatgaggtccatgttgtccgtggaccaaacttgcagtagtagcgaggagtctagaagacgtccatgttatagaaattgaacccaggaaaggatttggggcttatgaagctaacaaaagcacgtaaaacccagcctgagaaacagtagctacacccagctcttgttgctattctggaaccaaataatgcaaaatatgctcgagacacatctcagttcttgcttgcttgactttctgagtgtctctctggcacaagggcctgtcatttgaattcccatcccccacctcatccccatgtattattccactggatatcccaaatatctagagtttcaaaacccaaatgatcccatttggccagagccttttttatgagtatgctaatgttatctgtgtatgaagcacacaaacttttccaggatacccggctatctattaatccttcagcacggacgttctccatggtaacagtctgacctataagatctaatgcctttcccagggggctcagaatcccatgagtttgggttaaatctgccataacatct

SEQ ID NO: 16428 - DNA, 1488 bp, Homo sapiens
tttggtggtggtggttttgttttgttttggagacggagtctcactcttgtcgcccaggctggagtgcaggcttggctcactgcaacctccacctcccgggttcaagcaattctcctgcctcagcctcctgagtagctgggattacaggcacccgccaccaccccccgctaattttttgtatttttatttttattttatttttttatttttttttgagacagagtgtcgctctgttgcccaggctggagtgtagtggtgcgatctcggctcactgcaagctccgcctcctgggttcgcgccattctcctgcctcagcctcctgagtagctggggctacaggtacccgccaccgcgcccagctaatttttttttttttgtatttttagtaaagacggggtttcacggtgttagccaggatggtctcaatctcctgacctcgtgatccgcccgccttggcctcccaaagtgctgggatcacaggcgtgagccaccgcgcccggcctattttttgtatttttagtagagactgggtttcatcatgttggtcgggctggtctccaactcctgacctcaggtgatccacctgccccgccccccaaagtgctagtgttacaagtgcgagccaccgtgtccggccgattctgaacagttttaataccattgctatttttgtgtttttcctgggcctttttttttttttttttttttttgagacagtctcgctctgttgcccaggctagagtgcaatggtgcaatctcagctcactgcaacctccaccccccacccccacaccccgttcaagtaattctcctgcctcagcctcccaaatagctgggattacaggtgtccgccaccacacccagctaatttttgttatttttagtagagatggggtttcactgtgttggtcaggctggtctccaactgttgccctcaggtgagccactgtgccccaccttttcctgggtttcataaggatctgaagtggtggattccttgtttttgctagtatctcatttagagttgagatggaccttaaaactcatctgttttaactcactttttaatagatgagttaaacttaatttacttaaggatgtacagttagagcctggaacttcaaccattattcactccccatgccctgtttccccccacttcgaaattaaatgcggttagcatcatatagttcattttccccctccatgctgctgtgtgattcttgactttgggtatgagtttttcatccttcatgcagggttctgtcagttcatggtatagtgattcagtgttaaaatggtggtgtctcagctgtgctgtgcacattccaaccttgtcaaattaatagtcctgagcaagcaagaaaaagaggtaataacatacccatttctttatgaatataagcttataatattttttcatgtgctatttttactgagcaaattgtatgtctcacatgttaacacaataaatatcttgacaatttt

SEQ ID NO: 16429 - DNA, 2080 bp, Homo sapiens
  CDS (1024)..(1926)
atgtacttactcatcacccagcttcaacatttatcaacatcttgccaatcttactgaatctatccttccttaccttttttaaaaatgtttccagagtgtgtcaaagctcatcccagatgtcctaatgtttctagtaaatgtttctgcacaattctaaaagacaaggatgtttttaaacccagccccgacactatcatacctcacaagattcatgctaattcctcagtgtcttctagtcccaagtccatgctcaagtgtccccccctgtccaggcaccctcttcaggggtcctccatgtttcatagcgagaaggggccctgagagttgggcaccccgggcaggctggctggagggggctttggaaaggaaggctttggccagcgtgtgagggtgcaggtctcaccagctcctgtttggtctgtttcaggaacaaatgtggtatctggggctggcggtctgagaagatggaaactgttagcggctacgaggccaaggcaggagaggctaggggtggggggctgggggtaggagatgaggtccaggaactcagctcctctccacatccatcccagagtagcccctgggctctggaaaccctgagcatttgtgggaactcagcgggcctgagtgcccagcccctgcggagtacacagggctcacccacatcatgggcccctacccagggtaccgagatcaaaagaggagtgtgttcctcttgaccctggggctgcatctcctcgttggtgacttcctggggttcagaccctgccacctcctccattttggggagcaagatctcatctgtctctgggacaggaggacctgggttctgcactggtgaggctgagtgtggggagcaggctctgagcccccagctccccgtgtcccctgctccccaggtgtacagtgccaccaacgtggagctggtgacacgcacacgcacggagcacctctctgatcaggacaagtcgaggagcaaaggtaaacccagcggggaagactccattccagtccttcctggggatggcgcagcagcattcctcccacaccggggcccccgtgcagcaggcagccagccccaccaaccccacagccatctcccctgaggagtacttcgaccccaacttcagcctggagtcacggaacattggccgccccatcgagatgtccagcaaagtacagaggttcaaggcaacactgtggctgagtgaagagcacccgctctccctgggtgaccaggtgacccccatcatcgacctaatggccatcagcaacgctcactttgccaagctgcgcgacttcatcactctgcgccttccacctggcttccccgtcaaaattgagattccccttttccacgtgctcaatgcccgcatcacctttagcaacctgtgtggctgtgatgagcccctgagctccgtgtgggtgccggcccccagctctgctgtcgccgcatcagggaaccctttcccgtgcgaggtggaccccaccgtgtttgaagtgcccaacgggtacagcgtgctgggcatggagcgcaacgagcccctccgggacgaggacgatgacctcctgcagttcgccatccagcagagcctgcttgaagcgggcactgaggcggagcaggtgaccgtctgggaagccctgaccaacacccggcccggtgcccgccctcctccccaggccacggtttatgaggaacagcttcagctggagcgggccctccaggaaagcctgcagctgtccacagagcccaggggcccaggatcccctcccaggacacccccagcccccggtccacccagctttgaagagcagctgcgcctggccctggagttgtcttcacgggagcaggaggagcgggagcggcgcgggcagcaggaggaggaggacttacagcggatcctgcagctgtcactcactgagcactgagccatagccccgggagggctggccaggccactccctgcccgcttttgtaatttatttatttataaactctctgctgctgagcttggggcctggagccccaggaatgagcaggcaggggagactgagatggaaataaagagactgtcgcagc

SEQ ID NO: 16430 - protein, 301 aa, Homo sapiens
MAQQHSSHTGAPVQQAASPTNPTAISPEEYFDPNFSLESRNIGRPIEMSSKVQRFKATLWLSEEHPLSLGDQVTPIIDLMAISNAHFAKLRDFITLRLPPGFPVKIEIPLFHVLNARITFSNLCGCDEPLSSVWVPAPSSAVAASGNPFPCEVDPTVFEVPNGYSVLGMERNEPLRDEDDDLLQFAIQQSLLEAGTEAEQVTVWEALTNTRPGARPPPQATVYEEQLQLERALQESLQLSTEPRGPGSPPRTPPAPGPPSFEEQLRLALELSSREQEERERRGQQEEEDLQRILQLSLTEH

SEQ ID NO: 16431 - DNA, 1825 bp, Homo sapiens
  CDS (1028)..(1528)
tttgctgagtttgctgagggaagactgttttctgttctctctctcacacacagagtggatgaggatgaggatgacctggaggaagaacacataactaagatttattactgtagtcggacacactcccagctggcccagtttgtgcatgaggtgaagaagagcccctttggcaaggatgttcggctggtctcccttggctcccggcaggtaaacagtagccagtatttccaccaggggccatcctgctcctttcgccacaactttgtcctgctcgtccaggccttgggagacgctgggtctgtgacaggctgaaccgtgtgaggagcagccccctccctgacctggccggcccagcactggaaggcaaaggagaggtggcggggcaggtccacatgtgttggtaggatgtcatttagctggcaccatctttttgcctctttctttctcctttgctgcagaacctttgtgtaaatgaagacgtgaaaagcctaggttctgtgcagcttatcaacgaccgctgcgtggacatgcagagaagcaggcacggtagccactgggaccgtggtgtagccgcaggtggtctggagagagtgaggcaggggtggcagtgactgaagaccattaagtgtctttcatagaaagaatggcagaggagaccccagttccttcctgagtcccctctccttgggaaaaagtgttcctactctctgggtcagtgtctggtccgaatccttggcttggagatgattttacgggctctttctggagaacagaagtaaaaccttacagtgttccgatgagaccacagtaggcagtacttgggagggtcttatagaccccaccccacggaagtgggtctcaacattacacaaccccctcttgggcccgtggacagttgctgtcctctctgttttctctctttgtgcctgtgccaccctcagagaagaagaaaggagctgaggaggagaagccaaagaggaggaggcaggagaagcaggcagcctgccccttctacaaccacgagcagatgggccttctccgggatgaggccctggcagaggtgaaggacatggagcagctgctggcccttgggaaggaggcccgggcctgtccctattacgggagccgccttgccatccctgcagcccagctggtggtgctgccctatcagatgctgctgcatgcggccactcggcaggccgcgggcatccggctgcaggaccaggtggtgatcatcgacgaggcacacaacctgatcgacaccatcacgggcatgcacagcgtggaggtcagcggctcccagctctgccaggcccattcccagctgctgcagtacgtggagcgatacgggaagcgtttgaaggccaagaacctgatgtacctgaagcagatcctgtatttgctggagaaattcgtggctgtgctagggggtgagagcctcgtccccctgctgaccccgggcctgcaaaactcgctgggctgctttttccttggatgcccatcaggacacctcagttctctgtgtttttaagaagggtcggctgggtgcggtggctcacgcctgtaatcccagcacttgggaggccgaggcaggtggttcacctgaggtcaggagttttaagaccagcctggccaacatggtgaaatcccatctctactaaaaatacaaaaaattagctgggagtgttgccgtggcctgtagtcccagctgctccagaggctgagacaagagaattgcttgctcaaacccgggaggcggaggttgcagtgagccgagattgtgccactgcagtccagtctgggcgacagagtgagaatcagtctc

SEQ ID NO: 16432 - protein, 167 aa, Homo sapiens
MGLLRDEALAEVKDMEQLLALGKEARACPYYGSRLAIPAAQLVVLPYQMLLHAATRQAAGIRLQDQVVIIDEAHNLIDTITGMHSVEVSGSQLCQAHSQLLQYVERYGKRLKAKNLMYLKQILYLLEKFVAVLGGESLVPLLTPGLQNSLGCFFLGCPSGHLSSLCF

SEQ ID NO: 16433 - DNA, 2236 bp, Homo sapiens
  CDS (1177)..(2001)
gttaaaaaccaaggacctgatatcttataattcagtttaagcctaatacagttcatgtaaactccttttttggcaatttaacatatacatggatcaagtttagtaggtttagaggaaaatgaatgtcttgttctgaaaaaatagcagtaccagctgagctttggggaggtgacagattgagtcacttcacagcttaattctgttatgaactggtcccatgggcatggattgtcaattagggagacttgaatcttttagatattaaatctacaggcagacaacaaagaacacattattcttttgtaaaaatagaggaacctggctgtctactacagaactagaggaacctagcttagacagaagctcatcccacttcagcacctacaacagatttgatacctttgagcaagattggatacttttctcaaagtaaatactgggttggtaccccagagttatgcaccactgaacatggattttaacttaaaatacttaagggcagatttttactgttagttttcttgactaacagagcaacccagtgcagttcctaaagacttctgattttgtgtagcaccagctcctgttgcattttctgaatgaattagtattaaaaatggagccccaagaagctggttaaatttttagccttctgcatttaagctgtagcccaggctgtgagctagtatcgcatcttattcattatccaacatagaaccaggtttacaacaggcactcaaaatgtttgtgggatgaatgaatgagaaactgccaattctggggatttctgtttcagaagagttgatgctaagctgttctttctaacaatggttcccaggttcagctgtttcagtccacaccttgttcacagtaagatattcaattcaattcagcaaacatttgttgtgtgcttgctgctctgtgcctgaccagaagaaatgaagccaagatacaaataatagaaccctgtcatgagcacagaaagacctgctgagtttctattgattgtggtaaaccagcctgcatccagttccaagtaacagctgcccacttagtgaatactctctcatgtttcaacactcagttctagtgtagcctcttctataaagcctttcttttccagatgcagctcaaaaagctgtgtctgccctgaaggccagtggggttcaagctcaaatggcaaagcaacaggaacaagatcctaccaacctctacatttctaatttgccactctccatggatgagcaagaactagaaaatatgctcaaaccatttggacaagttatttctacaaggatactacgtgattccagtggtacaagtcgtggtgttggctttgctaggatggaatcaacagaaaaatgtgaagctgttattggtcattttaatggaaaatttattaagacaccaccaggagtttctgcccccacagaacctttattgtgtaagtttgctgatggaggacagaaaaagagacagaacccaaacaaatacatccctaatggaagaccatggcatagagaaggagaggtgagacttgctggaatgacacttacttacggcccaactacagctgctatacagaacggattttatccttcaccatacagtattgctacaaaccgaatgatcactcaaacttctattacaccctatattgcatctcctgtatctgcctaccaggtgcaaagtccttcgtggatgcaacctcaaccatatattctacagcaccctggtgccgtgttaactccctcaatggagcacaccatgtcactacagcccgcatcaatgatcagccctctggcccagcagatgagtcatctgtcactaggcagcaccggaacatacatgcctgcaacgtcagctatgcaaggagcctacttgccacagtatgcacatatgcagacgacagcggttcctgttgaggaggcaagtggtcaacagcaggtggctgtcgagacgtctaatgaccattctccatatacctttcaacctaataagtaactgtgagatgtacagaaaggtgttcttacatgaagaagggtgtgaaggctgaacaatcatggatttttctgatcaattgtgctttaggaaattattgacagttttgcacaggttcttgaaaacgttatttataatgaaatcaactagaactatttttgctataagttctataaggtgcataaaacccttaaattcatctagtagctgttcccccgaacaggtttattttagt

SEQ ID NO: 16434 - protein, 275 aa, Homo sapiens
MAKQQEQDPTNLYISNLPLSMDEQELENMLKPFGQVISTRILRDSSGTSRGVGFARMESTEKCEAVIGHFNGKFIKTPPGVSAPTEPLLCKFADGGQKKRQNPNKYIPNGRPWHREGEVRLAGMTLTYGPTTAAIQNGFYPSPYSIATNRMITQTSITPYIASPVSAYQVQSPSWMQPQPYILQHPGAVLTPSMEHTMSLQPASMISPLAQQMSHLSLGSTGTYMPATSAMQGAYLPQYAHMQTTAVPVEEASGQQQVAVETSNDHSPYTFQPNK

SEQ ID NO: 16435 - DNA, 1966 bp, Homo sapiens
attctcccaaagtgttgggattacaggcgttagccaccgtgcctggctcttcaagtttttcagtgtatcccttgtcagatggatagtttacaaatatattcttcgatactgtaggttttctcttcgctttgttgtttcatttgctatgcagaagctttttagcccattgtaattccattttcctatatttgcttttgttgcttgtgctttgtaggtcttacccaaaaaatcttgacccaggccaatgtcctataacgtttctccaatattttcttctagtagttttatagtttctttcctgactgtgcagggacttgctgggagacgcaagcctctctgagccaacaagacctggtcccccagtgttggcctgacagcaacctcctcaggggcccagtctcagctccaaccattctactgcattccatctgtgctgaaacctgctgggagacatgcaccagcctgagccaaggagaaaggggtctcctttttggttttagaaaagagagggagaggatactgttttctgagtactgactttgatgaggtgccaagcaaccttagaaagctgctcatctgtctcatcttgtgtcacatgtcaagagtttcccacttttgcactaggtgtttgtagcattaacctaagtcctttggattgcctaataacactagacctgaagcagttgaatagacttatgattatgtgtttctattaaagaacttagatacctatctgaaatgtaatagtttgcaagttcccaatttaatttactattcatactttaaattagttaggaagactggaagaagtttaaatgcaactactgacctcatttcagttttcaagtcaacttgcaaatttttcaagtgacagcacttttgagataacggagttataggtttatcagcatgggtctggatgtaaggtctggcattcctatggctatttaaattgctccagacacatatttctgaaaattatgatgataggagtaaataagtttctgggacataatgacatcaattctgtagtaaattcttttttcattaatatcctgcaaattatcaaattaatggataaaatacccaagtaattactccagagaatatacaagatgcattttaagtttgctagctttgcctttaaaaaatagctaattttctttcttgatgtatgggcaagaagagattggctagagtaaaaacaaagttactttcaacataacgatttctttatcataaatacaagcctcagctcactgactgtcatgtgattttaaagaatagctttcccagtgttttccctttgggacacagattatttaagtgctgaatacagtaacttaaatatcttcttcaacatagaataaaaatcttgacttttttcattaggttagaattagtgcatagaagctaagaaatagtaaaacttatgtaatcacattatgcttgggaaactgttttcttgcaaacaaaggtatttgtctcttatttattgtgttgatcatgaaaatagtatctctaccctgaggtgttacaaaaaattaatcaagtcagcatgtatactgcatatgtgtcttctggaatatttaccatttaatcaagaacctaaaaaatatataacctagctcccaaaaagtaacatcagtggttaattgtcaggttaaagaaaagtaaaataaggctgggcatggtggctcacgcctgtaaccccagcactttgggaggtcgaggtgggtggatcatttgagatcaggagttcatgagcagcctggccaacatgaagaaaccctgtctctactgaaaatacgaaaaagttagccagtcctggtggtgtgcagttgtaatcccagctactcgggagcctgagataggaggattgcttgaactcgggaggcagaggtctcagtgagccaggatcgcaccactgtactccagtctgggctacagagtgagactcaatctc

SEQ ID NO: 16436 - DNA, 2106 bp, Homo sapiens
actaagagacagatcatgagaggaaagagaactagaggccaataaataaaataattgttcatatattaatgttcacatgtgaactacatatctaaaatcttggagaaaaatcaaggcaagaatttccagaactgtcctcaaatagctcatttatttaagttttgttaaaaagcaaaagcgaattgattacatttgattaacttttcctattccatgcacaagttaccttaaaacatgataaaaaccttatgggcattacctatcacacagtacttatgcataaacttataatagtaaaattactaatgtttgataaaataagatggaggcattacaaatagtctacagtttgtattttaaggaattggacatgaagaattctagatcattttgtgtctataaacccgactttctatcttgccttgggcaaactttctgtgcctcaatgtactctttaaatatgtgaaggatgctctttttgattaagtgttttgcactcctgaataaagggcatagtataagcacaaagtatgacttaatttatcacaaatattacacatcctatgttcttgaatgtgcacacttttttctcaataacaaaatatatcttaagtcagtttttttaatgctgtcaaaatttgtagaattttctttgagtatggcatgatctcttcccaaatgcattttacagttttttgtgtgttctatagactatagagtcaaaatcaagagtattttgagaggatcagaagcatttaaaaatctatttttttctagtatctttcacagatctaaatatttagattctctttgcctttttctccatggaatacggtggtatcaaattactaatacagtatataaacttcgtttgcattggtggaattcatttagatctctcaagtaatattattttagggctatataaattgtgtttttagtgtaaaatgttatttgataatgtgaagttaaatcccttttagaaagtgactgaaaatggtaaaggaactcatcagaatcttagcgttcttaagttctctgataatttagtatattttattaatgatgtccaacacctctaagattgttgagaaaacatgaagaattgaggttactcttctcaggtgacactttaaatattaaaatcagaggcttcctgaacaaaacaaattgcaaaatagcgataatggcatgggagaggccagatgcaggactctggtaaatttaacttactttgaatatctatgtaaattttagttcatgcatgttcttacttaatcctggtgtttttgctcttagatgttagagtttaataaattgtgatacgcatatatttttttacatgaaggattctactttctaattttacttttctgatctcaagaaaattaaacttgaaaaacagagtaaaattcttcaactattgcctcaagttcagttttgtcctattgtcctgagaaaggagatttagacttgtctgcctaacacaggtattttttagggcatcgtactatcccagagaaagtgttgagataccatggcagaaatataaaacctaagctttgaaccccagtagacttcttcttctgccattaagtctctctttatctgatattctaaggatttcttcaaactacttaataatttgtcaccattaactttaatatccagttttaatctgcactgtaatatcctgctttgagaagaaagaatgcctcataaattagagaagtacaaaacaaaatgttttggaaggtgatcctggctcctttggctctcataattgttttatagctgaaaataaaaagtcaggaaactggcccggtgcggtggctcatgcctgtaatcccagcactttgggaggctgaggtgggtggatcacctgaagtcaggagttcgagaccagcctggccaacatggtgaaaccctgtctctactaaaaatacaaaaaaaattagctgggtgtggtggcacatgcctgtaatcccagccactggggaggttgaggcgcaagaatcgcttgaacccggaaggcagaggttgcagtgagccaagattgccccactgcactccagcctgggcgactgagcgagactcttatatctc

SEQ ID NO: 16437 - DNA, 2161 bp, Homo sapiens
aaacatatgtgctgctaataacagagccctagaatgcataaagcaaacctgacagaattgaagggagagagagatagttctacaataatagttgaggactttaatacccaactttcagtcatagatagaataactggacacagaatcagcaaggaaatggaagacttgaacaacactgtaaactaaatctaacagacatctctagaatactctacttaatagcagcaccatacaggttgagtatcctatctgaaatgcttgggaccagagtgtttttatattttgaagtatttgcattatacttaccagttgagcatcccaaatccaaaaatcacagattcaaaatgctgcaaaacgtttctagcaaactccagtgggcattttctttgagtcatcatgctgcactcagaaagttttagattttggagcattttggattttcaggtttggggtgctcaccctgtattcttaagtgcacatgaaatattctctggggtagaccataggatagtctataaaacaagcctcagctggatgcggtgactcacacctgtaatcccagcactttgggaggctgaggcaagcagattgtgaggtcaggaggttgagaccaacctggctaacatggtgaaaccctgtctctactaaaaatacaaaaaattagctgggtgtggtggcacacgcctgtagtcccagctactcgggaggctgaggcaggagaatcgcttgaacccaggagctgagacggtgccattgcactccagcctgggcgacagggcgagactccatctcaaaaaaaaaaagcctcaatacatttaaaactgttgaaattagacaaagtaagttttctgactataatggggtgaaattagaaaccaggagtagagaaaatgttttaaattcgtaagtatgtggaaattaaataccacagttataaataagcaatggaacaaagaggaaatcacaaaagatgccacaaaacactttgagatgaacgaaatgaaaatacagtgtgtcaaaacttatgagatgcaagaagagcagcccttagggggtaatttatagctataaatgcctatatttaaaaagaagaaagatctcaaatcagtaacctaactttgcaccttaagaactagaaaaacaacccaaagcaaggagaaggaagaaaatagtaaatattagagtagagatgaacaaaacagagaataggaaaaaaatagagaaaatgaacaaaacccaagttggttctttgaaaagataaacaaaattgataaacccttggctagactgaccaagaaaatagaggactcaaatccctaaaatcaggaatgaaatagggaacattacttccgactttacagatattgaaaggattataagggaataccatgaacaattatataccaacagattatgtaacctagatgaaatggacaaattcctagaaagatataaatactaaaactgactcaagaagaaatagagaattgaaataaacctgtaagtacagagattggattaataataaagaaaaacattaaaaaaatactcatcaaagaaaaccctaggccagatggcttcactggtgaattataaagaaggttgaatgccagttcttcacaaactcttccaaaaaataggatcaatgggaacacttcctaacccattctacaaggccagtattacaaaaccaaagataacacaagaaaactacagaccaataccggttataaatatagacaaaaatctttgacaaaatattagcaaactgaatctagcagcatattaaaatgactatatacgatgacaaagtgtaatttatctcaggaatgaaagcttggttcagtatatggaaattaatgtaatataatctactaataaaggacaaaaaacacgcatggattatctcaacttatgaagaaaaaccatttgacaaaattcaacatttgtttgtgataaaaacactcagcaaactaggaatagaagggatattcctcaacttggtaaacaagcatttatgaaaaaccgacagctaacaatcatacttaatgctgaaagattgggtaccttcctcctcccatcagtaataagacaaatatgtctgttcttgccatttctatttaacactatactggtggttctatataggtcattaggcaat

SEQ ID NO: 16438 - DNA, 1603 bp, Homo sapiens
  CDS (1171)..(1533)
ttttttttttttttctttcttttttgggccctcataataagcattgttactattggaagttgttttcacattctttccaatattaaatatgtatttttttaagtaatgataatattttccagtggctcatttggatgagaactaccctctatttttaatattaaaactacatccaactcatcatttagcctttggttgtacagttgtgtaatgggctatggactgttacacaccttaccacctctaggcctatgttttttctttccccatatattctgatggggataaatactgttttgcctctcccataggaatggaatacatttattctaaaatgatctttcacagaagtaagagagagggaaacctaaatatacctctaaattgtttgaagttggtcccagcagcataaaatgggttggccccaaagggttggagggtgggcttggttatcagtatttgttttcagaatgagatgggagcatctttcctttgccacgtgctttgtgcttgataacatcatgcttggttcaaacgacaactcagcacaaagccttgagtataaattgttggaatcaaaacatctcattctgatgacgtggtttaattttttaatttttttttttaataggggtgggagggagggtactttgccccaaaagggagggtgtctgcactaaggatttagaaacactttggaagctcataacctcatcagaaactgcctttagccacactcctgaccttctagatgagtaacaaaaaaatgaaataagttcttggaaattaagccatttattttaatttgctatttttttcaatgttctaggtatctttaaatattgtggaatcattttcctgccagatacctttatcaaaattattggcctcatgagagctgaagtaagtcagctttttggtgaactttagtggacttctgtgagattgtagttgtactttgtatctctaaatctaaagatagttttttaaaactcccaaagaaaatctgctctcctttctgatctaaaaactcatctttggggtaaagagttaagtgtccaaaggttgtcacagttcatgaggtcagagggagctagcctggcacctggactctgcccatccacagctgacagattccaacagaagtgtatttaaattctccagtagacaatgctgggtaagggagggggtagggctgggttattaagatacaggctgctgtattttacattggttatgggggaaggggagcctggagaaaacaaagtcactattcccttttttgaaacaggaaaaaaaattattttttgttcagtaaaaatggtagagaattccaatgtccctagccacaagggaccagttccactgagaagtgaacagtgggaactcaaaatttcagaaacattgggggaagggaaaattggctttctcttaattggcagatgttccagtgggggggggggggggctctgtttttgttgggatgtgttatgttgtatgtacgcatatatggaccggagtctgctgagtttataaggttccaaaaatatggtaaaatcttggtttttgttaatttatctcaataaaagcccactggaactcc

SEQ ID NO: 16439 - protein, 121 aa, Homo sapiens [sequence omitted]

SEQ ID NO: 16440 - DNA, 1624 bp, Homo sapiens
atgctctgtacacatgctgtcaacaaaagccagctctaggaacctgagtgccagaatgcctgagggagctacagctgggcttagttggctgggattgagctcgctgtctgagggagctcgctctgtctctctcacactggcagtttacaccagccggcagccctgagcagcagtgggtgtaactttttataaataaggattcattgattcattcatattctcaatatttcttgaagacctaccccgagccaagcatggtgccaggcagtggggatgcagtggagagcaaacagccctgcccatgcaaagtgtcctgtacggtgagaagtgtgagctgcacccacaaagggaaagagcccagtgcagcttttgcaaaatgcagggaaggatgctgctagcctcagggtgacctagaactttaagctcatctttgttttcaggagcccagtgcctcccctccacccctaaagaatatctcaaagacgtggattttcatttcagtaagatttaggggtgcatgggcaggcagtgctggaggaactgggaggcaggtttggaggctgcagtgggaccactggcccctcctggctacagtttcaggccaggagcttgttggcacctggtgcaaactcccaaacctgaggggtccccacaaccccccagcccatcttaacctcctcttcccccaagctatctggtgttggaaagccagcatctagtgtggaaacaagctttctcaccaggtaggccatccgctgtcaggaccattaggtaaaaacagaagtgacaggttgtaggaagtcgttcgatctgtgaggctgcgagcacttcagtgcctgggatttacctaactgccatgaaacactgattatccagcattcagcatgtgtcagattctgtaactatttctcctgtgatgtatcagtcagcttttgctgcaaaacagcatctggctcctttgtctcgaggaggagggggcaggactctgccagaactcactcgataaaagattttcccaaaaggaagggtgttcagatgacaaaagtccactacaccactttccttggctatctgatgcacccccatcttcccatgcgcgcacctcagaaatcaggctcccacctgacataacacaaccatgcctcacaaaaagacagtggtttatcccttccctaggagaaaagagaggcaatgccaagctgcttcatcaactgttaatacttcttccagcccgcaacccaggatatctgcaggtgtctctccctctggtttggtcatggctctctctgttctagaatgtatgggttaaagtcggctgccacaccatgccctcggcagtgtggtccaaggacccctgagggtcctcaaggtccttcctttcccaaccccacgtggttttcttcagtcaggataccatactgcaacagaccgaaggcggaagcagctatgaggatgcagcagccttctgttaagccaggctttaaggatctgcaaaaatgtaaaacgatgccactcctactgatgaaatatattgttttggaaaatataggtttaaaaatttttttaaggtaacatgtaatggatgtatagtcttcaaatggatgaataaatgtttttcagagtt

SEQ ID NO: 16441 - DNA, 1855 bp, Homo sapiens
  CDS (801)..(1121)
atggcggaccgtggcggcgtgggtgaagccgcagctgttggagcgtctcctgcatctgtccctggcctaaacccgacgctaggctggagggagcgactgcgggccgggctggcggggactggggcctcgttgtggttcgtggcggggctggggctgctttacgccctgaggatccctttgaggctgtgtgagaatttggcagcggatatttgaatggtggtacttccataagcatggcacatcttttattgagcaagtatctgtaagccatttgcaaccactgatgggaggaatttggcagcatttcagaaccaggttctccttcgaggaacagagaaaatgaaaccagcagacagaatttgtcagaatgtaaggtatggagaaaccctctaaatcttttcagaggagcagaatataggagatacacttgggtgactggtaaagagccacttacatactatgacatgaacctgtcagctcaggaccatcagacctttttcacctgtgacacagattttttacgtccttcagacacagttatgcagaaggcttggagggaaagaaatcctccagctcgaatcaaagcagcctatcaagctttagaattaaacaatgaatataagccttccaaagtcagcagcaatctgttacacagcagcactgttgaagacaaggactgtttcagaaaaattctctccagaaacagcctccagaagaggattaagcacagcagaaattaatgccgtggaagcaattcatagagctgtggaatttaatcctcatgttccaaaacttttagaatgattccatacccgttagagaaaggacatctattttacccttatcccagctgcacagagacggctgatagagagctattacctacctttcatcatgtttctgtttacccaaaaaaggagcttcctttgttcatccatttcacagcaggattttgctcttctacagcaatgatagccattctcactcaccagtttcctgaaatcatgggtatttttgctaaagctgtgctgggactctggtgcccccaaccctgggcatcctcaggctttgaggagaatacacaggatttgaagtcagaagacctaggtttgagttctggctgagccacgcactgttcgtgtgaccttggacaaatcaccaaatttttctgaacagcatctataaagtgacagtaacccctacctcacagggttgttgtgaggattacatatatgctaaagcattttgcatatgaaaaagcttcttatgaatattgttattcctaggcaaaccccccttggaagctgtcaaaaaggacaactgtagatgaaattgtcttccttttttcttcattcagcttagcctttctgtttggccagggctacttacaggggctgttggggttgaagtcaagtcaccgcattttggctcctttggtcaaagagaaagaactctaatgtccagctgctccatcgatatactcatagaatggaagtgagcaaaggaaaattttaagccaggatagttaaccgttagggggccagtgggagaatgcttgccttgcatttgcacatccagaatgactaaaacatcttaagtaaatgaggaatagccaccgagatgctcagagataatataagccatgagtgggaagtgggaaaatgagtttgtcaacgccctctcttttctatccctttacctttgaggtcagggacagggcatattactgacaccccactggctattgccctatacctgccaatcacccaaagaaaataatagcttctgagaaagctcaattcactgtagcaactgtgatatatttaccctaataaagccaccacttggtcttttc

SEQ ID NO: 16442 - protein, 107 aa, Homo sapiens [sequence omitted]

SEQ ID NO: 16443 - DNA, 1494 bp, Homo sapiens
  CDS (769)..(1170)
aggcgggagaatcacttgaaccggggaggcagaggttgcagtgagccgagatcacgccgttgcactccagcctgggcaacagagtgagactccatctcaaaaaaaaagaaaagaaaatatctcacagacactagtgagcaatcactatgtacgttttttcctgccacttacccactgtgtgacttggcaagtcacttaacctctctgagccccaggctccttgccggtacaccagagacaacagtgtgatgcttggggttcagtgtgcgcagtgactaagaggcccttcgcagaacagaggcccgcgtgggcatgtgaggagtgaggtgccagtgcccgcttggatgtccgtctaccccaccgttaagcatgttgctgcagctgctgcttttctgctgtagggaccaaagcatcatgaggagctaacatccttgaagttggcaagtgttgaagtggctgccactagggattcagataaagggcagggagaggcatcagggctgggagtgcgggtgagagggaagcatggagacccgtctcaggagcactgagtcagcagcacagtggggcgcagttgatccacataaagcctcacattgttcctgcagcagtcaggacagtggtgacctttgggattcggctgacagagcactgctctggggaggggctgggggcaggagcactgctctgggtgagtggttgtgctaatgccccaagacaagcagcctctgtccaggcctagccctgaggggatgctggcatctcatcatggggcggcctaggtccctgggcactggcctcgggatgtgcgtggcctggctctgggtggaatccatccaccccgttcctgctcgaggagcctgggcagagcagccagggtgcttccagctttgccgtggggctaggaaggcactgcttcctggctggctctgcaggctaaaccccctctcccctccccagcccagcgaagccagccacttctctagccataaagcagccccagccaggagcactgagtcagcagcacagtggggcgcagttgatccacataaagcctcacattgttcctgcagcagtcaggacagtggtgacctttgggattcggctgacagagcactgctctggggaggggctgggggcaggagcactgctctgggtgagtggttgtgctaatgccccaagacaagcagcctctgtccaggcctagccctgaggggatgctggcatctcatcatggggcggcctaggtccctaggctgcctgtggggcgagtggagacctcccatcactgagacagatcacagaccacgagtgcctttcccggacctggacgttgcctccagagcaggcaccagctctttccctctctacacagaaatatttttgtaaggttctggggcagggagggagcatgaagtacgaggaaaacttgaattccagatttttagtgcaaagtatttatcatttctaccagaaataaacgttttaagtttt

SEQ ID NO: 16444 - protein, 134 aa, Homo sapiens [sequence omitted]

SEQ ID NO: 16445 - DNA, 1822 bp, Homo sapiens
  CDS (178)..(1002)
agtggccagagcgactcttcagggaggtggcaggaaaggcttggaacagctgccggaggtgacggagcggcggccccgcccggtgcgctggaggtcgaagcttccaggtagcggcccgcagagcctgacccaggctctggacatcctgagcccaagtcccccacactcagtgcagtgatgagtgcggaagtgaaggtgacagggcagaaccaggagcaatttctgctcctagccaagtcggccaagggggcagcgctggccacactcatccatcaggtgctggaggcccctggtgtctacgtgtttggagaactgctggacatgcccaatgttagagagctggctgagagtgactttgcctctaccttccggctgctcacagtgtttgcttatgggacatacgctgactacttagctgaagcccggaatcttcctccactaacagaggctcagaagaataagcttcgacacctctcagttgtcaccctggctgctaaagtaaagtgtatcccatatgcagtgttgctggaggctcttgccctgcgtaatgtgcggcagctggaagaccttgtgattgaggctgtgtatgctgacgtgcttcgtggctccctggaccagcgcaaccagcggctcgaggttgactacagcatcgggcgggacatccagcgccaggacctcagtgccattgcccgaaccctgcaggaatggtgtgtgggctgtgaggtcgtgctgtcaggcattgaggagcaggtgagccgtgccaaccaacacaaggagcagcagctgggcctgaagcagcagattgagagtgaggttgccaaccttaaaaaaaccattaaagttacgacggcagcagcagccgcagccacatctcaggaccctgagcaacacctgactgagctgagggaaccagctcctggcaccaaccagcgccagcccagcaagaaagcctcaaagggcaaggggctccgagggagcgccaagatttggtccaagtcgaattgaaagaactgtcgtttcctccctggggatgtggggtcccagctgcctgcctgcctcttaggagtcctcagagagccttctgtgcccctggccagctgataattctaggttcatgacccttcacctcccctaaccccaaacatagatcacaccttctctagggaggagtcaaatgtaggtcatgtttttgttggtactttctgttttttgtgacttcatgtgttccattgctccccgctgccatgctctctcccttgtttccttaagagctcagcatctgtccctgttcattacatgtcattgagtaggtgggtagccctgatgggggtcgctctgtctggagcataacccgcaggcgttttttctgccaccccatccctgcatgcctgatccccagttcctataccctacccctgacctattgagcagcctctgaagagccatagggcccccacctttactcacaccctgagaattctgggagccagtctgccatgccaggagtcactggacatgttcatcctagaatcctgtcacactacagtcatttcttttcctctctctggcccttgggtcctgggaatgctgctgcttcaaccccagagcctaagaatggcagccgtttcttaacatgttgagagatgattctttcttggccctggccatctcgggaagcttgatggcaatcctggaagggtttaatctccttttgtgagtttggtggggaagggaagggtatatagattgtattaaaaaaaaaaaggtatatatgcatatatctatatataatatgacgcagaaataaatctatgagaaatct

SEQ ID NO: 16446 - protein, 275 aa, Homo sapiens; identical to SEQ ID NO: 14087

SEQ ID NO: 16447 - DNA, 2356 bp, Homo sapiens
atcaaaagaagttcaatactaaagataaagagttttccttattgaaatatatattgttaagcttttaaaccaaatgaaagtatgagtggtcatatttatactgtagtaggttttcataatagattttccagattaaaaccatttgttgaaatcatcaaagagatgttaatcctgctttagcattgatgcaaagttaaaataactgacattaaaaaaatcatttgggaagctttattgaatatattgagataaggtttattgtagtccttctcttcatgcatactgctgttacaattccaggaggtttcaaaatccatgtgaatgaccccattcaaccctcaaactgtccaattcctggcctaattcaccttcactctgctgtagctaccagttgcaggactagctgcattttggccagaactgcatcaccctggaaattttaaacacactctctctcttctgattgccctctttttctggttccatctcagctttattcccactgcattgttctttatctttggagctctctaaatccctagctgtgctagtggtggatgaggtgtttaacaaaggaaatgtaagatcttcctttagttgccagttcagtgtagttttttggaattagtttgctaaatttcttttaaagtgatcagtttagtatccaagaagtaaaatggagcaagttgaaaaattgtcctgcctgtgtttcagtttaggttgttcctaggcgcactgctgacttctcttatgaccttgggtagattcagtctttattggtatttgaacttttaatgtctgttgtgtactctccttagacacatttaaaactttaaagcatttgggcagggggaatgggtaaggatccagttttatttaagactgtcaggacccatctcaatagtagtatctattcccatgagagaaaaatgaaaggcaaggcttacatcagcctagtctcctcacttaggaatcacaacattcctaaggtcagaaacagtgtgaagtaagtctctgaacccattttggagggcagtacatcagaaatacagtggaaattgctctttagctggatgtgagtttcattttaagcaccattgtttatattctttatgtcttgcctttctttttatattgagtttgtttcaccttgtaaaattaagaagagcatgttctagcttttaaatgtgagaattgaattattaatagttttgggtaaaagtatcacctcccatttcttctaccaaaagcagcacatcctcacagacttttcacctcactgaaaatggtcatttaaagtttttactaattcagcatttaaagctttttatttcctccttgatttataacacagctgtttcttgaatagaaaaaactcaaggactacatgcaatctaattagattacattctttgtgtgagtctcctgcatttagtggaggccactaatcaaatcttgatatattttctatttcttttatttatttattcatttaattcatcaagtcaagatggctataattagagcagattactcctaccacattgtattatgatgatctcttcatgtttttttgtttcatactatatgatattcattaagggtagcattgtgccatcctccatcaagcattatatgcttcctttgtgcttatgatgttgaccgtagcaaccttaaactgttaagacttgtttataaacggtgaagctccatcattccaacagagtcagcatgctaattcactctagttcaaatccacattctagttgaatccctgcaatgtaacttgacatttggagaaattgattcataccattttaaagaaatatgatataggtgacagaatccaggatgaagaggtaccttgttgcttagatgatgacgttgtggattcatttcacatctctctctctttttaatgtagctcttctccctccttggtttttattcctccctccttctttcttcttcaagcctcctctaatgttaacatctttggcagtttggccagtgttgacaactactttttgattatttggtattttaaaatatttggtattttaaaatgcttttattggccaggcgtggtggctcacaccttataatcccagtactttgggaggccgaggcgggcagatcatgaggtcgagattgagaccatcctggctaacacggtgaaaccctgtctctactaaaactacaaaaaattagctgggcatggtggcgggcgcctgtagtcccagctactcaggaggctgaggcaggagaatggcatgaacctgggaggcggagctggcagtgagccgagatcgcgccaccgcactctagcctgggtgacagagcgagactccatctc

SEQ ID NO: 16448 - DNA, 2036 bp, Homo sapiens
acattcttataacacagcacagtgactttcttctttcaagattgtagctcagagaaaagatacaggattcaattgggggttcaataggatagaaatggagagattcctttgtgttgtagtagaggcattttcctaaggagtatagatttatactttgcattttcattcatcatcccccagaatcatggtcaaggtgtaggtcactccacacagctgatgctcaggttattcccttgtgagaattatgagaataaagctcccaagatatgtgaaagtgcttaacacagtacctggcacacagcactcaataaaagtttggctctattatgggatggttcaattctggtttaaggagggaagaaaggttattatatatgtaccactaagcaaatatatatatatatatatatatttgggtttttttttccctaatattatttgggtgtcccctgtgcttctttaggatgtagttataactaaacctgttatacttgaacatcactaagagaagtaaattattatgaagctagcaaaaatcttgaggccaaagttgtttcttaacagctttaataatgcttgttgattttgaataatcctttaaaaagtggaccatttgcttattttaatatcacgtcagtaaaatgttagtattaaaaagatcagctttttatggcattgaagaatgtatctgctaagacacaaaaattgcatggtaagtataataggtggaggaggaaaggttgtaggccggatgaaaatttaactgactagaacatttattcaggagtgtaattattttcccttaccccaatccctgtgtacgtgttgggtatagttacgacattatccggatttgcaaatagacacaactttcagtcttaccctgtttattgtttaagagtgatagactgttgtcctcttgctggtggaaaatctaaggtggagcccactcttctatgctgaagttcaccaggcagagcagttttcttacaagtcagctactctgcttggtttattttaggttttggtacttcacgtaagcactgttagaaggtacaagtgtattaatatcactagttttgaggcgcttgggtacatttgtttttaatatatttagaatgtgcagtaaacttttttctcatttttttttctttttagcaaacttgttattttaggtccaattattgagttgacagtctactgtgagaatgagatgacatatctactgtgagaataccataaatgatgaatagtttatttgagaacttttatactcagtggtgttttatatattaagataaaaatatgtacacacatgcatgtcacatctctctactgtggagttaatgtgaatttttaaaaaatggaattgcaaccacaaccatatctaagagaacattcactcctagtgagggtttacaaaagctactaagagaataaggtagatgataatgcaaagggtcatgatttggggttatttttgttttattttaaaatttatactgctacttttgaaagaattgtttttatgactatgctctttttgtgattgaaaagtcatctaatagaagctgtatagaagctactttttaattgctggcaaacagctttaagtgcactttctttgattacacttccattttttgttaaacttgaattttctgaagccttttatgtaccactaagcaaataactttaacctttaaataaagcaaatttacatctttattgtatttctacttgttacaaaacatacttgctaaagtaacttcagtcctcaaatatagctgggaaacaattatgagataggctcagtctccccctcccaccccttttcccctgccatatctaattaagcactaactgattttattactttattgcctttacactgcttattctttttgactgaattctgtccctgattcactgttttgtttgaaatttaaagttattttcttactgtatttatcatacctgttttaatctgttttctttaaatgcaataaatcccaaatggattgcatattctttat

SEQ ID NO: 16449 - DNA, 2302 bp, Homo sapiens
agcagagatgcatggtatagagctatcctgtgcattacgatagctgctagccacatgtggctgttaacactgcagtgtgctaggtctgaattgagaggtgccgtcactgtaaaatacataacaggtcttgaagatttatatattaaaacctgttcatcatctcaataatttttagattgattatatgtagaaataatatttttgtagtttgaatttaataagatattattaaaactggggccaggagtaggggctcatgcctgtaatcccagccctttgggaggtcaaggtggaagaatcacttgaacccaggagttcaagatcagcctaggcaacataatgatacctcatctctacaaaaaaataaaaattgaaaaattaattacacttggttgttttcatatttttgtgggattacaagataaaatttgaaaaatagatgtagcttgtgtttgtggcttgcattattttgctatttgaaagtccaagtatagagtgaggcacagcatagactggaggcacattgcttcacttcaaatcctgatccttccccctactcgttttgtggtctttggcaatttactaaatctgtctttcattctttgtcttatcatcttgtaaaatcaagatagtgatagtacctaactcaaaatattgttatgaggatagtttatatgtctaaatcatttagaacagtatctggcatagagtgcatactcttcaaatgtttgttgaataagtaaataaacccactggtcatgtgcaccttcaccccagtaggtagaattatcaaagaagtaatgcagtttttaagtagcagtttcgtgaataacctgtatttttctaggagcaatagtagcaattgtagactgacatggtgaacatttttgatggtttattagcttaatttccttctcctcactttcttcctctctccagaacaggtggaaggaaaggagcaaaactcaaatatattaatttcattactctctagtaggctttttgggagaatgattctgaaatggatggcaagtcaggaatttttttcttcgcattatggcagtttcctgttactttatgtaggtaccttgaaataaatctaacatatgaaaactcaagcttctatgttacagagtggattctttggatccattggagagcattgtcagcagccatccagacacctccatgtattcatgtattcattaactagagaagagacactttgaagtcaatcaaaatttaaaatatttatgaagcctatatataaagggaagatatattggttgtggcagagacactcttaaagtggcctccaattcttgtctcctggtgttcacacccttgcgtgggacattcctcttgcaagtaggcaggacctgtaacttgcataaccagtacaatatggcaaaggggatggaatattcatgatgacacatatgcagtaacatgaaaataagatgtcagcacccatccttctggagtttctcctttgcttgatggctttcagaaagtatgcagccctgttgggggacctgcatagcaagagacttctggcagcttctagtgactgaatgtggcctctgccaacagccaacaaaacactgccaagaattaagttctcccaacaactggattaagcttataagtgaatccttccccagtcaaacctctgatgagaccacaccctgccaacaccttcatttcagccttgtaagaccctatcagaggactaggtatagtagtgccaaactcctggcccacaatacatatgtgttcttttaagctgctagtttgtggtattattgttattcatcaataaataactaatacactggcatttttactttcccaaatttaacctccaagcatattttatggcaaaagcaagacatatgcattgaaattattgggtgatttttccttttcttctttttactagcatcagagggatttaagtatatgatacttagcagtagaatcagtcactatatttataatatttcacagcatttaaaacagtatatacaccaaagactttaggttggcagacaatgattcagttattcatatgttgatctgatataactatgttgttaggaatgtatgagacacatatatttgggtttctgaagacagatatgaactgaagacaattttttcaagttattagcatcttccaggtggtagttggaatactgaaatggattaaatcacctgatcatctgtagacattaaagaaggctaaggacagagtccctgaagtaacaacttttaaggatcatgcagaaaaagaatcagc

SEQ ID NO: 16450 - DNA, 3137 bp, Homo sapiens
cgagattactgaattttacaagcttgacattttctattggctttataagctcttctcatgtttttattaccctcacatccaatccgttcgagctacacgctaaatcaaattggtattttatatttttatttttttagaggcaggatctcgctctgtcacccaggcaggagtgcagtggcacagtcatggctcgctgcagccttgacctcgcctcagcctccccagtagctgggaccacaggctcatgccacgcacgcccggctgaagctagttttaactgaagaaaactcaaagtgttctctcgccgttaacctttattattgaggcattggctctgctataggaaaacgaggtgacgttaatatcggtggttgacattaaccactggcaagtgacagtgtggctccttgacaagtggttgctgctcataaatgtcatgaaacaaaaacactgattttagagaagtgggattctacagttaatatcgccagcaaacttttattaagctctcactctgtgccaaacacatgcttgaagttggggtgaatccgtgaccattaagatgttggctgttcatgggcacgttatcaagcaactggggtgtgagagcgaatgataagagggtgaatctggatgaggagggacttccagggcacaggtggaggagaggcattgcagccatagagaggcccaagggaacagtcaagacaaggcggggacagtggccaggaggcgagggcagcacttcctgggcagggaaggcttgccagggagaccagactcctgtctctgtttggaaagaaaaggaaccgcactgggggtcagggaggctaggcacggcaccagcctgggatgccagtcccgcctgaggggccaaggcaaaggggaagcattcacaggccccacaccaggctctgacgccaagtggaagaagagggagatagaagcagaagcctgggcttccaggcctggttcctgggcgggtgttgatgggacccagggagagtcctgtggggatactttgggtctgggctggcaggggctctggaaggagaggcatggaggtgcgaacctggtgcccaggtggaggtgcagtgggggtaaggtggccaggctgcagacccctgcatcagaatgcctgcgaagctgtgggttttttgtttgtttgtttgttttatttcgagacagggtgtcactctgtcgcccagactggagtgcaggagcgccgtctcggctcactgcaagctccgcctcccaggatcaagtgattctcctgcctcagcctcccgagtagctggatttacagatgcatgccaccacgcccagctaattttttgtatttttagtagaaacgaggtttcaccacgttggccaggctggtctcaaactcctgacctcaaatgatccacctgcctcgtcctcccaaagtgctggaattacaggtgtgagccgcaccagcctgttttttaattttatttagagacagggtctcactctgttgcccagactggagtgcagtggtgtaatcttggctcactgcagcctcaacttccagcgctaaagcaatcctcccacctctgcctcccgagtaactgggactacacacgcatgccactacacccaggtaatttttaaaaattttttttagagacagagcttctccatgttgcccaggctagcctcaaactcctgggctccagtgaccctcccgccttagtgtctcaaagtgctgggattacaggtatgagccaccacgcccggtcagaagctgtgtttttaagtggacataccatcttgtcctgctgaagtatctccatgtaatcacaatatctatgtcacccaaatctcctccttcctcctccctcccccaaaacacccccacaggcatgcataccctcccatgcgctggaggcagaatctcccaaggggagctggccaggagaggtgtccctgagttcagatggaggtggaagccagagtggggctgggaccacccagtgacatgaggatggggcttgggataaagccctggggacactgacatttaaagtgtggacagaaggagctactgaaggcaatggatttagaaaagcaattgagtatgatttccttcttcaagaaaggctgtccaactagctctcacttcctctcgtgtgttcagtgtcacccggaagcagagtttaatgtgactaaagtcaacattggctcacactgtcagggagtgtgggaagatgagtaaggactcatcgcagggcgatacccacagcttaaaataggcaccttcccctcccaggtctggttagggcagttgttacatatgaggggcgtggagttttgtcttgtattttggccttgttggtaaagcattccaaagcttcgacacaccctcctttcagcccattaggaaaggctgttgattgtaatattcacacagctccctgggctatggttaagagccttgcagaaggactgggagaagccctgtgtgtttgaagtattgtagcatcagaaaaaaacaccggaagaaggcaggtggggacaaggtgcctatgtctgctccttggaattcctttccttactgtccgaggcaactacagggaaagcaaagcgtgagcccccaaatccacacctgggaggaacgttcccctttgcaaggcatgggactggctggccctgtgtctcacgggggctctgagttttgaggtcacactagcctcctgaggcctggctgagagggctgggttgggggtcaggaggccccctgtagccacgaagctcctctggggcattgttaaaggttcaccccctttttttgtgggtatcctggaagatctcaagaaactgagcttggaagaagagaggctgagagggtctcccgccgcctgcgttctctgcagctatggccccacagcctccagtgaccatggaggggaaggtgccacccgccttggctgctgaaagggtgatgctcttatgcctgagtcttggctcctgtggtcctgcagagaccctgtgggggccgcccggtcgtcacctgcactcatcttgggttttccttccttttccaccctaagctgaaggtatttttttcctgttttctccactctaacttggggaagaaggaagatcctttatgg

SEQ ID NO: 16451 - DNA, 1573 bp, Homo sapiens
actatataatttgtcacaattcaatctaatcagctaaagttaaatgtagttagaattagccacaggagaatgtaaagcatgctttgacgaagctatcggtaacacatattgaatgtctttgagactcttagattgtactatttgcttaatagattaatgaaatttatcagatacaacctgtatttccaaaaacaagctagaaggaacctgaggaatgtggtttacatttgagatccaccttactgtgttttctactttcagaaaagattctgtagttttggtttttggcatctttcttatactcagttttttctgccttaattcccatttacctgcagttaactcatgtttattgtgctttcatgcattgtgatatggaatgtgtttagtaatttactccttataaatatggtaaagtacagtggtatggttattctatgcattaagttaatgacattaataagcttggttatgaggggttggagccatacatgtaatttaagagaacagttaaaagtgtaacatagttttagcttggtgtctaaataatgggcagctgataaaacagcttggaccatattgttttaaagagagcctacaagcacagaaactagttatagatctaatgtggaattgctgaactcagaactaggccatggaagtctgaaaagcaaatatggctgtttcaaactcatttttttggcagcttttttatttttaacactttattgaggtataaattgacttgaacacacaggtaaaacatacagtttacagtgttttgacctacaactaagtgaacataatctattattcccccgaatttcttggttccttttaagtccctgtcactaattctccacccccctctcattttattttggtataaaatgtaattaatgagcaaaattcttaaggtaatgacttaaaatagcatttcaaaaactatttgcttgattttagtataaggattagaatatttctgcagataatttctattgaaattgttaatctaaaatcagcttgacttaatcagatttatattaacagaattcagtatgttaaaggatctggttcccccaaaatactttgtccttttttgctagtgtttatgtatactgttagaatgtggttatataaaccttttaaatttaggaatctgttaaataacttgttttaacaccccatccgtcgtcatccctaatctgatactggagtctaaatacatgctccataatcatgcaaactaagttgaatctagatgatgagggtagactgggtgcggtagctcatacctgtaatcccaggactttgggaggccaaggtcagcagatcacctgaggtcaggagttagagaccagcctgggccaacgtggtgaaaccctgtctctacttaaaaaaaaaaaaaatacaaaaattagccgggcgtgggggcatacacctgtaattccagctactcataggatattgaggcaggagaatcgcttgaacccaggagtcggaggttgcagtgagttgagatcgtgccattgtgctccagcctgggcaacagagtgagactacgtctcaaaat

SEQ ID NO: 16452 - DNA, 1879 bp, Homo sapiens
attctccagtggcattgccattgcccaggaggggcccagtcaccatgagagctcccttgccttacctggaggaagaatgtgccttcaggccacagtcgtgctgctagaacagtctcatagctgcagttcagctgtgcttcctcagcctactatcataggcttcctcagccctctgtcatatggctgttttccaaacctgtggagtctgttactgttctttctgcaaggactcacctccttgagccttggtttttgttgtagggattaaatgagataatatgagtggcagctcttcatgagtcctgcagtgctaagcaaatgtcagaaattggtgtattagactatttatctttgatcttctgaatggattgctgtcatggacacggacacggatcttcatctggttcattgtatttatatgtgagggatggatggctgcggggctccaagagcagcctcctgaagtgagggtggcaagtatgtgacagggcacccacaaaggcagacgaggactctgagaaccaacaggacttctctggtcttattctgaggctaagacaaaaaccgcacctgagccagatctctcagcctggcagctccaggacccgtgggccctgccactggcccatctcaacggctaggacctagagcatcatcaagctgcaggttaaacaggttggttggttctgatttgactgcacctctacaaggacctatggctgcacttgttgatactttcccgaggagccacaacactgagcaatgaggggaggagcatgtgttagttcattcatcaagtcctaaatgttacctactatgtgccaggtgctgagccaggcaccagagataccatgatgaacaagacacataaatcttaccctcattgagcttacaccatgtgaaagagaagtatgaaataattatacgttatttttttttagtttttgagatggagtttcacttttgtcccccaggctggagtgcggtggtgtgacctcggctcactgcaacctctgcctcccaggttcaagcgattctcctgcctcagcctcccgggtagctgggattacaggcacctgccaccatgcctggctaaattttgtatttttagtagagacgggctttcaccatgttggtcaggctggtcttgaactcctggcctcaggtgatcctcccaccttggcctcccaaagtgctgggattgcaggcgtgagccacggcacctcacgaattacacattattcaactgtaactgtgaaagtgattctaaggaaaaagtacagagagctgtgggaaaacataataggaaatctttgtcattctgtcactattgtctattaggctgtcactgttgtcattgtcacccctaccctctcgcagagagtggttcccatttgccagagctcatttattgtcctgaaggtctgtgaaaagatgacaaagtcgtgttgccttctttccactttcccaagtctcacgtgagcacccctaactggcagaatcaattcacacccacaagcctagctgcaaggggacctgggaaatgtattcccagctttccaacctctccacccaggagatgaaacagccaatttaggccaggtgcaatggcttacacatgtaaaaccagcactatgggaggctgaggagggaagattacttgagcccaggagtttgagaccggcctggacaacagggcgagaccatcatctctacaaaaaatacaaaaaaaattagctaggcgtggtgtcctgtgcctgtggtcccagctcctcgggaggctgaggcaggaggatcgcttgagatcgaggctgcagtgagccgtgatcgcgccgctgcactccagtctgggtgacagcgagaccctatctcaaaaaag

SEQ ID NO: 16453 - DNA, 789 bp, Homo sapiens
gttttgtctcccagcatgtgggaaagatgtcatccattgcttctgtttcctggaggcctgggagcaaggagcccaggaacagtatcacgaagcttgagataacaccagttacattatcctgactgcccaaaaggcagtttttttgttttttttttttatactttaagttctggggtacatgtgcagaacgtgcagttttgttacataggtatacgtgtgccatggtggtttgttgcacccatcaacccgtcacctatattaggtatttctcctaatgctgtccttccccaacccctccattccccatcaggccccagtgtgtgatgttcccctccctgtgtccatgtgttctcattgttcaactgtcacttatgagtgagaatatatggtgtttggttttttgttcttgtgttagtttgctgagaatgatggtttccagctttatccatgtccctgcaaaggacatgaactcatccttttttatggctgcatagtattctatggtgtatatgtgccacattttctttatccagtctatcattgatgggcatttgggttggttccaagtctttgctattgtgattttttttttttttttttttttttttaagacagagcctcactctgttgcccaggctggagtgcgatggcatgatctcagctcactgcaacctccgcctctcaggagaattgcttgaacccaggaggtggaagttgaacaatcacttgaacctgggatcacgccactgcactccaacctgcctgggtgatagaatgagactctgtctc

SEQ ID NO: 16454 - DNA, 1490 bp, Homo sapiens
tttgacttaagaagccattttatggggaaattagaatgaatcttaaaaaagttttttttcttcttttgattgtattgaattcctttgtagtgtggcttttttaaaagactgaatctttgttctcattaaccctaggaaatgttcttgctttctctgcttatctctttgctctttaatatgaacagaattttttttactccctaaggaacgcaagccattttctgtttctagcactcccaccatgtcacgctcaagttcaataagtggtgttgatatggcaggactacagacatcttttctgtctcaggtgatgttttattttttatatgtgcttagttcttagaataataataaaggaaatatgcaaatggcaatattgtctgtcatcatgaccttgccattctatgggtaattcatctgaatacttgtggaggagtgctaattttagtgagaggaaacacgtgaatgattttctgcctttgagaagacatttaaagcaaaaattgacagaaccatttttgttcgaacctggtaatggaagacaagctatgataactgagtaactgtgtgaactttcttaattaacataggatgagtctcatgatcactcatttggaccaatgcctatatcagcaaatggaagcaatctttatgatgctgtaaggatgggagcaggatcaagcataattgaaaacctacagtctcagctaaagctaagggaaggggaaatcactcatttacaggtattggaaaaattaaatttgctatagaagtaaatgaagttttgaggcctaataaatagcacccttcatttccatctgaattctgagcaaattgagaaacaagatgacatagtggcatgtgaagcccaaaatgtatcacatatatcaatgataaaggctaaaaagagaaattagctaaggataacagccaactgaacctgctaattgccagaattaggcatattcggctgatctgtcacaggaaatgctgggctggagcaggcctcccatgttttacaacctgcctacataagacataagcatctaggagcagagaatccctcctcctttcaagcagctctttcccaacagaataaagggaagtcactgagctgtgaatgcctgttcatagatagagacaaaacatttctatcacaccggcaatttcctatgtgtcccatcccaatcaatcctttcccctttgctggctccaaacaatgactctttcctatctttttagaaagattagaattgcttttctagagttccagtaatggaatcatacagtgtctaagtctgtttgtggtgctgtaacaaaatacctgagactgggtaatttataaattataggaatttatttctcacagttctggatgctgaaaagtttatgatcaaggcactagcaggtttggtgtctgagggcccagtttctaatttgaagatggtgctttaaacactgtcctcacatggtagaaggggcagatgggc

SEQ ID NO: 16455 - DNA, 1992 bp, Homo sapiens
ttgctttgaacttgggttagggtctgtgtttagcctgagaggtccttgtagggaagcttgtatcagaagttctaatgggtttgagttctcaggccatatatagcatcatgttagtgtttgagttgtgataaaaattatggggttttttgttaggcctaaattaaaagaaattatttttcttttcaacaatgaatctgaaattcttagtataaccaaatctgatgcatttacaattttatgtacacattggtgtgtttcattttttagaaactgtgaagcctcattcagatagtattaaaatacaggattttccttttcattaatgagtcctatgatgtaagtgttatattgatgttaaaatgaagtagttttgtaccctgggtgcataaaattgtcagagagaattaaaggagaaagaactcaaacttcatcagagatcttgatttaattcatgtgaagagtgtggattacccccaacccccaaccccatgactctaatacacattagagtgtattaactagggatggtgtgtttatttctgccttagggcactagctttccaaataacttttggtatgggcttgagccatccctgtattcatgcacagagtttcaaggcagaaatttgagctaccctgtaacttaacagttgaaaaaaaccctgcttcctgtgttatctgtcttacttacactgccatagcttgcagtttagcacttgtctttcttttacctaaggaagtaatttgttgagggaactagcccttttgcttattgaaactttgcagggtggcactagtggaacgtagtactactcccatgtgtgcctacattttttcttttatctgaaagtgctccaagccagaaatccttgattatttacagtgcataagagttcttacatgctgtgggtaaaagagtgcagggcatggaacctgtttattttatgcagttcaagaaaactcattgattattgagtacatgttcgttctcatgatattcatttgtccctgatataaaaattgttcatctttcttactctgagaaagccattaggaagtttctaagccccaaactactgttacctgtatctaaaaatagctggtattggtattataaagaaactgttgacaattttgtggtcccctcagtctctgagacttcagtaccaaattgtttttaacctgatacactgtaaatataagttatgattataagtttttatctgaactgcaattcactacattatttcagtgaacagtatatgattgagaatgttttcttttgaatttaactacattagtatacagttaggtttttttaatctgttttacttttgaaatgtgttggtttgtgaattagcatttgttttaactgctattctgtttctcttttatgttatttgtttattttttagtgattcgcctttgccagtctcatctcgtgtctgctttgttaagttccatgatccagactcagcagttgtggcacagcatctgacaaacactgtattcgttgacagagctttgatagtcgtaccatatgcagaaggtttgtgctttgtttaactacctatgtgggcatcctaagatgaccatctacctcagtagatgtagagtgagcattagtagcatgttaaatctaagctattaacatttttaaacccttgttatactgcagtccgtaatttttgcttgcagattttttttaattctaaaaattagaaattaggtctgttattataaggtatttaccttttgttttcttttaaaacatttttaagttgtttaaaaccatgtcccttattgtaactccctgagatacatctacttagttaatttaatgttaagttttatgaaaaagccctgaaggtaaatgattcactccatgtatgcttacagagccttcaaataaatgcatgatgttatttctgttttaaataaatgagtaggttgattttattttcttaaagcttcctcacattgataatctgg

SEQ ID NO: 16456 - DNA, 2004 bp, Homo sapiens
tgttgtataaaattgagttgttggcatgtggttgtggtgagcagaagcagttattatacattacttggtaaaattcatattcatatcttgtcataaattttaaacaggtcttctttcattttcctttacagaaaactgtaatactgcatatgcattttcaaactatgcatatttcttcttcattccatgtggaagtttttattcagcctttcagtaaattttacttagcttgtcccatggatgccgtaggtgtaaggaatatgatagtgaacaagacagacagagctcctcccctcagggagctttgccatgatacacgatgatgacaatgataaaaggagcaaataatgatttgggacctgattccaaagggatatttctgcgacacttacaatgaaattccaacctggcaccatctttttcactgcagaatgcatggaggtggttgcatcatgtcatttcgacatgcatttaaatgtaatgaaaggcacaagtagtgattgcaaacactacaataagttgcttgttgactctcttactgtcttccttcttatctccctttcttcctttgtctcattctcagttttcagagcttagtcattatttcgtaatcctctcctaaaatgaaatctggagctctaaggacaggaggcacaggttgtgtttgaacagcatcatcgtgctttatgaaggggattggaggggagattctgccccacagtatggtcaggtctcgctccaggcagcactgactacattggtgctggttgggtaactgtggctcggcaggtcactctccctctttccacctccgttttctcattattagtagaagtcgaaatagcatggttttctaaggcctctgccaatctacaattctgtgattcatatgttcctaaacacttgagttactttttctcaataaatggaaatatattttccaatgaggctggaaatacattttccaattatcctctcccctggtttataacatatcatcaatgtgttgggacttctaacactgcttctgctgtaagcccatcaagaggttaattacctttgaagaatgaggaactgctggaaaagaactgtaaaaccttcaagagaactttggagttaatccctctggtaataggaatcaatgtcactcacacatctagttgccagtggaggaggaataacagcactgggccaagtagacttgaaggaaggcaggttgctgatagagtggagagctgaagattctgaatcaagctcatcatgactctcttcctcctctttgaggctacccaatcagagcaaaaacagtattttaaaaaacctcaactggatgagcctgatgcagtggtgtgctcatgcagtcccagccaaagggtcacttgagcagaggagttcaaggccaacttgggcaacatagtgagaccccgtctctaagacaaataataaacatcaaaattaaaattaaaaaaaacccaacccagtgttcccttcagaatcctgagtggtttgtttcatcttcctctattctggcttgtgtcatcttcctctcttgtaatggataaaaactccaaatgaagacaaaaatgaggaatttgtcaaaaaaattgaattgccaacaaaagccatctttggttgatcaaacggtacagacgtttcagttagacaagagggctaagtttctgagacccattgtacaggattattaatattattcatttttagccctcataataaggtattataaatgtcaagattgctaaaagaatacgtttttaaatgtcttcattataaaaaataagtatgtgaggtgatggacatattaatcagcttaatataatcattttatagtatatgtagctatatcaaaacatcacattataacccataactacatgcaattattatttgtcaattaaaaatacaaatctaggccaaggtgggaggatcccttgagcccaggagtttgacagcagcttgggcaacatagggagactccatctctac

SEQ ID NO: 16457 - DNA, 1729 bp, Homo sapiens
tatatatggattaaggatttaaatgtaaaaaaagaaattataagagttccataccgaaatgcaggtttatatttagtaaaatagtcaagaaaggttttttttttttttttaaaaaagcataacatcaaagcctaaaattacaaaggaaaagagtggaaaattcatccccataaatattaaaaactagtgtgttgcaaataaattcaaaagataagggaaatactggggaaaatatctgaaacatgacagagtgtcattaatatatcatgggcttttacattttagaaaaaaatgacggatatctcactagtgaaaagactataggaaatgaagaagtaattcacagaaaaagggtcaactccatttatcagagaaatgcaaatgaaatcaggattgcattcttcacctgtcaaattggcagatgcaacaatagctggtacttactgagccctttctgtgttagctactagtctaagagttaccaccactcatacatatgtaaaggctaatggagttgtaaatgtaacttttgaggactttattgtatgtatgcgtattagtctgttctcacgctgctaataaagacatacccgagactgggtaatttataaaggaaaggaggtttaatggactcacagttccacatggctgaggagacctcacaatcatggtagagggtaaaggggtagaaagtcatgtcttacatggcagcaggcaagagagctcgtgtaggggagctcccctttttaaaaccatcagacctggtgagacttattcacatgagaacagcataggaaagacccgccccgatgattcagttacctcccaccaggtccctcctacaacacgtgagaattatgggagctacaattcaagatgagatttgggtggggacacagccaaaacatatcagtatgttatggccttatataaaagttgttttgtttgtaagcagtttgccctacagtgtgtggaaagtgcatcactgttgtgctttggttgtccaactctttgcttaccctgatgcttaggtgtgagttgatggcagtttggcatttggagagcagttgcactcctaaaatgagtgaaatgttctcttcaaacttgtggcataccgtctttctatggctctgtgacagttacagatccgaaaattaggtgtaatggcttttgaagcaaaaatctcattctgaataaatctcccatctgttccaataacattttaattgcgcatcaaatatggtacttatttttaaaaactgcctagcaggatagtttgtgttactctgcctgtatccatgaccgtgataagaaatgtaagaaaaggccaggcatggtggctcacacctgtaatcccagcactttgggaggccaaggtgggtggatcacctgaggtcaggaatccagacaagcctggccagcatggagaaaccctgtctctattaaaaatataaaaatgagccagatgcggtggtgcatatctgtaatcccagctacttgggaggctgaggcaggagaatcgcttaacccaggaggtggaggttggagtgagcgaagatcatgccactgcactccagcctgggtgatagagagacagactgtctcaaaaaaaaaaaaaaaaaaaaatgtaagaaaagaggttgagtcttattttcatttgtatttctctcactgcctagcatagtgcctttcactcagttggaatatataataaatgttcattaaactg

SEQ ID NO: 16458 - DNA, 1703 bp, Homo sapiens
tatatatttaattatattttgccatgcaaaacatccaaataaatgtttagattgtgttcttgttcttttggaagctatatttcttcaaaacaaattattaaatagttttggaatgtgggatgttataattgcttattagtgacatcatccatccatggcccagtaaacacaacattctctctctttttttttttccaaattattgtgtttcatagcaattctcgtaaactttaacaaaatatgcttctcataaaccttaacaaaatatacttccccaaattcaagctaaaatgattaattttataatttcagtatctaataccgaaaataaccttttcccaattggaagatagttgtatgtttgggctaagtcacagagcctcttagatctggcctaccagatctaaatttcatctgatccacagttctggtgatgaaatatcactcagccctacccgctgttgaatggctgtgttgcagggaacttgtgatcacagagccaccaggcaggcacacatgctgccagatgcctatgcagggagcaccgctccagccacctgctttggtccagaggctcgcagaaaaacagcatcatagcttttgtttctctgacggactaattttttggatttgagtgtctatgtcgactggtcagaggaagaagagtcagaaaaacagcctgagcttcggtttaaaaactgtacagttttcacaacagtgccagtctgatgtatgctcaccgcagaacatgcagcatggcctgtgcttccttcctctccggggcacacctgctattcctcaatgactctctactaagggccaccccccaacctgcccccgaccaccgacctctgtcctcccaagtggcctgtgcggcactttagtaggccaaacaagctgagaagtcacgtggctttggtgtcataattctgtgtgtgaacttcattttttgttgctgtttattatatgcttttatttgtatttgccagggcaatactgagaaaaagaaaagaaattccctgaaatatgttaacctatcataggtatagaaactatagctaacaaattattttgtggggagtggggaaaggagacctctttcagttcaaaaatctggtatttatttcccaacttgttaaaacaaccacagagtccaaaatatattattaatttataggtactattttctgtaggcctcttgaagggccgttttacagtagtgtactggagaagctcttactgaagagcattttgtcaatactcagtgtctacagagggtgctgtctgagtgttgagaatgacaaaggaagcaactgacatggtctttgaccttgaattgtgtccctttcaacccaaaacaggacaggcagaagtattagagtagttgatgattcaattaactagatcttagctgactgatctcagaaggtttcatgaaagaagtgagaacaaatgctttaaacatcttgatctagcagaaagaaaagtgtctctaaattggtgagatgttatctgtggagacaaatgtaggatttagagagagagatgcaaaaggggaagtaagagggtttattcaagagagattatgactgggtgcagtggctcttgcctgtaacctagcactttgggatgccaagacgggcagatcgcttgagctcaggagttcgagaccagccagggcaacatagtgagacctccacctc

SEQ ID NO: 16459 - DNA, 1658 bp, Homo sapiens
taaacagggaaatgtctattgttttttccaatcgagaaaccaaataaaacgtacaaatatctcatgagctttcctcagactttcccagaaagagtttatatttgtgctgagacaaagcacagagaagttgcaacctcaaatggcttggagacagttcacattgaaatagctgaagagttaggtaaatctgtagaaataagacttccactggattaagtgtgaagaagaaaatatgactttgttttctctgtgttatagcattctacagtatcataaactccaatggagaaccacatttggggcgtggctgaggtggggctaatatggtagcatgtgctaaactctttctaggatattctattgcctctgagcttatacccagctccattatctatatcagctttttgagcttaagtcttcatggcaactgccagctaaatgctcggaaaaaaaccgtttggagtctacccccttctcctaatttatttctcctctaaatcgtggttcactggtgccagtcatggcagagggtgatcttcttaggatgcaaattagataatcttcataacataaagccctaactttttaccttagcccggaagagccccacatgatctgaactccagcctggaaggattaaaaaatctttttgatatatttgtacatatttatggagtacatgtgaagttttgttatatgcataaaatgtgtaatgatcaagccagagtattcagggtattcgtcacctgaacatttatcatttctacgtgttgggtgcattgcaagttctctcttgtagctattttgaaaaatgcaatatattgttattagctatagttaccctactctgctatcaggcattagaacttattttttctacctaacaggagaaggattttaatgtcagctgagttgagggggcgcgtcacagagggagtagaggtgtggccattagttggtagaagagcaacattcaaaatacagtcccaccatttaactgtttcctgtttttatcaccctggcagcttccatgctgctacttctgaagtcttttcattatagtataaacagctctcattcaatatatgactagtacctgtttaaaaaatatggcactttgatagtatatgcttaggggaaggaactgcttctccttctctgccaccttatgctgcttctctctagtgcctttctgtctctctacctgatctctttttcagttcctttattttgcaaaactacttttctgacctcagaaccttcacacaagctactccttcctcctggaagctttccctccctctctttgcctggccactttctactcatcctttaaaactcagtgtaactcagtcctcatcaaagagggctttctggccaggcacagtggctcacgcctgtaagcccagcactttgggaggctgaagtgggcagatcacttgaggtcatgggttcaagaccagtctggccaacttggtgaaaccctgtctctattaaaaacacaaaaattatcttggagtggtggcaggcacctgtaaccccagctactcaggaggctgaggcaggagaatcgcttaagcccaggaggtggaggttgcagtgagcccagattcgcgccactgcactccagcctgggtgatagagtgaggctccatctc

SEQ ID NO: 16460 - DNA, 1596 bp, Homo sapiens
tttgctctcagcattgtgttagaaaataaagccagcagacaaggattaaaccctcatgttgctgggttccttctagaaacaattggagggctaaccaagtcacctttggtggaaggcagtaaggtgagtcattgctgtggctggactgaataggatagccttagctgtaaaattgggctgacctttcaaatggactcatgcttgccgaatgactcacgctcctgtttacaaatcagctctgtgaagaaatgcagagtgggaggctctgcttgccagacggagaccttagacctccaggggtggagaacggagtacttcctctggtgctcggcttcccttcctgggggcagatctctcagcttctggttggtggctctcaaaatccagacacaaggtcagctgcagccagcgtgggccctggagtagctccagttatggggcagcaatggccccctctcattttgagagctcactttgcctgtggatggttttaatccatctggataaacttgaggcccatgggaataccatatactatggtaaccatgtacactgctctaaagatgtggctgctgttgtataactttttcctttatttttgtcaatttcctattttccagagtcttgcatacccactatgtctactgtgatagtgaacgtaaaaacatacaagatgttggtgttatcctcaatctcttattcttaatcctgaacaaattacatgaaaaaatcgttcatggagtttttcttcatataaaactttttacaatgaacataaagggcatagctatttctttttttttaaaaagaaacgtagaatattatttcttggttgtgaaatcgcccttcttggaccccaagttgttttttacagccctaaattctcttgtttatagagcctgtttatagagccatagacaggccaatgggtctctacagcaggcacctgcatgagttgactgggacctgagctatattccccctctgccatttactagcagtgtgaccttgggcatgctccttacagtctctgagtcagtttcctcctctgtgaaatgggcatgatactacctacctcataaggtaggggtgaggattaatggagtaagaggcacactcctgtccagggccccagacagagtaggccgtcagtaaactgtagcagctattgtgatagggtttgaaattcaaattaacgcatatttcttgagcacccaaggtgtgtgctgctggatctttcaaggggtccagaattggtagtatagttgcttttctcaaaagactgtcgcctggcagaggaaaaggtgttaaggtatgagtgaagacagatcagccagacatggtgccgcttgcctgagatctcaacactttgggaggccgagataggaggattgcctgagcccaggagttcaagaccagcctgagcaacatagcaagattctgcctccacaaaaaaataaaataaaaataaaaagattagctgagtgtggtggcgtgcacctgtagtcctaactgtttgggaggctgagacaggaggattgcttgagcccaggagtttaagtccagtccgggcaacatagcaagaccccatctctt

SEQ ID NO: 16461 - DNA, 1766 bp, Homo sapiens
atgatcattgcctgcctgactatgtaagattcttgttgggagcttaagaatagattcctgagctaggcctttggagactctggcatgctgtgtctaggagggagtctgtaaaacaatttttaatgaagaaatttaaaaattacacaaaactagaatagtgcattggtactcaacatccagatctgacacttatcactatcttaccatgtttgcttcatttgtcacttttttgtttgcttaagtatcttaaaatcccatacattgtgttatttcactgctgtgaacactttgggtagataccacgatatcacacctaacagaggcagcagcagtccttcggcttcatctcatagccagtccttaagcaaatttccctgattatctcaaaaatcatcttctagttggtttgttagaatcaacagaatataagtcacatgatgatttcgtttttaacaatcacctcagatgactttgatgttagctactttgagaaccactggaaattattttgccaacttgaaagttcaagttaggataccacaattcttggcacgtttggtggattataaatgtgattttgaaatattagaggaagcatttggggttaatgacaggatatgaatttatattagtaagtttgataagataaaatttcctcagtgaacggagaatctcagccccatgggctctaattgattgggacttgtgtagagcgtggtcacagtttaatccaactggactgtatgctgtggtctcactcatgttgtggcttatttacactgtcacacacactacattgtggatcagttggaaggttcttcatctggtttatttagacctgacctaattgatcattttaccataaattgaattatagtgaaaactgtcttttgggtactgtttctacctaaaattaaaggtatcacaaaatatgtataataatttttaaatgaattttctgaatttatctttagacaaggtaattcttttgaattctaaagaaatgcagttcttggagttgatgagaggttaaattatagatggacaacttagagaacgtattccatcttcatataaatggtctttcataaaacatagtgtatctatgcagtttatataaactacatgatttattatttgagtctatgtattctgacctcagaactatctctgggctacagtattaccaaagtgggatgcctttaaaatgcagtcaaacttcatttgtatgaagtagaaaagaacttgggaaacctttaaaaatatatattgtgatttatgctttaagaaaatgcatacttttttctaatgaagagtagttcataatatataagggttttaaggccctgaaataacattagtgcttactcattgctctctcatcttgcctccagtcagatgttattggtatagtgaaaagaagaccagattttgaactagatctggattctctttttagtaactcaggcatgttatttaaccttctctgtgccttaggtttttaagtacaatcagtgtacccttcaaacctcacaagatgaaactcagaagagataatggatttggaagcattttgcgtggcttatattatgccacgccagtgttactgttgaagttctgttttgttctgttgttttctgtacagagcgttcagtttactcaggctgaatgttttctgacatatatctccagtatgaatttgtttatgtaaggaagagtttttcaggaagagaaagtagagaagaaaagaatgatgtaactaaatc

SEQ ID NO: 16462 - DNA, 2483 bp, Homo sapiens
  CDS (1793)..(2119)
ataaattaaactttatcatgggtatgtatataggaaaaaataatagtttgtataaggttcgaatagtttgtataaggttcggtactatccacagtttcaggcatacaccgggggtcttggaacatattcccctcagataagagagaattcctgtgtatggaagagactcctcagatacagcttctcttcaactgtaaacctatgaattaaaaaaaagttattggtcctatccacccccgcacatacaacctacattgttatggcaaggatacgatgtcacatgaattgactaagtttacaagagaggaaattgaaggcatgtagcaatcccatggcagttgtgaaatccatctgcctatatgtcaccaattcccccaattccaggggtagggaacatttgattagtctactttggttctctgaagttggctcccttttctttttctcagttcttgacttttttctttgagctgtctttccttttccatgagaaatgtcctctttttgtagctttctcagcctgcttctaggctctgtcccaactggcacagttatccacactggcacaacttctttaaaaagctttgtggactttcaaattataaaccactcactccaccagagagaagccacacccacaaatttcttcaagaagtcctctatgtactttgaatgtcaatcagggaatgataccctttagagtcatatatgtcttttgtctacctgagagcgtcagctagacactggcttaaatctttctgaagtacaggtggtcgtccacttatgatggttcaacttagaattcttttactttaggatggtatgaaagctatatgcattcagtagcaaccatacttcaagtacccatacaaccattctattttttacattcagtacagtattcagtaaatcatgaaatattcagcacttcattataaaataggctttgtgttagattactttgttcaatataacataatgcaagtgttctgagcacatttaagcaatgacgggttaagctgtgatgtatggtaggttacgtgtactattcaacttaatattttcagcttacgatgggtttgtcaggacataaccccattgtaagtcagggagcatctgtagtagtaacaaggttgtattgcatgtgctttattttatcttgatcctcagaccataatcttacagttaacaccctggatttttttttttttaacttcagaaccttttgctgaagaagctggtaacgagaaagttttattttgtaaccctgcaagtcccaggttgaaagtattttcctctaaattctgcttgaaactgagcagttccttgtttagttcttctctcttttaatacctttctacaggtgttttttgaaaaattgcttatcactttcagcatttttcctggaaaccttagccagatctataacttcaataggtactttttctatcttccaagatactgtctcacttgttttgtcagtagattacatggcttctgtccagcctgaaataccaatttcctcagtggttttccagcctccgttagtagtctctttgctgctcttccaccaaatgtctataacccagtccccaaactagtgctacatgtcttaagtttctgtcatggcaatgccctgtttaaataccaaatactatttcagttatctttttctgcctaacaaatcaccccaaaatttactaccttaaaacaaaactattctttgcttgagattctactgtctgaactggactcagctgggcatttcttctggtctcacctggagtcatttatgcaactgcagacatgtggggactccaccaaagatggctttactcaaatgtctggggcctcaactggggtggctgcattagctctggcacagctgcagttccctctccagcagggtcctgggccatttcacatgatgactgagggctccaagagggtgaaagcaggagcatctgggctaggcctcttagagcctgtgcataaaactgaaacagcactacttcatccatgctgcctttcaaagcaagtcccggggcctgctcaaaattacaggcagggaaaatatcctctacctgatggtagtgacaaagaatatgtgtcccatcgttaattcaccagttgccttcacagttgcaacaatgagactgttagcttttaaacagaaatgataaaaactagaagccggccgggcgcggtggctcacgcctgtaatcccagcactttgggaggccgaggcgggtggatcaggaggtcaggagattgagaccgtcctggctaacaaggtgaaaccccgcctctactaaaaatacaaaaaattagccgggcgcagtggcgggcgcctctagtcccggctactcgggaggctgaggcaggagaatggcgtgaacccgggaagcggagcttgcagtgagccgagattgcgccactgcagtccgcagtccggcctgggcgacagagcgaaactccgtctc

SEQ ID NO: 16463 - protein, 109 aa, Homo sapiens [sequence omitted]

SEQ ID NO: 16464 - DNA, 1724 bp, Homo sapiens
ttaaaaaagcctcgttagaatttgctattcgaaaagaccttaaaaaccctcacagagttctaaacatcccattcattgaaaatacttttcagttaagtagatttgttttgtgcacttcacaacttttaggtgacatgaatttgaagcgtagcaaaagaaatgtataaagatagccttttctggtcattaccatgtctactcaagtttctgttttctaggtacactctagcattgtaactttttccccctgagaagtaattttaagatctatcagtctcaatttaaatgatctgttaatcagccagagttttagtttcataatatcgttccattgcctgacaaagatatacacactgaagtgcctttagcagacctgggaccgtcaagaatcttgttaccctgattattgcaagatgacatatttcttaagccatttataatctcatattcgggttgaatctgtatttacaaataaaagggttaaattgaggcagtttcaagcagcatttaggaaaatgaagtggcttcaaattttagtgtttctggttacattattttgtttgaattatacaattacataattttctgtaaccaaaatggtaattttgatggattttttaaatgccaaaatccaatcatcaaggccaaagaaatgcatgattactctgatttcttatgcaccattcagtcaagacttaactcagaggcagttgattcagtgcttacatctagacaaagctttaatgagtgcagacccagcctaacagtatttcatctaatttctttgatggcttaagccaataagcactgaggtagcttttctcagaaggaaacagattttattttccaggggctaattaatatgcaccacctaagtccccaaaggatcacacaggtgcctgtatcatgccatatgtcatgtgctatattcctgcaagctcaagagattaatatacaatcattattatgaattattatgttgcattgaagttaatgtcggtcttttgttctaattaaagtacaaacgtggcatctgaatagaagcttagctagagaagtggagttagagtccctattttaatgaactacatatatttttcaatcaaaatgtgtaattatttaattatctagcctgctcagtaatcataactctccaacttcttcaaagggcctttattcaatatgttaccactcatatggtcattacttggtaagtgttttatattttgaatttcttagatgctttcagtgtatgtgctagtgttttattaatattaaaaatttttgtttacttatatatcaagctgctgcaaatggactaccttattttaaaagttagaataaaatgctattactctctaaacagaactttagcatatctgtttgataagaaatacacaaacaaaatatttttctatgctattgcaaattgtccgcaggaagcaaaatgccagatggttaagtgtagctcacataattatattccaaaggtgttataaacaattctatttagcatctgagataggtctatattaggcaatttcatgtttacatttctaacagaaaggtttaatggcaaatattccttatattctaacttgctacttggagaatatggatattctgaaaagaaaaaccctttctagaacactgtgcaggactaatttttttttaatagacatccagaaaatagcctgggcaacaaagtgagaccctgtctctct

SEQ ID NO: 16465 - DNA, 1278 bp, Homo sapiens
  CDS (541)..(882)
acaagtattatggacacacttgaccgtaaaggcacaggagcctcggaacaagggggcgcaataaagggaatggcccgtccccttccagaaccagcccaaagaagcctggggggtgaggagtggcccccactcctccatgaggggctgatgaggggtgggcagcctgggggaggctttcctcgcaagcacagagctctgaggctcagccccctggcacaggcggtcacgcatcaggacggttcctactcctcagcaccttccgtgcagttaccagtgccctgggaggtcacactgcccgtcggaccttggcatgctccattcagctgacctgctgaggacaggcatcgccgagactccttgggtcctccccgccctccctcatgctgccacaagctgctgctccaaggcctggccacatgcagacaggaggaagctgagctcgacattaggcctcaaggctgccatctgtcttgtagggcctggccttgtgggcagggggcagtcctgtgccttgtgggccctcagcctctgagggcagagatgctgtcagtgccgcaggtgcatcacatacttctagcatcctctccaccctgcattccaaatgctgcttgctgcctgccctgccctccgatgcaggggtggggtggggggcggagtcccgcccagcatagctgcagtgtcacaaagccatggcagagggtcctagcggcgccaccctgccccagcctgaggaggagggagagggaggaacaaccctgggcagacggggtctcagggacctgtgtccttccgcctccagagctgcccagccacgggctctcagggtgctggggcagccccaggtcccctcttgaacccagctggggccaggggccctcagaatgaaggcaggcaccaggcaggagcagcatccccctccttgacggtgctggcaggagggccgcgccatgctgactgcttgaacctctgctgacctgacagtgctggcgggagggccgcaccatgctgactgcctgaatctctgctgaggctgcctgcctgccgggcccagctcagcgccctctccactgcgaatcagtggcgatcatgtgatttctatttctgccccacagggtaagggacgagtcttctggaaggctctgccatggacatttgtcctcgggctcagaggccccaccctgccccacacctgcccctaatcactgcagtgtccagcccagtgttgaacagattgtagcgttctgtctcattacgagcaaataaatagactttcattgg

SEQ ID NO: 16466 - protein, 114 aa, Homo sapiens [sequence omitted]

SEQ ID NO: 16467 - DNA, 2212 bp, Homo sapiens
  CDS (39)..(1037)
aattattatcactgttgcctgaatatgtagttccatacatgattcacctgctagcccatgatccagattttacaagatcacaagatgttgatcagcttcgtgatatcaaagagtgcctatggttcatgcttgaagttttaatgacaaagaatgaaaacaatagccatgcctttatgaagaagatggcagagaacatcaagttaaccagagatgcccagtctccagatgaatccaagacaaatgaaaaactgtatacagtatgtgatgtggctctctgtgttataaatagtaaaagtgctttgtgcaatgcagattcaccaaaggacccagtcctcccaatgaaattttttacacaacctgaaaaggacttctgtaacgataagagttatatttcagaagagacaagagtacttctgttaacaggaaagccaaagcctgctggagtactaggtgcagtaaataagcctttatcagcaacgggaaggaaaccctatgttagaagcactggcactgagactggaagcaatattaatgtaaattcagagctgaacccttcaaccggaaatcgatcaagggaacagagttcagaggcagcagaaactggagttagtgaaaatgaagagaaccctgtgaggattatttcagtcacacctgtaaagaatattgacccagtaaagaataaggaaattaattctgatcaggctacccagggcaacatcagcagtgaccgaggaaagaaaagaacagtaacagcagctggtgcagagaatatccaacaaaaaacagatgagaaagtagatgaatcgggacctcccgccccttccaaacccaggagaggacgtcgacccaagtctgaatctcagggcaatgctaccaaaaatgatgatctaaataaacctattaacaagggaaggaagagagctgcagtgggtcaggagagccctgggggtttggaagcaggtaatgccaaagcacccaaactgcaagatttagccaaaaaggcagcaccagcagaaagacaaattgacttacaaaggtaaaaatgcatttgcaaagggagaaaatgaaggccaaacagaagcaggctccagcttctgcaaaaacttggattcacaaatgtccctgaacagaaaatgaagctcacttcagaacacacactctctgccttgaaaactaaagagactattacttccttttcacatgaccacaagtcctctgatggaaatgtacagcagaaactcttgagagagaggctaaaagcaactctgttctcccccttcccctagacttttcttacgaaaagtcaataattaagcaaattgcttaacacttggttccagttcctgcctatctggagtttaaatgcgtaatacaccattaatttccacgctgcagtttttattttaaagaaagtaacaagatgtctttacactgacactgaaaattcatccattttagagccaggaattcccatgttacacaggaaaaaatagaagtctactgaattaattttttaaaagaaaagagatcagattaaatatttctttgtttttccttttggaaacttttatgtataattctttctgcctgcctacttttctgcaaaaatgagatgtacagatttcggttccctgctatgaaaagtgatgtggtagcaattttataaatgttgctttctgatttttatcagagtgagaaaattaaaattattgatttgcaagtagtaaacagttcatattttgatttcccctcattttagtttaatataatttgcaataaatgtacatattgttgtttgtttcataaagcatatcactttaaaatggtttttactcctgtgattatgttggaatatttggaattttaaaggagtaaagactgtccagcatttggttttataatgtttgtcaccagatttttattaatgtaaaaaaaatcaatttttaaaaaatagttggactttggcagcttttaaggaaagttggaggtgttttaggattgctatcaattttcagcattgtgctatttggaaataagtgttttgcttttgtctgatggtctgggctcatttttatgtttattttagaaaactgttgcatcaatatattatgtttcttggcattgttcagcataggtaatgtgtgcactttatgtgtacacataatcatatttaagttttttgcataaaataaatgcttctagatgtcatggc

SEQ ID NO: 16468 - protein, 333 aa, Homo sapiens
MIHLLAHDPDFTRSQDVDQLRDIKECLWFMLEVLMTKNENNSHAFMKKMAENIKLTRDAQSPDESKTNEKLYTVCDVALCVINSKSALCNADSPKDPVLPMKFFTQPEKDFCNDKSYISEETRVLLLTGKPKPAGVLGAVNKPLSATGRKPYVRSTGTETGSNINVNSELNPSTGNRSREQSSEAAETGVSENEENPVRIISVTPVKNIDPVKNKEINSDQATQGNISSDRGKKRTVTAAGAENIQQKTDEKVDESGPPAPSKPRRGRRPKSESQGNATKNDDLNKPINKGRKRAAVGQESPGGLEAGNAKAPKLQDLAKKAAPAERQIDLQR

SEQ ID NO: 16469 - DNA, 1955 bp, Homo sapiens
  CDS (525)..(1529)
agcttgatggcgtcgggctggagagccgcagtcccggctgcagcacctgggagaaggcagaccgtgtgagggggcctgtggccccagcgtgctgtggcctcggggagtgggaagtggaggcaggagccttccttacacttcgccatgagtttcctcatcgactccagcatcatgattacctcccagatactattttttggatttgggtggcttttcttcatgcgccaattgtttaaagactatgagatacgtcagtatgttgtacaggtgatcttctccgtgacgtttgcattttcttgcaccatgtttgagctcatcatctttgaaatcttaggagtattgaatagcagctcccgttattttcactggaaaatgaacctgtgtgtaattctgctgatcctggttttcatggtgcctttttacattggctattttattgtgagcaatatccgactacttttgtctcctctgtctcagtgcataaacaacgactgcttttttcctgtctcttatggctgacctttatgtatttcttctggaaactaggagatccctttcccattctcagcccaaaacatgggatcttatccatagaacagctcatcagccgggttggtgtgattggagtgactctcatggctcttctttctggatttggtgctgtcaactgcccatacacttacatgtcttacttcctcaggaatgtgactgacacggatattctagccctggaacggcgactgctgcaaaccatggatatgatcataagcaaaaagaaaaggatggcaatggcacggagaacaatgttccagaagggggaagtgcataacaaaccatcaggtttctggggaatgataaaaagtgttaccacttcagcatcaggaagtgaaaatcttactcttattcaacaggaagtggatgctttggaagaattaagcaggcagctttttctggaaacagctgatctatatgctaccaaggagagaatagaatactccaaaaccttcaaggggaaatattttaattttcttggttactttttctctatttactgtgtttggaaaattttcatggctaccatcaatattgtttttgatcgagttgggaaaacggatcctgtcacaagaggcattgagatcactgtgaattatctgggaatccaatttgatgtgaagttttggtcccaacacatttccttcattcttgttggaataatcatcgtcacatccatcagaggattgctgatcactcttaccaagttcttttatgccatctctagcagtaagtcctccaatgtcattgtcctgctattagcacagataatgggcatgtactttgtctcctctgtgctgctgatccgaatgagtatgcctttagaataccgcaccataatcactgaagtccttggagaactgcagttcaacttctatcaccgttggtttgatgtgatcttcctggtcagcgctctctctagcatactcttcctctatttggctcacaaacaggcaccagagaagcaaatggcaccttgaacttaagcctactacagactgttagaggccagtggtttcaaaatttagatataagaggggggaaaaatggaaccagggcctgacattttataaacaaacaaaatgctatggtagcatttttcaccttcatagcatactccttccccgtcaggtgatactatgaccatgagtagcatcagccagaacatgagagggagaactaactcaagacaatactcagcagagagcatcccgtgtggatatgaggctggtgtagaggcggagaggagccaagaaactaaaggtgaaaaatacactggaactctggggcaagacatgtctatggtagctgagccaaacacgtaggatttccgttttaaggttcacatggaaaaggttatagctttgccttgagattgactcattaaaatcagagactgtaac

SEQ ID NO: 16470 - protein, 335 aa, Homo sapiens
MYFFWKLGDPFPILSPKHGILSIEQLISRVGVIGVTLMALLSGFGAVNCPYTYMSYFLRNVTDTDILALERRLLQTMDMIISKKKRMAMARRTMFQKGEVHNKPSGFWGMIKSVTTSASGSENLTLIQQEVDALEELSRQLFLETADLYATKERIEYSKTFKGKYFNFLGYFFSIYCVWKIFMATINIVFDRVGKTDPVTRGIEITVNYLGIQFDVKFWSQHISFILVGIIIVTSIRGLLITLTKFFYAISSSKSSNVIVLLLAQIMGMYFVSSVLLIRMSMPLEYRTIITEVLGELQFNFYHRWFDVIFLVSALSSILFLYLAHKQAPEKQMAP

SEQ ID NO: 16471 - DNA, 1506 bp, Homo sapiens
  CDS (203)..(745)
attaagcaattgcaatttgcagtgtgccaggcactgtgccaagtattttgcttcgatgatttcacgtcatcttcaaaacaacctcatgagggctgggtcagttagaacctaaacaaactagagacctggttgcaacccctcaggctctgctgatgctgtccccctttgttcctgcagcgtggaccctgccagcagccaggccatggagctctctgatgtcaccctcattgagggtgtgggtaatgaggtgatggtggtggcaggtgtggtggtgctgattctagccttggtcctagcttggctctctacctacgtagcagacagcggtagcaaccagctcctgggcgctattgtgtcagcaggcgacacatccgtcctccacctggggcatgtggaccacctggtggcaggccaaggcaaccccgagccaactgaactcccccatccatcagagggtaatgatgagaaggctgaagaggcgggtgaaggtcggggagactccactggggaggctggagctgggggtggtgttgagcccagccttgagcatctccttgacatccaaggcctgcccaaaagacaagcaggtgcaggcagcagcagtccagaggcccccctgagatctgaggatagcacctgcctccctcccagccctggcctcatcactgtgcggctcaaattcctcaatgataccgaggagctggctgtggctaggccagaggataccgtgggtgccctgaagaggtgagtggcctgggaagtgggaagctgcttgtgctcatcccccagcccttggttgcctctaaggaggctggtgcagacatgggagctgcagcaaagtgtaagatccagcccctaccaagggcaggtagatactttcttagaaatacacccttcaggccgggtgcagtggctcccgggactttgggaggccgaggcgggtgcatcacgaggttaggagttcgagaccagcctgaccaacatggtgaaaccccatctctactaaacatacaaaaatcagccgggcgtggtggcgcacgcctgcaatcccagctactcaggaggctgaggcaggagaatcgcttgaacccaggaggtggaggttgcagtgagccgagattgcgccactgcactccagcctgggcgacagagtgagactccatctaaaaaaacaaaacaaacaaatacacccctcattagttaaggataaagatgaggggggcctgtcgcggtggctcacgcctgtaatcccagcactttgggaggccaaggcgggcagatcacaaggtcaagatatcaagaccatcctggccagcatggtgaaaccctgtctctactaaaaaaaaaaaatacaaaaattagctgggcatggtggcgcactcctgtagtcccagctactcgggagggtgaggcaggagaattgcttgaacccgggaggcagaggttgcagtgagccgagatcgcgccactgcactccagcctggcaacagagtgagactccgtctc

SEQ ID NO: 16472 - protein, 181 aa, Homo sapiens
MELSDVTLIEGVGNEVMVVAGVVVLILALVLAWLSTYVADSGSNQLLGAIVSAGDTSVLHLGHVDHLVAGQGNPEPTELPHPSEGNDEKAEEAGEGRGDSTGEAGAGGGVEPSLEHLLDIQGLPKRQAGAGSSSPEAPLRSEDSTCLPPSPGLITVRLKFLNDTEELAVARPEDTVGALKR

SEQ ID NO: 16473 - DNA, 2168 bp, Homo sapiens
tggttgtgtgggacattgtctttggtgatttatgcctgtgcggtcatctcagcttctcagcaacaactcatgacatacagatgcccattgggatctgtactttacagagaaaaaaaaaagctgtaaacactttaaatttggagccctgatttcttttttggaattccaagtagacctagacactagttttccaattagggttgttgtaaggtctagagttttgtatgttgtggagatgtatcatagctgagtttaggatgacaaaccaccctcccgaataggttacattgtttctttctttttttcttaattatactttaacttctagggtacatgtgaacaacctgcaggtttgttacatatgtatacatgtgtcatgttggtgtgctgcacccattaactcatcacatgtgtcatattggtgtgctgcacccattaactcatcatttacattaggtgtatctcctaatgctatccctccctgctccccaccccacgacaggacccagtgtgtgatgttccccaccctgtgtccaagtgttctcattgttcaattcccacctaagagtgagaacatgcggtgtttggttttctgtccttgcgatagtttgctgagaatgatggtttcccgcttcatccatgccctaccaaggacatgaactcatccttttttatggctgcatagtattccatggtgtatatgtgccacattttcttaattcagtctatcattgatggacatttgggttggttccaagtctttgctattgtgaatagtgccacaataaacatacatgtgcatgtatctttatagcagcatgatttataatcctttgggtatatacccagtaatgggattgctgggtcaaatggtatttctagttctagatccttgaggaatcaccacactgtcttccacaatggttgaactagtttacagtaccaccaacggtttaaaagtgttcctatttctccacatcctccccagcacctgttgtttcctgactttttaatgattgccattctaactggtgtgagatggtatctctttgtggttttgatttgcatttctctgatggccagtgatgatgaacattttttcatgtgttttttggctgcataaatgtcttttgagaagtgtctgttcatatgcttggcccactttttgatggggttgattttttcctgtaaatttgtttaagttctttgtagattctggatattagccctttgtcagatgggtagattgtaaaaattttctcctattctgcacagcaaaagaaataaccattaaatagacaacctacagaatgagagaaaaaatctgcgaattttgcatctgacaacatacacggaactcaaatcactaagaaaaaacaaataatcccattaaagagtgggcaaaggacatgaatagacagttttcaaaggatgatttgcaaatggccaacaaacatgcagaaatgctcaacatcactaatcatcagggaaatgcaagttaaaacgcaacaagatactactgtaccccagccagaatgaccattattaaaaattcaaataacaatagatgttggcatggacagggtgaaaaaggaacacttatacactgctggttggaatgtaaattagtataacttctatagaatacagtatggagatttgatccatgaattccactactgagtatctacccaatggaaaggaaatcaatatataaaaaagacatatttatcacagcacagttcacaattgtaatgatacggaatcaacctaaatacccatcaaccaaagagtagataaagaaaatgtggcatatgtatattgtagaatactactcagccataaaaaagaatgaaataatgtcttttgcagcaactgggatggaactggaggctattatcctaagtgaagtaattctggaatcaaaatctaaatccaacatgttctcatttacaggtggtttctaagcttatggatatgcaagggcatacagagtggtataatgtacattggagactcagaaggctggcaagcaggagagaggtgagagatgaaaaagtacctattggatatagtgtccaggtggtgggtgcactaaaattctagacttctccatggtaccgttcatccatgtaaccaaaaaatcactcatacccctaaagctactg

SEQ ID NO: 16474 - DNA, 1608 bp, Homo sapiens
  CDS (575)..(1039)
aggacccgggttgcgggagaccccaggttcggttgggattcccagccagaacggagcttaagccgggcaggcgagcgaatgacggagtagcgagctgcacggcggcgtgctgcgctgttgaggacgctgtcccgcgcgctcccaggccgccccgaggcttggggtcttcgaaggataatcggcgcccggggccgaacagcgggggcacacggggcgctgccgaagtgcaaggccacggccagagctcgagcccgacgcgctgtctggagtcgtaggttggcgccgtttggggtcggggtctgaggcttgggcgctgcctgggccgagcggagatcggggtttgcctcccgtccccgctcaggaccctgacgtggctgaagcggccccgggagcatgagcgggcagcgcgtggacgtcaaggtggtgatgctgggcaaggagtacgtgggcaagactagcctggtggagcgctacgtgcacgaccgctttctggtggggccttatcagaacgtgagtgcatccggaggggccaggcacggtgggcgggggagtggggggccggtaatctgcacctatggccccgatctcctccctctcgttgcagaccatcggggccgccttcgtggccaaggtgatgtcggtcggagaccggactgtgacattaggtatttgggacacagcaggctctgagcgctatgaggccatgagtagaatctactatcggggtgccaaggctgccatcgtctgctatgacctcacagacagcagcagctttgagcgagcaaagttctgggtgaaggaactgcgcagcctagaggagggctgccaaatctacttatgtggcaccaagagtgacctgctggaagaagaccggaggcgtcgacgtgtggacttccacgacgtccaggactatgcagacagtagctgctcctcagccctttggggggtgggggtgtgtggctgtctgggtggatcaaagaaaatagggactgccttggctgccagggcaaggtgctctaggaggtcttcctggcctccttgaactgtggggtccaggagactccctgaactgctagccctcccttttgtctgtttatctaattctcaggtatgaggctttagtcacttctctttacagatatcaaagctcagctctttgaaacatccagcaagacaggccagagtgtggacgagctcttccagaaagtggcagaggattacgtcagtgtggctgccttccaggtgatgacagaggacaagggcgtggatctgggccagaagccaaacccctacttctacagctgttgtcatcactgagtcagcactcacctggcctgggggaattaaaggaattccccgtaagggctggacccagctcctttctgggcttgggtagtcaaatgtctgagctaccccaggtcctcatgtcagcagagtggcgcctgcctgtgctggcccatggaacggagacagcattgggctgactgtgggcatgaggagggataaggctgatttggaccccaggcttctgccctggacagcacttgtgtctgcagattatttaagtggcttttgatctgtaaataaaatcagtgcactgtgaatcac

SEQ ID NO: 16475 - protein, 155 aa, Homo sapiens
MAPISSLSLQTIGAAFVAKVMSVGDRTVTLGIWDTAGSERYEAMSRIYYRGAKAAIVCYDLTDSSSFERAKFWVKELRSLEEGCQIYLCGTKSDLLEEDRRRRRVDFHDVQDYADSSCSSALWGVGVCGCLGGSKKIGTALAARARCSRRSSWPP

SEQ ID NO: 16476 - DNA, 1728 bp, Homo sapiens
  CDS (153)..(671)
agaagggagcgagagcccctgagcgcggcggcagcggcggcctggcccttccagagggccagagccagggacatgcgggcgcccgggactccgcgttccgcgcggcccggcgcctgagcgcctccgttccccgtcccggagctgccggcggcatgatccgacacgccggggcgcccgcgcgcggggaccccacgggtccggttccagttgttggcaaaggagaggaagaggaagaggaagatggcatgcggctttgtctgccagccaacccgaaaaactgccttcctcaccgccggggcatcagcatcctggagaagctcatcaaaacatgcccggtgtggctgcagctgagtctgggccaggcagaggtggccaggatcctgcaccgggtggtggctgggatgttcctggttcgccgggacagcagctcgaagcagctggtgctctgtgtccactttccttctctgaacgaaagctcggccgaggtgctcgaatacaccattaaggaagaaaagtcgatattgtacctggaaggctcggctcttgtgtttgaggacatcttcagattgattgcgttctactgtgtcagtagagacttactgcccttcacactgcggctaccccaggccatccttgaggccagcagcttcacgggccattcacacaggcggtgaaagtcagcctgaggatttagcccagaggtgatggagcccctgaagggtgtgtgtggagggcagaggagaggggacaagacagggggacggctcaggaggctgcggcggggcaaggccagtacccggtggccttcagcagagcaaaggaggtggagcacaagctggacctctgctggaaacagcaggaatgacttcagccttggggcagctggctggcaggatgcagacacaccatgggtcctgttaaggccaaatctgcttcgggcaccaagatgtcaagaggtgctagacttggagtttgtcctggcaggtgatatggcaaagtgtcaccagagcctgccgtgggcacgaatgtgtggggcagagaggtttccaggcagtgagaggtggcagctgagctgagccaccaaggatgggaagggctggagctacagagatggagagaagggcccttcagcctttgggaacagggtcagcatccacggcaatggtgccattccagacactgcatgtgtcagcctcatgactacaaaccagaccagatgggcttggctattgtcatgcccaagaagccacagctcagagaggtttggtgacctggccatgaggacagagctggtagtagagctgggcttcagacccaggcagcccagccctttccatgagctgagtctctgcctctgcctctcccttccaagctctgcccatgtgtgtggccagtcagatggtgaaggaacttaaaccacataaaaaggccagacagggcggggtgtggtggctcacacctgtaatcccagcactttgggaggccgaggagggcagatcacttgagatcaggagttcaagaccagcctggccaacatggtgaaacccccctctctacaaacaatacaaaaattagccaggcatggtggtgggtacctgtaatcccagctactcaggaggctgaggcaggagaattgcttgaaacccgggaagtggaggttgcagtgagccaagatcacactactgcactccagcctgggcaacagaacaagattctgtctcaaaaaac

SEQ ID NO: 16477 - protein, 173 aa, Homo sapiens
MIRHAGAPARGDPTGPVPVVGKGEEEEEEDGMRLCLPANPKNCLPHRRGISILEKLIKTCPVWLQLSLGQAEVARILHRVVAGMFLVRRDSSSKQLVLCVHFPSLNESSAEVLEYTIKEEKSILYLEGSALVFEDIFRLIAFYCVSRDLLPFTLRLPQAILEASSFTGHSHRR

SEQ ID NO: 16478 - DNA, 2090 bp, Homo sapiens
gtttattaaagtatgtaattcctaaaatgcttattgaagaccttaaatctgattgttatttaaatttgtggttcagcgatattgtgttaaccactgatttcagagtagaaaaaatgcttattatttttaactttttaaagaaatggggaatgttttgtaacagtactcaaatagcacagaatatttttcaacattaaaaacatttgattgaatcctaatttagacaagccataacttgggaggatggtaaaccatcctctgaaagatttaactctttattggtttggaagtagtaaagtatacccctaaatgcctaggattagagaaataattttattcattgactctttatggaaaccaaatggtatctaactctgttccttctcagccaccttgaaggtgactattagtgtggtctttaagttgcttttagaaatcctgaagaattcagtcttcgtctatcatattcttcagatttccttttttgtttttgcagttctgaggccaaaagatgaagtttctttgccttgcctgatgtggcatcaactttctaatttttaaacatgttaccagcgcatgtctactgatcgtgtactgcaggacctgggtagacagaaacatacccacctctgccctcctcaccttccagtcagggcagcaggggatcctcatatcctctgaggcaaagcaaatggcttcactttatgtggaaatgaatttgccagtgagctttcgtgcttgtttgacaataaggcatcactgatgtgaactaatttggtggcaggtctcctctgaaggaaaccagaaattgtaacagcatggccaaggggtgtttctagggacccagtcccacaggtgcctaagggaagtgttctcctcccctttcaggaactccctgctgtgtggtgagaggctctggtggccttgcatggaagagcctgttgccccccagcttactccactgtggcgcacttggttggggttctttgggtaaagctaaatcatagatggtctttaaagaaatcgctttgcaagtgttagtccttcctgattggaagccttctccattgagccttattggaattagaaatttgcagtggttctcagtttctaggcttatcataatataagatataaaccaaaaagtatctgagacaggtctcaatcaatttagagagtttattttgccagggctaaggacacacctatgacacagcatcaggtggtcctgacaacctgtgcccaaagtggtcaagagtacactttgcttttgtacattttaaggagacataatacatcaatcaatacatgtaagatttacactggtttgatctggacaggtgagacagctcaaaggggctggggcttccaggtcataggtagatttaaacatattctgattagcagttggttgaaagagttattatctatagaaagcaatgtctgggttactataaggggttgtggagacctaggttttatcatgtagatgagcctctaagtagctggcttcagagagaagagactaaacgtttcttaccagacttaaagtgtgtgttcatgttcatgctggagggtagagtgaggaatgtctgacccccactgctcatcatggccagcaccagcctttcaggttaaattttagagtgccctggccgaaggggaggtccattcagatggttgtgggaggacttcaaattttatatttggtttaaaaaggagaaacagggctcagctggcatctgtactgattgatgtgcttacattcttcatgtggatgtggccagtgtcagcctggagaaaaaagaacgcttttagatttcaaaggagcagttgggtaataatgaactttaccatatttgcaaacctatctggtatctctcctcccttttcctttgaccacctattctgtctagggttaagaaaataacaaagccaattctggtttgtttttgtttttgtttttgttttttgagatggagtcttgctctctgtcccctaggctgcagtgcagtggcgcgattgcagtgaaccaagatcatgtcactgattgcattccagcctgggtgacagagctagactctgtctcc

SEQ ID NO: 16479 - DNA, 1832 bp, Homo sapiens
  CDS (247)..(654)
tctaagtcattaaggaattgccacactgtcttccataatgattgaactaatttatactcttgccaacagtgtaaaagtattcctttttctccacaatctcgccagcatctgttattttttgactttttagtagtagccattctagctggtgttagatgatatctcactgtggttttgatttgcatttctctaattatgaagttaataatttcataattttattaaatttgatgaaatcaactcaagatggattacagacttaaatgtaaaacccaaaacctaaaaatcctagaagaaaacctaggcagtactatgcaggacataggcattggcaaagatttcatgatgaagacaccaaaagcaattgcaacaaaagcaaacatggacaaatgggatctaatcatactaaagagcttctgcacagccaaagaaactaacagagcaaacagacaacctacagaatgggagaaaatttttgcaatctgtgcatctgagaaaggtctaaaatccagcatctataaggaacttaacaaatttaaaagaaaaaaaaaacaacccattaaaaggtgggcaaaggacatgaacagacacttctcaaaagaagacatacatggagccaacgaacatataattctttatatacactgttggatatgattttttaagtattttgtcagagggtttttgcatttatgttcatgacaaataccagtctagttttcttgtaatggcattgtctggttatggtattatggtaatgctggaatcactaaatgagttaggaagtattctctctaattctgtcttctgaaagacatggtagaaaattggcataatttcctccttaaatgtttggtagaatcgccagtgaactcatctaggtctgatgctttctgttttggaagattattaattgttgtttcaatttctttaatagatattgggctctatattatctgtttcttcttgtatgagttttagcagactgcatttcaaggaattgatttatttcgtctaggttaacggatctatgggcatgaagttttgtatagtattattttattgttcttttaatatccatgggctctgcagtgcagtgatgcccccctttttcttttctgatattattaatttgtatcgcttttttttcttagttagcctacctaaagacttatactttttattgatcttctttaaagaaccagattttgattcttttgagttctgtattgatttcttgttttcaatttcacgggtttctgctccaatttctattatttctttttctgctaactttgaatttaatttacttttctttttctagcttcttaatctggcagcttagataattgattttagatctctcttctaatatatctatttaacgctatacatttttctatcagcactacttttgctgcatctcacagattttgataggtagtattttcagttttatttagcttaaaatattcttttttatttctctcgatatttgttctttgacctatgtattatttagaaatgtattgttgactatccaaatattttgggatttttcagctctttttctgtcatcggtttctagtttaattccactgcggcctgagggcatacattgtatgatttctattattttaaacttattaaggtatgttttatggcccagaatgcgatctaccttggtatatgttcaggacaatgttttgaaaaatactactagatagttctcttcataatgatttacctacttgtcttagtctgtttgctgttacttacaacagaatacctgaaatggggtgatttatttaaaaaataaatttatttcttac

SEQ ID NO: 16480 - protein, 136 aa, Homo sapiens
MDYRLKCKTQNLKILEENLGSTMQDIGIGKDFMMKTPKAIATKANMDKWDLIILKSFCTAKETNRANRQPTEWEKIFAICASEKGLKSSIYKELNKFKRKKKQPIKRWAKDMNRHFSKEDIHGANEHIILYIHCWI

SEQ ID NO: 16481 - DNA, 2107 bp, Homo sapiens
  CDS (124)..(1164)
gaaaagcacgaactccgagccatccgcctctcacgagaggactgtggctgtgactgccgagtgttctgtgatccagacacgtgcacctgcagcctggctggcattaagtgccaggtggatcgtatgtctttcccatgcggctgcactaaagaaggatgtagtaacacagcaggtagaattgaatttaatcctatccgtgttcggactcactttttgcacacaataatgaaacttgaactggagaaaaaccgagagcagcaaatccccacgctgaatggctgccacagtgagataagtgctcacagtagttctatgggccctgtcgctcactccgtagaatattcaatcgcagacagttttgagattgaaactgagccccaggctgcagtgctgcacctgcagtcggctgaagaattagattgccaaggagaggaggaggaagaagaggaggatgggagcagcttttgcagcggagtcacagattctagcacgcaaagcttggcacctagtgagtcagacgaggaggaggaggaagaagaagaggaagaggaggaggaggatgacgatgatgacaaaggagatggcttcgtggaaggtttgggcacccatgccgaagttgtccctcttccttcagttctttgttattctgatggcaccgccgttcacgaaagccatgcaaagaatgcttctttttatgccaactcttcaactctgtattaccaaatagatagccacattccaggaactccaaatcagatctctgagaactattctgaaagagacactgtcaaaaatggtaccctttcgctggtgccttacactatgaccccggagcaattcgttgactatgcccgacaagcagaagaggcctatggtgcctcccactacccagctgccaacccctctgtaatcgtttgctgctcctcttccgaaaatgatagcggtgtgccctgcaatagtttatatcctgaacacaggtccaatcaccctcaagtggaatttcactcatacttgaaaggcccctcccaagaagggtttgtctctgcattgaatggtgacagtcacatttcagagcatcctgctgaaaattctttgagccttgcagaaaagagcatattgcatgaagagtgcatcaaatcacccgtggttgagacagtccctgtttagtagcttaaattattctaggaccaactcttctcttatttaaggcactgtatttaattggatttcctgggctcatcattgtttaaactgaagaccaagaaaacttggacggtggttaatcttccagactgtattttgttttttcctttctagccacatgactgtggcattgcacaaatacagtctctgtagggattttaaaagatttcagactgttttgatagaaaaagctaaattttaaaatgcatatctcacagttgcctacctgtcaaactgtgtgaaacctgccaatctgtgtagatcagagctccaaattttggattatcgggcctgtgcaagattgttaactaaggctgggaaataataagatttagagtcctaattttcaatatatctgaagataatgatgactttttaatgtaaaagtaattattgtaagaaaaagatttaattgttccatgtgtattttatttatggtagtttagaagacatgttttgatgaaaatgaacagcctcatgttcattcaagctgaagatgcatagctagttccacagagcatgcccacatggattgcatctggaatccattcacatttttatgatcatgactgatcagatttgcaaattcttaagggtgaaataggcctatttttgctattttggacaaataaatgattctatatgtgcaggtccttacacagttttctctaaagttaagagttaggacaatcctctggggagagtctagttcactgccctccctcagctgactccagagatggaggtagaaggaattgcctttcttttttaaacagcatcatcttgattcttagcttggacagcacctttaagctctaccccctacatcaaaatgtactttagtgccccttcacggtacctcgtgtggggtggggactgagaactctttgagatgaaaaaattt

SEQ ID NO: 16482 - protein, 347 aa, Homo sapiens
MSFPCGCTKEGCSNTAGRIEFNPIRVRTHFLHTIMKLELEKNREQQIPTLNGCHSEISAHSSSMGPVAHSVEYSIADSFEIETEPQAAVLHLQSAEELDCQGEEEEEEEDGSSFCSGVTDSSTQSLAPSESDEEEEEEEEEEEEEDDDDDKGDGFVEGLGTHAEVVPLPSVLCYSDGTAVHESHAKNASFYANSSTLYYQIDSHIPGTPNQISENYSERDTVKNGTLSLVPYTMTPEQFVDYARQAEEAYGASHYPAANPSVIVCCSSSENDSGVPCNSLYPEHRSNHPQVEFHSYLKGPSQEGFVSALNGDSHISEHPAENSLSLAEKSILHEECIKSPVVETVPV

SEQ ID NO: 16483 - DNA, 2030 bp, Homo sapiens
atcctatgtactcaagaatgcaaactgtaaatcaatacctatgacttaaaggtgacatttcaacaattgtacatcctggagcctctcaggatctcaggatcattttgttcctgtcaaatatctaactttttaaataatttatgagcatttaactccacttcttacaattccaggatgaactttcttcattttagatgtgtatgttgtcattcaaagagccagttatttattcatcaaatattattgaacaagtactatgtgccaggcactaactatattgtgcagtgtggatataatagtggaaaaggcagtcacaacctagacctgaagcttacatggggaggaagagagaataaacatcaacttaggggttgtaccgatagttgttctttttttttgtttgtctgagacggggtttcactctgtcacccagattgtagtgcagtggtgtgatctctgctcactgcaacctctgcttcttgggctcgagtgattctccagcctcagcctcccaagtagctgggactacaggtgtgtgccaccaacgctcagctaatttttgtagagacagggttttaccatgttgcccaggctggtctcgaactcctgagctcaaagcaatcggtccgcctcagcctcgcaaagtgccgggattacaggtgtgagcctgtgccagacctaattgttaaattgtaattgtaatgattgttaaaaataaaaagaattggacagcgtaggcttcttatgtgaacatttaccaagaaggcatgatcttgtcttagatgaatggagtcagaatagagatcaaggagtgcttcctggaggaagaagcttttgagttgggctttaagtgtgaacaaatgtatttggagggtgctaatatttaagatgccatgagaaaaccccacattgaggaaagcagagatacagtctgatgaaactagcaaggtctgtaataagcagggctgtgttaagaattttggcttgatcaataaataaaatcagtggggaagctattaaggaatttgcactatgcagggatatgaccgtctggttacagtgtgtagaatagacaggaaagtatgggtacaagcagtggggagaccagattgaagacaataataataaacaagtgttcctattaatttccaaggagagacgtgctctgaagtccatagactatcaagatagagctaatttgggacttagatagtcctactgtgaagaattagcaaatacatggcactgctttgtggacaaaaatcagaaatctaacaggtttagcagaaaaagtgaaagaagagtgagaagaagaggatataagaataaacagacccaagaagatggcctcagaagacaaacacctgggataagctatgtgccagtttttctttttaatttttatttagatttagcaattaataagagctcattctgcctcaaaagtgcaccaagggctttatatttatcacagaactggaggtttagggaggtagagtaacttactcagggttacaaaatctgtaggtggcagagacaaaacttgaaccaagggctttctagtgtgaaatgttgactcctcacactacatgatggtcctctttaatggttacctcctgcccttggagttctccattactccaagcccattatgtttggaacgattctgagttcttctatacttcaccatggatacatgaaccttagccctaatggagccttagaaattgaccgggcgcggtggctcacgcctgtaatcccagcactttgggaggccgaggcgggcggatcacttgaggtcaggagatcgagatcatcctggctaatgcagtgaaaccccttctctgctaaaaatacaaaaaattagccaggtgtggtggtgggcgcctgtagtcccagctactcaggaggctgaggcaggagaatggcataaacccggaaggccgagcttgcagtgagccgagatccagccaacagtgcgagactccatctcaaaaaaaaaaagaaaaagaaaaagaaaaaaagaaaag

SEQ ID NO: 16484 - DNA, 2773 bp, Homo sapiens
  CDS (92)..(2098)
tttcctgaggaggactgccggtcgttcggacgtcttgcctgtcgctggaggagaggtccgggctctccaggaaggtggctgcggcgacaaaatgaagatattcgtgggcaacgtcgacggggcggatacgactccggaggagctggcagccctctttgcgccctacggcacggtcatgagctgcgccgtcatgaaacagttcgccttcgtgcacatgcgcgagaacgcgggcgcgctgcgcgccatcgaagccctgcacggccacgagctgcggccggggcgcgcgctcgtggtggagatgtcgcgcccaaggcctcttaatacttggaagattttcgtgggcaatgtgtcggctgcatgcacgagccaggaactgcgcagcctcttcgagcgccgcggacgcgtcatcgagtgtgacgtggtgaaagactacgcgtttgttcacatggagaaggaagcagatgccaaagccgcaatcgcgcagctcaacggcaaagaagtgaagggcaagcgcatcaacgtggaactctccaccaagggtcagaagaaggggcctggcctggctgtccagtctggggacaagaccaagaaaccaggggctggggatacggccttccctggaactggtggcttctctgccaccttcgactaccagcaggcttttggcaacagcactggtggctttgatgggcaagcccgtcagcccacaccacccttctttggtcgcgaccgcagccctctgcgccgttcacctccccgagcctcttatgtggctcctctgacggcccagccagctacctaccgggcccagccgtccgtgtcactgggagctgcctacagggcccagccttctgcctctttgggtgttggctatcggactcagcccatgacagcccaggcagcctcttaccgcgctcagccctctgtctcccttggggcaccatacaggggccagctggctagtcctagctcccagtctgctgcagcttcttcactcggcccatatggtggagcccagccctcagcctcggccctttcctcctatgggggtcaggcagctgcagcttcttcgctcaactcctatggggctcagggttcctcccttgcctcctatggtaaccagccatcctcttacggcgcccaggctgcctcttcctatggggttcgtgcagctgcttcttcctacaacacccagggagcagcttcctccttaggctcctacggggctcaggcagcctcctatggggcccagtctgcagcctcctcactagcttatggagcccaggcagcttcatataatgcccagccctcggcctcttacaatgcccagtctgccccatatgctgcacagcaggctgcttcctactcttcccaacctgctgcctatgtggcacagccagccacagctgctgcctatgccagccagccagcagcctacgccgcacaagccactaccccaatggctggctcctatggggcccagccggttgtgcagacccagctgaatagttacggggcccaagcatcaatgggcctttcaggctcctatggggctcagtcggctgctgcggccactggctcctatggtgccgcagcagcctacggggcccaaccttctgccaccctggcagctccttaccgcactcagtcatcagcctcattggctgcttcctatgctgcccagcagcatccccaggctgctgcctcctaccgcggccagccaggcaatgcctacgatggggcaggtcagccgtctgcagcctacctgtccatgtcccagggggccgttgccaacgccaacagcaccccgccgccctatgagcgtacccgcctctccccaccccgggccagctacgacgatccctacaaaaaggctgtcgccatgtcgaaaaggtatggttccgaccggcgtttagccgagctctctgattaccgccgtttatcagagtcgcagctttcgttccgccgctcgccgacaaagtcctcgctggattaccgtcgcctgcccgatgcccattccgattacgcacgctattcgggctcctataatgattacctgcgggcggctcagatgcactctggctaccagcgccgcatgtagggccatcctgggatggggcaccacagggagggagggagaaaagaggtgggtagggttacagatccaggttataactactctggcccatacctttcctggttgtggtttttcatgccctctaccatgtgggccttccccaggagatgatcctgttaagtgttcggcagtaacctactttgttccttcgcctcagcagcaaatcttgctactggctctagatctgcggtttcccctctaccctgcctcccgtctccccagaatgggaatttcttttatgtttttatttttttcctggctcccttttatttttgtgcgcgatatttaaggtcgtctggatggggaagcaacctgcagctgaggtcgccggcgcctttttctttttagatgggaaggaggccaggaaagggtcagcttaaccatttcctatgtgccaagctgtgccagcagtccagggtaccctgactgtccctctgtagactgttgagactgagttcctgttgggacagtcagttggtatgtatccaagtccctgctgaccactaatgttctagctgatggtgagcggcacagtcccacttccccatctccccaagtaggtggtgttagaaaaccttaattttttttcccttttgtatggactacaaataaaacttggggcaatttgcagtttgg

SEQ ID NO: 16485 - protein, 669 aa, Homo sapiens
MKIFVGNVDGADTTPEELAALFAPYGTVMSCAVMKQFAFVHMRENAGALRAIEALHGHELRPGRALVVEMSRPRPLNTWKIFVGNVSAACTSQELRSLFERRGRVIECDVVKDYAFVHMEKEADAKAAIAQLNGKEVKGKRINVELSTKGQKKGPGLAVQSGDKTKKPGAGDTAFPGTGGFSATFDYQQAFGNSTGGFDGQARQPTPPFFGRDRSPLRRSPPRASYVAPLTAQPATYRAQPSVSLGAAYRAQPSASLGVGYRTQPMTAQAASYRAQPSVSLGAPYRGQLASPSSQSAAASSLGPYGGAQPSASALSSYGGQAAAASSLNSYGAQGSSLASYGNQPSSYGAQAASSYGVRAAASSYNTQGAASSLGSYGAQAASYGAQSAASSLAYGAQAASYNAQPSASYNAQSAPYAAQQAASYSSQPAAYVAQPATAAAYASQPAAYAAQATTPMAGSYGAQPVVQTQLNSYGAQASMGLSGSYGAQSAAAATGSYGAAAAYGAQPSATLAAPYRTQSSASLAASYAAQQHPQAAASYRGQPGNAYDGAGQPSAAYLSMSQGAVANANSTPPPYERTRLSPPRASYDDPYKKAVAMSKRYGSDRRLAELSDYRRLSESQLSFRRSPTKSSLDYRRLPDAHSDYARYSGSYNDYLRAAQMHSGYQRRM

SEQ ID NO: 16486 - DNA, 1524 bp, Homo sapiens
gtattctttttcttagtgtgagctctaaaatcaatgttcttgaaaaagaaattattttgcagaagttggggaatcatgtttgttgaatatgtataaaatagaaacataggctgggcgcggtggctcacacctgtaatccctacactttgggaggctgaggcaggtggatcacctgaggtccagagtttgagaccagtctggccaacatgatgaaaccccatctctgctagaaatacaaaacattggccgggagtggtggctcatgcctgtaatcccagcactttgggatgctgaggcgggtggatcacctgaggtcaggagtttgcgaccagcctggccaacatgatgaaaccctgtctctactaaaaatacaaaaaaattggctgggtgtggtggcccacacctgtaatcccagcactttgggaggtcgaggcgggtggatcacctgaggtccgaagttcgaggccagcctggccaacaggatgaaaccctgtctctattaaaaatacagaaaattggccgggtgcggtggctcacccctgtagtcccagtactttgggaggctgaggcgggtggagcacctgaggtcaggaattcgagatcagcctggccaacatggtgaaaccccatctctactgaaaaacacacacaaaaaaattagctgggcatggtggcacatgcctgtaatcccagctactcgggaggctgaggcaggagaatcatttgaacctgggaggcggggcttgcagtgagccgagattgcacccctgcactccagcctgggccacagagcaagactctgtctcaagaaaaacaaaaaaaaaagataaatggacaaaagacatgaacaaacagcttttataggatagtatggctaacaaacttttagaaaagtgtttagtctcactagtaagtaacaaaatattggggcagggcacagtggctcatgcgtataatcctagaactttggaaggccaaagctggtggattgcttgagcccaggagtttgagaccagcccaggcaacattgggagaccctgcctctacaaatatacaaaaaaattactgggcatggtgacacacacctgtggtcccagctgttctgaaggctgaggtgggaggatcgcttgagaccaggagaggtcaaggctgcagtgatctgtgatcacaccactgcactccagcctgggcaacagagcaaaaccctgcctttaaaaaaacaaaaaacaaaaaaggccgggctcagtggctcatgcctataatactttgggaggccgaggcaggtggatcaattgaggtcaggtgttcgagaccagccaggccaacttggtgaaaccccgtctctactaaaaatacaaaaaaaaaaaaaaaaaaaattagccagatgtggtggtgcacatttgtagtcccagctgctcaggaggctgaggcaggataatcgcttgaacctgggaggcagaggttgcagtgagccaagatcgcaccactgcactccagcctgggtgtcgagtgaaactcattctc

SEQ ID NO: 16487 - DNA, 2101 bp, Homo sapiens
  CDS (395)..(775)
atttgaggctggatgcagtggctcacgcctacactctgggaggtagaggtgggaggactgattgaggccaggagttggagaccagcctgggcaacacagtgagaaccctctctacaaaaaatacaaaaattagccaagtgaggtggtatatgcctgtagtcccagctactcaggaggttgaagtgggaggatctctcgggccagggaggttgaggctgcagtgagctatgatcacaccactgtactccagcctgggcaacagagcaagaccctgtctctcaaaaagagagaaaaagaaagaaaacatttgagctccatagattgacattctgatttgaacagtttcccatagagggagaattgcggcgaaagaggcaaggcctgcccacaatgcatggtctgggacttagctgatgaagtgctctgcaccacccagcttcgaggagatggggactggggtttccccttgcttgacatcttaactacttcactgcaggaaaggggaggagggacaagaggaggaccaattccccaagggacacggagacccacattaggttttggaacccacgcctggtactatctgaatttaaaagccttgcttgactcaggcggggctgatcaaaggccatttgctgttttagagtgttcctatgtgtgcttggcagacagagttgtctttttattgcttccattcccactaagacctccatccccccactgcccccccaaccccttggtgagcttggtgagatgtgttttttttttctttttttaattttaagttccaggatacatgtgcaggatgtgcaggtttgttacaaggtaaatatgtgccatggtggtttgctgcacctatcaacccatcacctaggtattaagccctgcatgcattagctgtttatcatgatgctgtccctcctgatgagatggttttaagttggcaccagcacctgtttctcatgccttgcgtatgcagcaggaactgtgaactagggacaggttcatgccctttggccactgcagacgtggagctgtggacgccagtacttgtgtggagagtcggtgtctgttggctgtatctcagctttcttttcagggcagacctgatacaggtgttctaggtgggaaaagccttagcacttgttgtgaactattatattgttactctctggaagggaaggtggaaaggggaatctatgccagtgagcacaacacaggccgcatatggacacacatgaggtcgctcggcatgctcttaggcccagaggagacagaatcagatactagcctatcctctggctgctcccaggctagcagggaggtaggtgtctaaaccaggatgtgagctagaggggactatagccgtgcacaggaggggcacagaggacggagcaagcagggcaggcttcacggaggagggcttgtgagctgaatcttgagagagaggagatcctccaagttgagggaactgtgggagcagttagacagcttggattttggggggtgtagcacattgctccttatgggctggggtgtaatgtgcagaggagggcagagggaagattgatttgctcattatgcaacaaatgtctggagctccagtcctgaaccaggcccaagctggggaatagcaactcagtccctgcccttgtggagtctgtggctggcaggggcatgttcattaaacaacttattgcatgattcactacttttctttttctttctttttttctttttttttgtgagacaggatcttgctctgtctcccaggctggagtgcagtggcacaatcaaagctcactgcagccttgaattcctgggctcgagcggttctcctgcgtcagcctcccaagtagctgggaccgcaggcacacatcactgtgcctggctagttttttaaattttttgtggaggtgggtatctcactttgttgcccaggctggttgaactcccgtgagctcaagtgatcctcttgccttggcctcccaaagtattgggactacaggcgtgagccacagtgcctggcctgattcatgattgaagtaccattaccataaatgctatacatccatgcattggatgttaaagggatcataac

SEQ ID NO: 16488 - protein, 127 aa, Homo sapiens [sequence omitted]

SEQ ID NO: 16489 - DNA, 1839 bp, Homo sapiens
gctatcctctgaaccaatttccttcggtttaatgtacctgtatcttggggtttttttccacttaatttatcctggagctctttccataacaacacttggaaagcactctcatccttttttcactgctgaacagaattccactgtgtggatggaacatactctatttcaccagtcccctgtaaccagtcacttggtttgtttccaatcttttgctttttcagagtaataaccttgtatgtctatcattttgtatgcatacaggtttatatgtaggaaaaattcctagagtaggattgctggaccaatggataaaagtatattgtggacagacaatgccaaattgcctttcagagactgtggccctgtgcaccccatcaggcatgtgtgactaccaaagctcctgtcagctgttttattttatctcctttccagtctcaggctcaatgcagaactttgaggtaagcttttctaaaatgtaggctcctaaacgccacagccagctctgccacatgaaggagagctcaaatgagacagaaacagcctctgggcaggatttctatcctgcacagatatattttccacattctgggaaaccgtgaagcttccagagccacaattccccagaaacacatccccctgctggtacagccaagccccagaacaagctgtgcttgcctggcacctcaaagccaagcaccatggatgccacttgccatgggtgcctgcaatttcaaataatgagaaataagaaatttcagcttctcagtccctctagccaacatttcaggtgcatgacagcctcaggtggcaagcagctactctgccggacagggcagaagatggaacaccccatccctggggaagatcacgaggtcaggagatcaagaccatcctggctaacacagtgaaaccccgtctctactgaaaatacaaaacattagctgggtgtggtggcaggcacctgtagtcccagctactcaggaggctgaggcaggagaatggcgtgaacctgggaggtggaggttgcagtgagccaagattgcgccactgcactccagcctggcaacagagtaagactccatatcaaaaaaaagagaaaagaagaagaagaaagaaagaaagaagaagaggaagaagaagaagtggaagaagaaggaaagaggaagaggagaagcaggagaagaacaaggagaagaagaaggagagagaagaagagacaagaagaagaaggagaagaaggagagagaagagacaagagaagaaggaagaaggaggaggagaagaaggaagaagaaaagaaggagaagaaagaagaaggaagaagaaagaacaacaaaaagaaggagaagaacaaggaagaagaacaactaaggagaaggaagaaggagaagaagaaagaagaacaaaaagaaagaagaaagaaggagaaggaagaagaaggaggaggaggagaaggagaagaagaaggagaagaacaaggagaaggagagaagaagaagagacaagaagaaagaaggagaagaagaaggaagaagaagaaaaggaagaagaaaagaggaaggaggaggaagaaggagaagaaggaagaataaggaagaaggagaacaaggagaaggaagaagaaaagaaggagaaggaggaagaaggagaagaaagaggagaagaaggaagaaagaagaaaaaagaaacaatagaagaagaggaagaaagaaaagaaaaaagaaaaagagaagaaagagggaagaaagaaaagaggaagaagaataaggaagaagaagaaaaagaaaagaaaagaaggaagaagaggaagaaagaagaaggaagaagaaaggaagaact

SEQ ID NO: 16490 - DNA, 2048 bp, Homo sapiens
  CDS (112)..(1260)
aaaaaaatcaaagcccctctgagtaaggtacggcttgtagatgcaggctttgtttggactgagcctcattctaagagacttaaagttaaactgactattcagaaagaggtgatgaatggtgctatccttcaacaagtgtttgtggtggattatgttgttcagtcccaaatgtgtggagattgccatagagtagaagctaaggatttctggaaggctgtgattcaagtgaggcaaaagactttgcataaaaaaactttctactatctggaacagttaattctgaaatatggaatgcatcagaatacacttcgtatcaaagagattcatgatggtctggatttttattattcctcaaaacaacatgctcagaagatggtcgaatttcttcagtgtacagttccctgtagatacaaagcatcacaaagactgatctctcaagatatccatagtaacacatacaattacaaaagcactttttctgtggaaattgttccaatatgcaaggataatgttgtctgtctgtctccaaaactggcacaaagcctgggaaatatgaaccagatttgtgtgtgtattcgagtaaccagtgccattcacctcattgatccaaacaccctacaagtggcagatattgatgggagcactttctggagtcaccctttcaatagtttatgtcatcccaaacagctagaggagtttattgtgatggaatgcagcatagtccaagatataaaacgtgctgcaggtgctggaatgatatcaaaaaagcataccctcggggaagtctgggtacagaagacatctgaaatgaatacaggtaaacagtatttttgtcgtactcatttgggacatcttctaaatcccggagacctggtgttagggtttgatttggccaactgtaacttaaatgatgagcatgtcaacaaaatgaactcagatagagttccagatgtggtattaatcaagaagagctatgaccggaccaaacgtcagcgtcgtagaaactggaaattgaaagagcttgcaagagagagagaaaacatggatacagatgatgaaaggcaataccaagattttcttgaagatcttgaagaagatgaggcaattcgaaaaaatgtcaacatttacagagattcagccatccctgtggaaagtgacaccgatgatgaaggagcacctcgaattagtctggctgagatgcttgaagaccttcatatttcccaagatgccactggtgaagaaggtgcatcaatgctgacataatgagatgttgtagactgtttccatacatgggcttaagaagttggacagagttaccttaagtgtctctactatctttgcctccagatttcaagaggagaaatttagttttaaacctgaataaacatgtttgttttcagtgctcactcaaaccactaaaacagatggatagctttgaggttttagataaggaaagattatggagaatgtagttgttattgatttttggcaattttgcatttggaattttatcactgtgcttttttatatgaggcactgtagtattttcacatagtatagtactctggatgtaaaagctcaaaaattgtgattccttgaacgttcactaaatcttcaagcaaaaacacatttttacattatttttacgttgattattttagtgaaagaccatatgaagaagcatttttaatattaacttgttacatactttgatccactttacatcatttttatgttgttgaggtagggaaattagggttcagtttattgaacagatcaccattaaaaagaatattagaatccagcatgaagataatggctaataaaaatgaggtacatactttataaaaccattaatcagatttgaatgaggaatgcttcccacatccttgaaagaaaaactgtggcttacgttttgaagtattctgagaatgaagtattaagatccaatttctataagcaagatcagacttgttaagtatgccgcaagtaagagctaattcattcattccatgtgtgccactaaataaagagattgagcaagtgcc

SEQ ID NO: 16491 - protein, 383 aa, Homo sapiens [sequence omitted]

SEQ ID NO: 16492 - DNA, 2008 bp, Homo sapiens
  CDS (80)..(1084)
gtctgggggcactgaaggtctcttggctgaaaaattggaggctttgatcactcagcatcgagccaaacaggcagctaccatgagtgaagtggagtggagagggagaacggttccagtgaagattgacaaagtgcgcattttcttattaggactggctgataacgaagcagctattgtccaggctgaaagcgaagaaactaaggagcgcctgtttgaatcaatgctcagcgagtgtcgggacgccatccaggtggttcgggaggagctcaagccagatcagaaacagagagattatatccttgaaggagagccagggaaggtgtctaatcttcaatacttgcatagctacctgacttacatcaagctatcaacggcaatcaagcgtaatgagaacatggccaaaggtctgcagagggctctgctgcagcagcagccagaggatgacagcaagcgctcaccccggccccaggacctgatccgactctatgacatcatcttacagaatctggtggaattgctccagcttcctggtttagaggaagacaaagccttccagaaagagataggcctcaagactctggtgttcaaagcttacaggtgttttttcattgctcagtcctatgtgctggtgaagaagtggagcgaagcccttgtcctgtatgacagagtcctgaaatatgcaaatgaagtaaattctgatgctggcgccttcaagaacagcctaaaggacctgcctgatgtgcaagagctcatcactcaagtgcggtcagagaagtgctccctgcaggccgcagccatccttgatgcaaacgacgctcatcaaacagagacctcctcctcccaagtcaaggacaataagcctctggttgaacggtttgagacattctgcctggacccttcccttgtcaccaagcaagccaaccttgtgcacttcccaccaggcttccagcccattccctgcaagcctttgttctttgacctggccctcaaccatgtggctttcccaccccttgaggacaagttggaacagaagaccaagagtggcctcactggatacatcaagggcatctttggattcaggagctaaccaggctcttcctcgggggcgggggagattctgactcttaatctgtattgtgagaaaatcccagcaagttccatgatattaaatccaggtctgcattggcccggggcaagagtttaacatcttcggccctgcattcctacatcttgtgtctgtacacgttcttaagcagcgtgtcaggagagcaccctgttgtcttctggtaaatgtgtgcagggtcatcctgtctcctgtacctcctgggaagggggccgctgctgtctggtgccctgtgattcttagagggacaagtggcgttcagccacccgagattgagcaataacaggtctgtgatgcccttagatgtccggggctgcacgcgcgctacactgactggctcagcgtgtgcctaccctacgccggcaggcgcgggtaacccgttgaaccccattcgtgatggggatcggggattgcaattattccccatgaacgaggaattcccagtaagtgcgggtcataagcttgcgttgattaagtccctgccctttgtacacaccgcccgtcgctactaccgattggatggtttagtgaggccctcggatcggccccgccggggtcggcgctgtgattgattgcctttggtcagtaatgcgttcaggagtccacaccaggcacagatggggccttgaaacgctttgtcatgcttcttcagtaccatggatttgaaatgaactcatccttgctgtgagcatccaggagcccttgagaagtttatctatgactatgaaactggcaacgtcaccccagaattacggtcagccttattccccttcacctcccagtgaacgctaagaagtttcagacaagcagagagctctatttttagaagaaatatgttacactcagaaatgatgaaaccaaatcttatattaaaaggcaaagatg

SEQ ID NO: 16493 - protein, 335 aa, Homo sapiens
MSEVEWRGRTVPVKIDKVRIFLLGLADNEAAIVQAESEETKERLFESMLSECRDAIQVVREELKPDQKQRDYILEGEPGKVSNLQYLHSYLTYIKLSTAIKRNENMAKGLQRALLQQQPEDDSKRSPRPQDLIRLYDIILQNLVELLQLPGLEEDKAFQKEIGLKTLVFKAYRCFFIAQSYVLVKKWSEALVLYDRVLKYANEVNSDAGAFKNSLKDLPDVQELITQVRSEKCSLQAAAILDANDAHQTETSSSQVKDNKPLVERFETFCLDPSLVTKQANLVHFPPGFQPIPCKPLFFDLALNHVAFPPLEDKLEQKTKSGLTGYIKGIFGFRS

SEQ ID NO: 16494 - DNA, 2805 bp, Homo sapiens
  CDS (333)..(719)
gaatcttcctagttctagtggttggacaagtctttaactccatagcctagctccagctaggttcatgagctggccctactgctctctcctttccccttttcctcttatcccattgcattagtctggattcttgcttacagataaccaaaaccttagtcaatctgatttaagcaaaaaccagaattgataggctcacataactgaaattccagggtagaccctaaggccgggctggatgcagggactcagtcatctcactcgggctaggtctctctcaatgcctagtccctatttcatctgagttggcttccctctcaggtgggctttttctcatggagatcctcagcagcccatggaaggagagtctgtttttcccatcatcttgtacaagtccccaggttgagtctcattggcctgctggccccatgcccatccctgaacaatactgcaattggtcacctgcagtcacatgccctgtgactgcaggaaggtggggatgggctagttacccaaaggaaagtccaggtgctgtgcccagaagggagaatggatgtggggcagagcaaaccgtagatgtctaccttacccagccagacaagactgcatgtaagaaccaggcttacgggccagcccctctctgcaggcccacactgtacactcctgaaatgccattccttagtctggccaaccctcattcacccttccaatctcagcttatatagatggctccccatgctgcctaggaactaccccacattgcactcccatctctgcatgctccctggaggcagggaggaggttttgtccacctctatatccccagtctctggcccacatcagtgttttcagtaagtgttagtgtgttagtggcatcacttccaactgatatacctccttggtactacccttcccagacttaggaggccatctttggacaatggtgtatggtgggaaagtgctcagcaaggaggctctccttccatcctaggaccctgggccagttgtttcacctccggtcctcataccccagactgtgctgatacggttttccttcctaccccacaagataggatcaaatgagatgctgtgtggaaagccctctgacatacacagatatgaggggttgtttggattaggggtggaggcagcaggatgagcagaaaggaaactgcacagtgtccccaggaggccatggttaggttatctccaactatgagatacaggagacagaaagtatccaaccaggacaatgtgaccaaactaaagtgagaaaaatgtaggctttggggcagtgtaagtgggtatatcttctgtgaatagcaatttggcaaaatccattacatttcagagcaagcacattctttgacctgaaattccatgcccaggagtttatataagagagacagtgatgagcaaagatttatttgctgaagtgttacttaccatagcagaagattgaaaatgacccaaatgcacgtcctttggggataaataagttagagcatatctaaacaagaaaatattacgtaaaataaattggaggtctccacaaaaaaaaaaaaaaacccattttttttcagacaggatctcacaccgttgcccaggctggagggcagtgacgtgatcagagctcactgcagcttcaacaccccagggctcgagcagttgtcccacttcagcctcccaaatagctgggactacaggtctacaccaccactcccggctaattttttaatattttgtaatgacagggtctccatatgttgcccaggctggtctcgaactcctggcctcgagcagtcttcctgcctcgggctcccaacatgctggcattacaggtatgagccaccgcgcccagcccatctcacttctgaaaatgactcagtgccatgaacccttcatccctagtggcctttgggggtgggaggtcttcaaagtacagccgtctctttctacctaatgtgtgtctgcaacatcgaacttgttcatcataagtacgtattacttctgtaaccaggaaaagttacaagaagagggggccaggcacagtggctcatgcccgtaattctcacattttgggaggtcgaggcaggagtattgcttgagcccggaagttcgagaccagctttgggcaacacagtgagacctcatctctaaaaaaaagttcttttaattagctgggcatggtggtgtgctgcgtgcctgtggtcccagctacttggaaggctaaggtaggaggaggattcctttagcctggaggtcaaggctgcagtgagccatgttcatgacactgcactccagcctgggtgatagagtgagaacttgtctcaaaggaaagaaaaaaaaaataagaaaatgttgggttctcagcacttccagcccacccccatccatatacattccagcacattgttggggccatttgcaagctctgagatgagattctgcacaagtcagcagtgcagagactcccagggaaggcctgaggccgccaagagcaactctgcagggtctgctccaagaggcagaggtgggccccaccgtccttggcaaaatggagattggtctgagggttccatgaggcaggcttgcaggagcaagggagtgatagaaagccatgtgaggggacgagagggaggacaccctcccctgcagaagtcaggaaggtctttgagcttgttctgagaggaaaacccattctctgggtagaggaatgaagactcagaggagactggggttcgctttgtgtgatactgatatggttactgaaaggctagcccagtcccaggctacgtgaacagactt

SEQ ID NO: 16495 - protein, 129 aa, Homo sapiens
MEILSSPWKESLFFPSSCTSPQVESHWPAGPMPIPEQYCNWSPAVTCPVTAGRWGWASYPKESPGAVPRRENGCGAEQTVDVYLTQPDKTACKNQAYGPAPLCRPTLYTPEMPFLSLANPHSPFQSQLI

SEQ ID NO: 16496 - DNA, 1670 bp, Homo sapiens
attgtgagcacgcacaaaatagtttttgcatatccctgaatgtgttgtagaacaggaatattctctaaaaatctcagcaggactttgattggatgcacacatgcattgtccagctctaacattggaatgttctgttatttttttatggttctaatatgtcctcgtccatttgtaatgcagtgtgttgtacttttggatgataaaatgagaattaatatttttaaacactattttaccaggaatgaatgactaaacatttacatgaaggcataaacattttagtgaaaccaaacaaaatctatgaggttattccatggcaaacaaaaatcaattatacaatatatattctaatcagagcctttaaaatatttaatttttgttttatgtttacctttcagataacataggtttgagaagtgaactatgtgttcactactcatttctggactttttattataacttaatcttaacaggtggttgtcttcatctttttatgccttcattcatttatttctgatattgatgtaaaatgataactaatttgttctcttattttagggctaccagagaccaagtcattacattgcaacccaaggtaaaactttgccttgttaaatgttatagaaaaaacaaacttgcttattcatctatgtggtggtttttattattttttaaattttatcttagtaacaaaaaaatcagcccttctgattaacactgctccttactcatttgtatagtacaaatttattgtgtgtgtaaagcttatataaatttaagcttgatttacttttaattaaaagtgaaagaaaagctggtagtggttattatgatttgatccttgttacacagataggtcagagcactagtcaatagtgccagtcagaggaattactcatttttgaggaaaggaaaaagaagtctcatataagaggcctgtcttcttgcagcaagtttgttagtagtacccaagaccaatattgttataatgagctgttatactgagcaattttttgacgagtcaagactgagacaaaacaaagagatggaatttagtcaagttaattcttcatggaatataataagacagtagagagatcttgttatagtggtacactggggagtaaaagtatccaaataacaacaacaaaaaaagcatctgtagttatctctctaaattgactactggccctcagaagagaaacctgtacatctttttttatataaaaggaaagtaaaacaaaagctaggtttactcttttaacaggggtcatttttctgtgttttcacatatctttggagtaattgagttcagttgtgtactctttaaagttagaaagatcgaccatagtggtgaacaatattcagttttatggtattcggtagagaacagcccagcacatgcttttgcagtttggagatattatgataagattaggatatgtccttacgtgtaaggatatgtttttattgatccctaaacatgcactatttataaatagtgggcacttatttaattggtaatatatgctgtctggttgatggtggtataagagttctattttttacacatatttgaagatgcattaaagtgacttagtgacaaatataaatacccaagaaactagtgatagtttcttctaaattgggaagtgtagagggcaaattg

SEQ ID NO: 16497 - DNA, 1647 bp, Homo sapiens
  CDS (795)..(1175)
actttacctcacttgtgaaggagaaagagccatcctctctacctttgttctaggtggatattctcttgctgtcagaacaccatccatttttgtagcccaaagaacaatgtttccatagtataaagttgaaaaaaaaaacaaactatattgaagcctctttaaagacaagataaatacagagagttatgttaggagtataacaagtaatattatgtctcaggccttctaattgaaatgctaagctaagcttacttttttttttttgtaacggagtctcgctcttgttgcccaggctagagtgcaatggcgtgatctcggctcaccccaacctctgcctcccgggttccagtgattctcccgcctcagcctcccgagtagctgggattacaggcatgcaccaccatgtcggactaattttttgtgtgttttttttttagtagagacaaggtttctccatgttggtcaggctggcctcgaactcctgacctcagatgatccacccacctcggcctcccaaagtgctaggattataggtgtgagccactgcacccggcctttttttttttctttttgagatggagtcttgctgtctcccagcctggattgccacagtgcaatctcggctcactgcaacctcctgacctcaagtgatccacctcagcctcccaaagtgctgggattacagatgtgagccaccgtacccagcctaaatgctaagcttacttttgatgtggtaaatttatatattctctatcccaaatacatagggagcaagtatgttcagatgtagttaaatgtttagtcccatacaccatcttgactattataaaaagaccttacccagtgagctaaattggctaggtcaaatgtggttaaaatttggctgttctggtttcaggcaagaaggggttaaaagtggaatgtatgttgtaatagaagttaaagttgcaactcaagaaggaaaagaaataacctgtcgaagttatctgatgacaaattacgaaagtgctcccccatccccacagtataaaaagattatttgcatgggtgcaaaagaaaatggtttgccgctggagtatcaagagaagttaaaagcaatagaaccaaatgactatacaggaaaggtctcagaagaaattgaagacatcatcaaaaagggggaaacacaaactctttagaacataacagaatatatctaagggtattctatgtgctaatataaaatatttttaacacttgagaacagggatctgggggatctccacgtttgatccattttcagcagtgctctgaaggagtatcttacttgggtgattccttgtttttagactataaaaagaaactgggataggagttagacaatttaaaaggggtgtatgagggcctgaaatatgtgacaaatgaatgtgagtaccccttctatgaacactgaaagctattctcttgaattgatcttaagtgtctccttgctctggtaaaagatagatttgtagctcacttgatgatggtgctggtgaattgctctgctctgtctgagatttttaaaaatcagcttaatgagagtaatctgcagacaattgataataacattttgaaaattggaaagatggtatactgtttttagaggaataaacgtatttgtggttt

SEQ ID NO: 16498 - protein, 127 aa, Homo sapiens
MFSPIHHLDYYKKTLPSELNWLGQMWLKFGCSGFRQEGVKSGMYVVIEVKVATQEGKEITCRSYLMTNYESAPPSPQYKKIICMGAKENGLPLEYQEKLKAIEPNDYTGKVSEEIEDIIKKGETQTL

SEQ ID NO: 16499 - DNA, 1396 bp, Homo sapiens
ctacttctaaaatttttttcatagatgggattttcctatgttgcccaggtggtctccaacacacaggctcaagccaaactcctgcctcatactcctaaagtgctgggattacagacacaaggcatgacacccaaccgaggttctccttgtagagtaaggcctgttaagtggatttatcagtctccctagttcatgccaccgaaacaaagaaacaaatttaccgtgggcctaatctgttttaaactttttcctcaatacgtagcaatggattatcaactgctcgatgcaggattttgtcactttatttcttttgtgaaaggattacatatagtgagaaagttgtcttatttgtctagctagatatacattattggcctgtgtgatatgctgtggaaaacaatcttaaacactctggataagatgagaataaatgactccactgaaatagaagtctatgccttttaaagtgaattagtacaaaaacatttgctgtggatatgatcttaaaggattgttttaaccaagtttgtttctatttcattacagagctggagctagtggaagtgagatagcacttgtgctgttggggaaaacaaaggatatgtttaatccgaattagtggattactttctagtgtatttcatagtgttagagtctaaagggtatgtgatagtagtcaggagatcaggattatgaaactggggctgccacttgtgtgaccttgtgtgtgatacttgaatgctgtaggccttcatttcaaaagcgagggggttggaatagaaacctctcagaccctaaatgtgtaagactccaattctgtggctaggcctggtaaggtaaagagtagcagaatatatcaagaactggaagggattagagagacctattatctaaattgctgtccctcctttgccccttgccttcccttttttttttttttggtgaatttcatatgtaaatttaaaaaatgcagattagttataatcacactctgtttattataaatttggtcacatctaagtgccatggtggtagttactccttccatctctacttctgcatgggaaacattttgctcctttaactttgaaaatatgagggtgtaaatatacaatactataagaatggtgcttctgccaggtgcagtggctcatcctgtaatcctagctactcgggaggctgagacaggaggatctcttgaggccaggagtccgagaccagcttgggcaacataacgagaccatgcctctaaaaaaataaaaataaaaaaattagccggccatggtgatgcacacctgtcatgccagttacttggggggctaaggtgggaggattagtgagctgtgattctgccactgcattccagcctgggtgacagagtgagaccctctctctt

SEQ ID NO: 16500 - DNA, 1932 bp, Homo sapiens
tactatttaattatgaggagagaactcagcgacactacctgggccatacagactgtgtgaaatgccttgctatacatcctgacaaaattaggattgcaactggacagatagctggcgtggataaagatggaaggcctctacaaccccacgtcagagtgtggggttctgttactctatccacactgcagattattggacttggcacttttgagcgtggagtaggatgcctggatttttcaaaagcagattcaggtgttcatttatgtgttattgatgactccaatgagcatatgcttactgtatgggactggcagaagaaagcaaaaggagcagaaataaaggaaatttttaaaaaaccgagtattgtgttttagagtatgttacttgttttgcaggtatttggaactatattggtattagaactatctattcgtaagtcgcaaaagcagatctactagccaaattcagcaaatttagtgatttgtcataatcgttaagatattaacactatagttatacaagataaaatagtcaagcagcttgaagcaatttcaatatttcagacattactatagtcctgaaatgccagagtagatggatgtgtgatctcataattaagactgaacacacttcttggttttcttctttaataaaacatgtaatttcattccatctttaaagctttagaaatctagaggaaaaattcagtaggaatacgactgatgtaactgaagggcttatgttaagttttttggtcttaattgtgtttgtaggattattttagaaaattcaatagcatttataattgctataattgcattataactctttacagtacaagggttgatctctgtgtagatcaagctgtacgttgtaagagaagaatgtaaaatgcattgaagctgggtttatatgagccagaaatggacttctccctctgacaggcatttaaaaagattcaaagtgatagaatggctttaaaaagtctgtgtaatatttgccatactcttaaataacatcacattactctccaactcctctcttaacagttttgttttgagtaagcttcaagcttttagcttattgggcagaaagatgatgtgatgtttaacttaacattttgaaagaagtagatttgattgtacttaaaaggaatataagttgtcagaaaacctcaaactttaaaaaacataaatgaagatatagattgacttccagttattcagagtaatttaacattgaaacatagcgaagttgcatgaaaatgaaatatatcaattttgattcttcatagtaaggtttaccagatgaagtcttgtggttttcctcctactggcgatttctcgatctcctttccaggactttaaatgttggtgttcttcagagttttattccacatgctccactgatactatatgctgctcccatggcctcattttctatctgctgagtcccgtatcagttatctccagcccagatctcttaacaggtttaactcatatttctagttgcatcctagacatctttatttgaatgtcctctaccacaaatgaaaatcaccatgttcaaatctgtacataatcatctttcctagcccccaaccaccagtttcatcccttagtgattgactccgcatttcacctagctacctaagctagaaacttggacatcattcatggctctttttacctcacttctcacatccaggtagtcaggaagttctctaaacaccgtgtcccaaatatctgcattatagcactttgtagtacaagcgactgcaaaacaattgaaattaacttaatctggccaggggtagtcactcacacctgtaatctcagcactttgggagaccaaagtgggtagatcattagatgtcaggagttcaagaccaccccggccaacatcgtgaagccccatctctactaaaaatac

SEQ ID NO: 16501 - DNA, 3281 bp, Homo sapiens
  CDS (421)..(795)
cagcgttcacctctcagccaagtccaatagcactcacttaggtgtgcatctgtggctttctctctgtctggtcagtgctcctttatatgtccataccccctgccagagggcagcattgagggtgtacagagcccagtgtgactctcctgcagctggggacatagaagagctctgtgacgatggcagatgtggttctccagcctcttgcctggctgccagtgggagtagcctgtctgttctggcacagggggctgttccatatggagggtcagaaactggccttcacagccacccaggcgttccttccacttctgcacgtcttcctttccccatgaagatttgggtgtaccctggttgtggtctctgaagactgggcaggcctgtactttgtgaagctttcagctgtctctggtaggcctgatgaagcctatctgcagaggttggcctgaagccataatgagcagttctgttctttttagcccttgtctagtttatggctctgttgcagacatgcctttctgtgtcttggttaaaagtactggtgtgtctttgcatttaggtgtggtctgtgagtctgggaaagcttctagaggagagccctccagggttgctctttggggtgggagtagtgggagcggaaatggaacgctgactgccctcttaaagccagaagggtacttcattcagggcaggcagttggcatgtgtaggcactcaggagtcttccttcagtttcagcggccggtgttcatcatcaggagtggcagggttggatatgggagtgagaatgtgcctctgagattgaccagtggccatagactccagcaagatgtgcatcttggtctgagaggcacccactgtaccagaaaccagacttgtatcgaccaatggcttatcagccccaggaggcttattactgccacaaatgtccctgatggtgagcagcacttggccactactgtctgatgttaaccagagttatgggggtggtttctgcaaatacacaatactgtggaggggttatgtggcttacccagaggtgcccagatagcaaatgaaggtgtaagattggaatccctgtctttctggttgacccttggcttggctaatcattcattcattcattccacacacattgatgaatgccgactctgtactgggttctgttctaggaactagacagacacatcacctatgctgctcttgtggggcttctgttccgctgggggagacagtcagtagtaagccttcaagcaaaggcatggctgctggtgtgatgagtgccatgaagacccataaggctgcgttaaaggagatgggtggtccaggaaggcctctctgaggaggtggcatttgagcactcaagtgccttacactggacttctgaccccatgagctggaacttaggatatctgatctagaagtacctctagaagtcctcttcccaataaacaagctaaggcccagtgagcttaaggtgtgaattcatggggtgattcatgggaaagatgaaattaaacccaagaaggacaagtataatagccggccactgctctgctcacaccagccttgggctccagccctctgccttttcatcccagaatgtgttttattatcttcaagactcagccctttgaaagatttagactgccaaattgcatttattaacaataataaatctattttctcatggctgggtgtggggagggggtagaaattttaaacacatttgtgacggttgatcagccctccaggtaaggcaacggctgactgcctggagctggtgtttttcctgcctaggcggagacaccgcccaattttgtaccaccagctgctgtcactgtcagagtggaatttccattggtgtttctgaaatagcagtgtttcctggaggacccccatttgtactttctggattccatctggacctggtttagggggttagatgcttttgaatgggggctggagagaccctactgatgcctctgaccagagatggtgaggcaggactcacagggcccccagggtttattttagggagagagaagcccacagttaaatcagaggtcacaaatacagcagcagaccccacctctcccaaggaccagactgagctataattggccaataatttcatctaaaagcaggaatcctacatcaatttgaaaggagcttctggctgaagtaagactttattaattagcctgttaggaaaatagtttcccagtattatgagggctggataatttcatgcccactgtttttcttgaagcttctcaaaggcagacacagccgcgtgcagcggctcacgcctacaatctcagcacgttgggaggtcgaggcaggtggatcacgaggccaggagatcgagaccatcctggccaacatggtgaaaccccatctctacaaaaatacaaaaattaattgggcgtggtggtgggcgcctgtaatcccagctactcaggaggctgaggcaggagaatcagaggttgcagtgaaccgagattgtgccactacactccagcctggccacagagcgagactcagaaaacaagggaagacactagattttcatttttgtactaaatagaaaaagtaatatctttttaaaaatgtgttttgtttgtttttaactgtttgttcatgccaatgtgccaggcaccatatttattctttaatctatacagaaatgctgctggatgaatggaattatgctcactctgccaatgagggaaccaaggctcagaaaggttaagtaaccaacctaaggtcaggtagtactgaggagctgtgcttggatacaaaaccaggtcatccaacctggaatcttagctttgacccccaaccttctcccggcaactttgatgataatatggaaataccttagactcttgacttgactttactttctcttctctgttataaaatctgctacattccttttcctgggaaagcgaaatagattatgccaaaagttctgatttttaaaaatgttttattgtgggccgggcgcagtggctcatgcctgtaatcccaggactttgggaggccgaggtgggtggatcatgaagtcaggagatcaagaccatcctggccaacacagtgaaaccccatgtctactaaaaatacaaaaattaactgggcttggtggtgcacgcctgtaatcccagctactcaggaggctgaggcgggagaatcccttgaacctgggaggcggaggttgtagtgagccgagattgtgccactgcactccagcctggcaacagagcaaggctccgtctc

SEQ ID NO: 16502 - protein, 125 aa, Homo sapiens
MKPICRGWPEAIMSSSVLFSPCLVYGSVADMPFCVLVKSTGVSLHLGVVCESGKASRGEPSRVALWGGSSGSGNGTLTALLKPEGYFIQGRQLACVGTQESSFSFSGRCSSSGVAGLDMGVRMCL

SEQ ID NO: 16503 - DNA, 1167 bp, Homo sapiens
  CDS (353)..(844)
ttgcaatggcgtggaccatggctgtgagttccagtgtgtgagcgagggcctctcctaccgctgcctgtgccccgaggggcggcaacttcaggcagatggcaagagctgcaaccggtgccgggaaggccacgtggaccttgttctgctggttgatggctccaagagcgtgcgtccacaaaacttcgagctagtgaagcgcttcgtgaaccagattgtggacttcctagatgtgtcccccgagggcacgcgggtggggctggtgcagttctcgagccgcgtgcgcaccgagttccctctgggtcgctacggcaccgcagccgaggtgaagcaggcggtcctggccgtggagtacatggaacgcggcaccatgacagggctggcgttgcggcacatggtggagcacagcttctccgaggcgcagggtgcacggccccgtgcccttaacgtgcctcgtgttggcctggtcttcacggatggccgctcccaggatgacatctcggtgtgggcagcgcgcgccaaggaggaaggcatcgtcatgtacgccgtgggcgtgggcaaggcggtggaggcggagctgcgcgagatcgcctcggagccagcggaactgcacgtgtcctatgccccggacttcggcaccatgacgcacctgctggagaacctcagaagcagcatctgtccagaggagggcatcagcgcagggacagagcttcggagcccatgcgaatgcgaaagcctcgtggagttccagggccgcacgctgggggcgctcgagagcctgacgctgaacctggcccagctgacggcgcgcctggaggatctggagaaccagctggccaaccagaagtgagggccacggacggcccagacccgggctggggcgcggcaccacggacggtgccccttgcgcgccatcggtgcgccggggccaggcagaacctgggcccgtccggcttgggctgtcggggcggaggcgctggcgggcttccggcattgagctgagttggcctcgcccggaccattaggcggactgcggcgtcagggggatagcgggtggtgagggaaggggcacgtgctagaccggcacgccctcgccgcgtgctgcgctcagttctttgttggatttcttgtttgtgttcttaaaaaaataaaaaaaactgatttccacgg

SEQ ID NO: 16504 - protein, 164 aa, Homo sapiens [sequence omitted]

SEQ ID NO: 16505 - DNA, 1505 bp, Homo sapiens
gaaatcttacaaatgtacaatttgtgacaaggctttcgtgcgtaattcactcctgtcaagacataccagaattcacactgcagagaaaccttacaagtgtaatgaatgtgggaaggcttttaatcaacaatcacacctttcacgtcatcatagaattcatactggagagaaaccttagaaatgtgaagcatgtgacaaagtttccatttggaaatcacaccttaaagacataggagaatttatactggagagaaagcttacaaatgtaaggtttctgacaagacttgggagtgattcacacctggaacaacatactggacttcacactggagagaaaccttacaagtgtaatgagtgtggcaaagcctttggcaagcagtcaacacttattcaccatcaggcaattcatggtgtagggaaacttgactaatgtaatgattgtcacaaagtcttcagtaatgctacaacgattacaaatcattggagaatccataatgaagagagatcttacaagtgtaataaatgtggcaaatttttcagagatcgttcacatattgcaggtcatcggtgaactcatactggagagaaaccttacaaatgtcatgactgtgccaaggtcttcagtcaagcttcatcctatgcaaaacataggagaatttatacaggagagaaacctcacaagtgtgatgattgtggcaaagcctttgcttcacgttcacacgtcattagacatcagagaatctatactggacagaaatcttacaaatgtcatcagtgtggcaaggtcttcagtccaagatcactccatgcagaacatcagaaaattcatttttgagataaccgttcccaatgaaatgagtatagcaaaccatcaagcattaattgacattggagtcaattcagcattgacttgagtttgtgttgacttaacattgagttcaagcctttattgacattcaagtgtttatgttaagaggatggggccaggtgtggtggctccgacctgtaatcccagcacgtcgggaggccaaggcacataggtcacttgaggtcaggagtttgaaaccagcatggccaacagatgtgagccacttttctcagcctgttttttgtttcttattttctattatttttttgagccagtactttttaaagagatagtacttttttcagttagtactttttaaaagggatatatcatagtaatttttaaaagggatatgaggccaggcacggaggctcatgcctataatcccagcactttgggaggccgaggcaggcagatcacggggtcaggagatcgagactttcctggctaacagggtgaatccctgtctctactaaaaatacaaaaaattagctgggcatggtggctggcgcctgtagtcccagctaccccagatgctgaggcaggagaatggcatgaacctgtgaggcggagcttgcagggagtcgagatcgcaccactgggctccagcctgggcgacagagtgagagtctatctc

SEQ ID NO: 16506 - DNA, 2122 bp, Homo sapiens
  CDS (347)..(988)
taaatgaaagcaacaggagctgctccggggactgcttttgccagcacccagaatcagtgctcaggctcagaaatcctggatagaaagagcattttataaaagagaatgtgtccacatcatacccagcaccaaagacccccataggtgttgctgtgggcgtctgataggccagcatgctggcctcacccccagtatctccgtgcttcagaatgagaaaaatgaaagtcgcctctcccgaaatgacatccagtctgaaaagtggtccatcagcaaacacactcaactcagccctacggatgcttttgggaccattgagttccaaggaggtggccattccaacaaagccatgtatgtgcgagtatcttttgatacaaaacctgatctcctcttacacctgatgaccaaggaatggcagttggagcttcccaagcttctcatctctgtccatgggggcctgcagaactttgaactccagccaaaactcaagcaagtctttgggaaagggctcatcaaagcagctatgacaactggagcgtggatattcactggaggggttaacacaggtgttattcgtcatgttggcgatgccttgaaggatcatgcctctaagtctcgaggaaagatatgcaccataggtattgccccctggggaattgtggaaaaccaggaggacctcattggaagagatgttgtccggccataccagaccatgtccaatcccatgagcaagctcactgttctcaacagcatgcattcccacttcattctggctgacaacgggaccactggaaaatatggagcagaggtgaaacttcgaagacaactggaaaagcatatttcactccagaagataaacacaagttttcatagttacaaaacagctcatgtggaccttcaggataaaagacaggtgaagactgccttagagcaagcagagtggcagccgggaagaggactgtttgatcatgataatctcatgcaaagtacataaaggggtatatatatgtatgtatatatgtatgtatgtttatatgtgtttatatgcatacatatacatatgtgttttatatatatatatgtatatatttttttttttttttgagacaaagcctcactctgtcactgaggctttggtgcaatggcaccctcagggctcactgcagcctcgacttcccaggctcaagtgattctcctacctcagggtcctgagtagctgggatacaggcacatgcatcaaaccccactaatttttaaaaatatttttgtagagacaggttcttgctatatttcccaggctgatcctgaattcctgggctcaaatgatcctcccgcctctgtccctcttttattctctcttcctctctttcacagatgccctctctctgctttctttcattctcttttattctctctctctctccttcctcccccataccacttccttccctcttcctggggccatgtgatctctcccctccatggtaccctctgctcctttgttttctacctgcatatggcttttttgttcattggcttaccttcctcacatggttggtctggaggaccaccactaacagaggcttcattccccaagtatgcatgccctggaagcccatctcccagttactggccttgggctcaggatctccacttcaatcccaggaaagcaaatctggctcactgcaggtctgacatccatgtaagtccagccagctttgaaaaaagtcaagcagggctgcgccttctatgcagtggatgggtctgttctctgacaggggagaggggatagggcggacaccatgagagttttcagtacacatgccacagtgacctctttggccagcttaaaggatttcccattcaatctactcatccactgcccagcttctgtcctttgtcctccgattactagatagaaaagcaaagcaagaaggcaatgccccaaaagaaggccagtcgatgggcattaatacaggattgctgtgaaaatgcctcgagcactgagaatgcacaaaatagatttgtttagctgtattgaaaacaaacagaaaaaaatacagtttgccatattaatttaatatattctgcattctcagtccctaggaaaagatacactatgcac

SEQ ID NO: 16507 - protein, 214 aa, Homo sapiens
MYVRVSFDTKPDLLLHLMTKEWQLELPKLLISVHGGLQNFELQPKLKQVFGKGLIKAAMTTGAWIFTGGVNTGVIRHVGDALKDHASKSRGKICTIGIAPWGIVENQEDLIGRDVVRPYQTMSNPMSKLTVLNSMHSHFILADNGTTGKYGAEVKLRRQLEKHISLQKINTSFHSYKTAHVDLQDKRQVKTALEQAEWQPGRGLFDHDNLMQST

SEQ ID NO: 16508 - DNA, 1672 bp, Homo sapiens
tgcccaggctggagtgcagtggcacaatcttggctcactacaacctccaccacccaggttcaagtgattctcctgcctcagcctcctgagtagctgggattacaggcttgcacctctacgcctgactaatttttgtattattagtagagacagggtttcaccatgttggccaggctggtctcaaactcatgacctcaggttatccgcccgcctcggccccccaaagtgctgggattacagacatgagccaccatgcccagcctctactagctgattttaaatcagagtaagataagtgatgcttatttatatgtaccttttctccaattccttctcactaacactgagaggaacagagaattgtcagaatagtaactattgtgataatggtatgcagcactcattcagcacttactgttacctggcactgtgtcagggactagacattattttatttatccttctagtatttcccccattttcagaagggaaccagaggcttaagattacacagctagtaggcaatagagctggaattgagcccctatctgactctagctagtgcccttaattactattgtaaatggctaggaatcgtatttgtgaggatttggtaggtttggaaaaggactttcttaatcctgatattcagaattgtcctaaaacttacataaaagcctaacctagcttttactgtattgttaggcttcagggatactatgtgacctgaaatatatacacatttttaacaagtggtccatgttttaacaggtttggccagcccttcttacaagcttcctttgtgccaaattttcattgttttttgaaatcaccaaaccatgttactaatgttgtgttttggtttgttttacagtgatccttttctgtatggctgccctaatatttccaataggattttacatcaatgaagtcggaggtcaaccttataaattacccaacaacacagtagttgggtcatcatatgtactttttgtcttatcaattttctttacaatagtaggacttctatttgctggcaaagtttgtttaccaggctgatgaatgtctaaattgcttgactcttattattttttattttattttatttttttatttttggagggtggagaggacaaaggcgaggcatctgagcaggcctctcatgggaagatgctcagatgaaactgatgctgagaaggaaaaaaaaatgctttggtttgttctcactatgcactttggatttaaaaaaaaaaaaaaaaaggagagccttttccataaccaaatacagacaatattgactaaatctcctgagcatattcaggcagtcaggtctgcactgtgatagcaacctagagaaggagaatgctttataccgaaaagcatgtggccctttgtgactctgttattccgtttttaatgtctaatgattcattagaggaaaaaaaaaagtctaagtatttatgtgtcatggtggaccagagggatgcaagagaagttcatgtggggctggcctcacctcctaagaaattagtgttcacaacttccttgtaatagtatgagcctttggcaccagaatggattgccgttgcattactgcaccaagaagccaatagatcaaaacttgtttgctaaaatgtatgtaaaaattctgaaattccctctctctgtgtac

SEQ ID NO: 16509 - DNA, 1332 bp, Homo sapiens
  CDS (95)..(1258)
cctaaatgcccatctcgttggccttggttcggctagtggtatggaggggtgctgcctagcactgacctgagagtgtgtgtgacccactgacccaatggacatcaaaggccagttctggaatgatgacgactcggagggagataatgaatcagaggaatttctctatggcgttcaggggagctgtgcagctgacctgtatcgacacccacagcttgatgcagacattgaagccgtgaaggagatctacagtgagaactctgtatccatcagagaatatggaactatcgatgacgtggacattgacctccacatcaacatcagcttcctcgatgaggaagtctctacagcctggaaggtcctccggacagaacctattgtgttgaggctgcgattttctctctcccagtacctagatggaccagaaccatccattgaggttttccagccatcaaataaggaaggatttgggctgggtcttcagttgaaaaagatcctgggtatgtttacatcccaacaatggaaacatctgagcaatgatttcttgaagacccagcaggagaagaggcacagttggttcaaggcaagtggtaccatcaagaagttccgagctggcctcagcatcttttcacccatccccaagtctcccagtttccctatcatacaggactccatgctgaaaggcaaactaggtgtaccagagcttcgggttgggcgcctcatgaaccgttccatctcctgtaccatgaagaaccccaaagtggaagtgtttggctaccctcccagcccccaggcaggtctcctgtgccctcagcacgtgggcctccctcccccagcacggacctctcctttggtcagtggtcactgcaagaacattcccactctggggtatggattcctcgttcagatcatgaagtatgcagaacagaggattccaacattgaatgagtactgtgtggtgtgtgatgagcagcatgtcttccaaaatggatctatgctgaagccagctgtctgtactcgtgaactatgcgttttctccttctacacactgggcgtcatgtctggagctgcagaggaggtggccactggagcagaggtggtggatctgctggtggccatgtgtagggcagctttagagtcccctagaaagagcatcatctttgagccttatccctctgtggtggaccccactgatcccaagactctggccttcatggtagagcttgacccaagaactactccacattcggatggcccagactgactccatcccctgactttccctttgacttcaccctgtttgtaaataaaacaataaaatggaaggtgctgtgg

SEQ ID NO: 16510 - protein, 388 aa, Homo sapiens [sequence omitted]

SEQ ID NO: 16511 - DNA, 1410 bp, Homo sapiens
acatttttctccaaattttattaatttcatagtgttttgatttgggtggcagatgacttttaagcagtgggtgtttgccggccagatctttcctggcatgcggactgtgaggcaaagcacgggtgaaggtaggcgctaaaggctttgggctaaagccagcacgcggttctgtgctataggagtctcccgtttcccgtggacaggttcagcgttccttctttcgcacaacttttttctaagtgttccagtgaccaagccagtcattcggacactgatttgcagtgcattggcagtaattcacaaattagttattatataagtctctctcatccctttcacactagattctcagacatgaatgaatttgtcgtttggaaggaaagctgggtaacgttttgggcacaggggaaggaggactccggtcttaactcccacgctaactttagctcaagtggagttttcaccgtggtcatttctacctccggagcaaggtgccagcgccagtactagagcctgcttatccacatttgccctggacaggagcaggaggaagtccacttctgtaccggcagacagagcatgtgaacacaaaacacatttctatggcatagtcaactgaacttcatttttacatttaatctaacatgttaacacgttctaacagggtttctatgagcagctgctgtaacatactcatcaactatgatagacttaacacttgttacctaatgaacaaggaggatgtgcatttcgggtttcttttgatattcgtggaggtgattgtcagtgtttaaacaggactactttctccactatgaagatgacttggaaatcgcaacatcatggtacattgctaagtccatgcttgtgtgtgtgacagtaggcttgataatttatcttaaaacacagcagcattgaaatttaggaaaagaatattaaatgcctttggaaacatgaaacaaagttaggagccagtaagaaagtgacagaagcaatgaatgtcttaatgcagtatagttaaaatggcttcccacagggtagataattatccaggatccttccttttccttcttcctccaggtttttcaggggtcacttcacatttctaaagaaagagtgaataggctgggcatggtggctcaagcctctaatctcaacgctttgggaggctgaggcaggaggatcgcttgaggccaggagtttgagaccaccttgggcaacataacgagaccccgtctctacaaaaaaaatttaaaaattagctgagcatggtggcatgtgccagtagtcccagctactcgaaaggctaagactgggggatcgcttgagccaatgagttggaggctgcagtgagctataatcacgccactgcactccagcctgggctgcagggtgaggtcctgtctctgg

SEQ ID NO: 16512 - DNA, 1212 bp, Homo sapiens
aatcttttttgcctctcaacctgtctcccaggtagtgtacctgtcaccattaataactctttagccgctccctagtgatttgacctatcagttgtcgttcacagaaaagtggtgctctggcctgctattgaagcttatgcaggttctttcagctcctcagtcaccccagcagccatatacttgtaggaagttgtgttggtgggcttcacaagcaggcagctgaacacttcgtacagtttgataaaggtggcattacattttgaacaatagatgataagactcccatttagaccgcaaaacagtgccacaggggtagacaggggtctgggggagataagatgggtggtgaggatgaccaacagcaaataaactttcctgtctctttgatgctaattatctctttgcacctaattatcatggcatcatcatcatcctctgatgtttgcaaactaagagttgatgtgtttgatcaggttagtgaatctgtcaggtatggcattctgcctgtttctgaagcttaagaatgagaagccagtagctatcatgcggaagatgtgaactgccccccagtcctcgtcctttagcagtgtgtcattcctctgtttggacatgtgctctcttgcttcctctcttcccctctctgttcctgaagtgtgctgcttccaacacttccccagattaattcctacctgcatttaggtctcaacctagccatcactttttcaggaaactgctactgctctctctatttggcattgactgtaccaactaaaatgcccatatggcagttttcatttatttcttattatgctctacaataactgcttgtttacttgtctttttctcctactggattgtaagttttttcatggatggtacatagtgttgtttgctatatccacgttctgggagtgtcatagaatctcaataaatttatttgaagagaatgagaatttattttttatgaactcactttccattgacatatcatggtcacatcaatggggagttcaggcaataaattatggcatatattgtctactgtatactgtgctggcaccaggggttcagataggaaaacatttcgattgctttttacccttttagtgagtgactaatggacatttctttgtctgaggatatatcttggcagtacaggatttcttcagacgtggctcaggaaatggccgagagtaaggtgaatcacaaggc

SEQ ID NO: 16513 - DNA, 1820 bp, Homo sapiens
gttcgcgctccttcccttcccgtggtcgagccgagtcctgacctgagggctgcatcaagatcttgtcattccacatcatggtttcctttgaggatgtggctgtacccctctcccaggaggagtgggactgtctgatccctgctcagaggggcctctacaaggatgtgatgatggggacctatgggaacctactctcattaggtaagttccctccctggggctcagctcctgggcttcctgctccttaaccttgaggatcaagcttggggctcagaggctcctcaccccctgggcccaaagaccagacattttgaccatggtaccatgcaggtctggtttgcacagagagggggacaggtggtactgggaccctccttgatttttttttttaataggcaatgtctcgctctgttgcccatcctggagtgcagtggtgagaccatagctcactgtaaccttgacgtctttggttgaagagatcctcctacctcagcctcccaagtacctgagactacaggcatgggccaccatgcctgtcttattttacttttttagagacagagcctctgtgttgcccaggttggtctcaaactcctagcctcaaggaatcctcccaccttggcctcccatgcctttccaaccctccctgatttatagaaggagaatattattcattgcacacctagtacctccctatcccctgaattaatctttctgcatcttgatgatcggtggtaggatacacagtttataaacgaacctgaggctaacaaatactgtcacttttcttaagtttacacagcctattggtggcagatctgggatatggatctgttcggtttcagagccctgctttcctttcactggaatgtgctcttcgctttagcccttttttttttttttttggtttctgctagcctttatttgagaaaatttacacaaaaatccccaatgcaacatttacaagtgaatctgtataaatcccatatgcctctttcccaaactgaaaaatggctttatgacaggggtccatgacaatggtataaaaatacttacttaaactgcatcattctcatttatattatacagaccattttggataatatgctcaaaagtggaggaaagcacataacacccctgtttttaaagattatttgctcttgtatcagtcttttgtcaaaggcaaatacttttacttcttggataaaaccaaggtataatatcaattaacttttaaaccaaaagcacaaaatgtcctagttgatagttttggcatgagtaaagggaagggacatgagagaacatcagctcctacaaagcttaagtttagggtcacacttgggaacaaaagcatcaacaaaacaaaatattctcttctcctatcttcttgacattttgtcacatcagaagaacataactaacagagtagctttcattgctcctgaaaaggggaaaggcaccagtcagaaataggaaagaaaatcttgttaggttaatggtacatgatagaatttcacattaaaaagtttaatgatggaggatgggcgtagtggcttacacatgtaatcccagcactttgggaggctgaggtcagtggatcacttgaggtcaggagttcaagaccatcccggccaacacggtgaaactccatctctaccaaaaatacaaaaaccagccaggtgtggtggcatgcacctgcactcccagccactctggaggccgaggcggaagaactacccgaacccaggaggtgaaggttgcagcaagctgagatagcaccattgcacttcagcctgggcatcgcagcaagactctgtccc

SEQ ID NO: 16514 - DNA, 1556 bp, Homo sapiens
ttattattcataagcataccttttcagttaccctcatgatttactatctgtaagagcataagcttactgtttgtgtaatatttgtccctgtactttagatgggagttgctgaggtggtataaggtttggtaactgcatccggcctctcagggaaataaccaagttgttcagattcttagctgtattatgtgaagttgtttgtcagcttcattgcttactactgtgaaataagttataaagaggaacttttaataaaaataaatggattcactcaggggaggggtattcattgttggtgaaatatgtcgaggaccagatgctttttggtctcccaaagacctatcaaactgcagatcttttggctttgtaatatattcagttccacatttattcattcaagatttttgtgtcctcattatgtgccaagtactgggttggacactacgtgacagagatgaacaaatccctaatcttgggatttcacagtggatgttggaatttagtaccgtttagcttcattaggttctgcagtagtcccaagattttccaagatcatcctgtcctccagtgttctattgattcaacttcagaatatatcccagactctgtccctctttactcctcactgctgttgccctgggtccatctgccatcatctctcacctggattatctcagtagtttcccaactggtttccttgtttccattcttgcctccttctgtctactctcaatataacagctagaacaatccttttacaatggaattcagatcatgtttacccctctgttcaaattctccagtgactttccagtttttacatgatctggctcctactacctgtctcactgtgtttcctactactctcctgctctttctcctcttaataaacactgggctcatggtgtttcctttaacatgccaggcatgcttgaccctgtcctgtctcagggccctgctgttccctctgcctggaacattcttcccatagtgtctgcatggctcactctctcactgctttggattgctgctcaaaagtcaccttatcaaaggcctttcccaaaggtttaaaaatcattctactataaagacacatgcatacatatgtttattgcagcactattcacaataacaaagacttggaaccaacccaaatgcccatcaatgatagacgggataaagaaaatatggcacataaacaccatggaatactatgcagccataaaaaagaatgagttcatgtcctttgcagggacatggatgaagctggaaaccattattctcagcaaactaacacaggaacagaaaaccaaacaccgcatgttctcactcataagtgggagttgaacaatgagaacatacgggcacagtggggggaacatcacacaccagggcctgtcggggggtgagaggcaagggaagtgatagcattaagagaaatacctaatgtagattatgggttgatgggggcagcaaaccaccatggcacatgtgtacctatgtaacaaacctgcacattctgcacatatatcccagaacttaaagtataattaaag

SEQ ID NO: 16515 - DNA, 2366 bp, Homo sapiens
atattattcagtgctaaaaagatatgagctatcaaactatgaaagggcatggaggattcaatcttaaatgcattatactaagtgaaagaagccagtctggaaaggctacatactttatgatttcaactctatgtcattgtagaaaaagcaaaactttggagacagtaaaaagatcagtggttatcagggacttcgtgggagggaaaaataggcagagcacagagcattcttagggcagtgaaattattctgtatgatttacaatggtgactatatgtcattgtacatttgtcaaggcccatagaacaggttttgaagttgatgtgatgttgacagtccccggggaggctgtgcctgcgtatagaaagcagcgtatgggaattctctgtactttccacttgattttgctctgagccggaaactgccctgaaaaataaagtctatatttaaaaaaatagtcgtagatactagacacagcatttttatcagcattttaaaatatactatatgcaaagataatattatatggtcaagaataactccttaatgtataaatttaaaagcaccatgaaatctcttaagaaacaatcagaagttttataaaattttaaaaaaggaaagtgaggaaaatgcctaaattaaacagtaaaacacacccagttattcaacaccaggtggcgactggactgggtctggatttttcttagcttgcctgactctgtgactgctgctctctgctttcttgggctccttctccctcaatcttcctgtttccagaacagatgctttttatgtcctcttgcctgtggtgacatccccggatcccttccatctgcagttttttcttacctgttaaactttatgaggaggaaaggagaaaatattgattatttacctgttttgtaataggcattataatagatgcctgttgtaatctcttttaatcctcacaataacccacatgaaggagtgttattctccccattatatatattaataactaatgtgaaagatgatataatttgttgaaggccagtgaattgtaagtgatgtagtttggatataaaccttggtttcaaaattcaagacacggtaatctgtccattctgtaagaagcaagcacataagtgctaatgatgagtgtttggtcacacacaaaaaataaagatttactaacacatttatttaagaaaactcagacttaagctacatttggttcttaagtgtcttcttcaaaaagaaaggcaatcttgggtaattcctcacctgacttttagaagtgtgctagacctctgtcttttaaaaatgttcagcctacgtttatttttattattcttgttcttcatggtatctttctttccttttctccttttttgagatccattaaggattttactgtgatttataaactttcttctggaatggtggttctccacctgaggtgattttattccacagggatcatttggcaatatctggagacatttttcattgttacagctgggagagggtgctactggcatctagagggtagagccgagggccgctgctaaacatcctaccctgcagaagacagccgcctcaacacaaaattatctagcacaaaacgccagtagctcaaggttgagaaatgctgaactagaggtgtgggcttattatcaggatagcatagcactggattcccattagaatccatagtgtcttcatagcactggattcccgttagaacatttcatgcagcctggtgcttcaattacctggcttccctttttgtagcattggcattagaatatagtttagtctgactacagaagggagaaaatacctatgtaacaaaataggtgaactgacagaattttggtaaaagagataaaacatagtagggtgataggtctacacattttaaaagccagtttgcagtcagtgttgaattttatagtttaattgtgcaatttaaactgtttgtttattctccatgagtgtttcacgttatgcctttgtgcctgcttcagtgctgggggacagaccttctaccctcctggttcatgttgcctctgtcttccattcctctttgctggaatgtgtagttgtggtaactgtgacaattcctaaggtttctgacagtttttgaacaccacaatggtgctgtaaattcctgtcttggccaggagatggacaccacattttgatggtttctcaaaccgtgtgtgaccttttcctggtttctctgttctgtcagtcatggcatggctggacagaattcagggacatctatcaggcctctcaggagcaattaaattattttcatgaaggcaatttgcagttgtaaacaatattgaagacactgtgtggcatttctcattagct

SEQ ID NO: 16516 - DNA, 1258 bp, Homo sapiens
cagtacctccgataaaaccatcctttctcgagttggaagagtttgtaagaatgatgtaggaggacaacgcagcctgataaacaagtggacgacttttcttaaggccagactgatttgctcaattcctggaagtgatggggcagatacttactttgatgagcttcgtaagttccttctttccttctttcttggaaaggccttactgcctaattaagtaacttggcatttatttccctttggctccaaatgcctgattaattttacctgagcaaaccttacaggagtggttcttactaaaattcacacgcaaagtacacggaagtgctctaggtctgggcacacgtcataatgcagtaactcttctctttgtaagagtcctcaaagtaagtgaaggaaacaaaactacagcaagacacagaaaggtgtgagctctggaactacacagttcatccattctccatgcagtctttcattttgaaaggagccaccttctataggtaggaaaatcttggattccttattccacgggtgccctctgctggcaagtacaggagatttggtgaacactgtccctccgacttgttaatgaaagaataatcagaagcagtagacagcttcttctatttcacttctcctcttcactccctcaaaaactccttccaagtcctacaatgattttttttcttttttgtttatgtataatgttagcatcattagcttttagcttcttgaacttgttcttatttttgccatgtaatgtaaaaatgataatctatatcatggaattatttcatcagtattgtgtattttccaacttaaagtatacattgagtaatcgtggatgacctctcctattgtatgtaagcacattcacatcttaatcttttaaagaatattatttgcacataacttactgtcaatacggcactaatttgggggtagctattttcttattgttaccaaataggtaaatgaggtcaggtgtggtggctcacacctgaaatcccagcactttgggaggccgaggtgtttggaccacttgaggtcaggagtttaagaccagcctggccaacatggcgaaaccctatctctactaaaaataaaaaaaaaaattagccgggcgggtggtgggcacctgtaatcctagatactagggaggctgaggcaggagaattgcttgaacccaggagggagaggttgcagtgggcagagattgtgccactgcattccagcctgggtgacacagcaagactccatc

SEQ ID NO: 16517 - DNA, 1181 bp, Homo sapiens
ttatctgtcccagggatccgttgattgccaggtatggctttgtggtaattctagcatttgcaacccagcaatttgagccttctgtctgcctaaatgatgattttacattgtaatggttgtactaaatcctttcgcttttgctccatagccgctgttgtgacaagaaaagctgtggcaaccgaaatgagactcctcagatccagtgataattgacaggtagggaccactcttctttcactggattcttattcctcattataatgaaacacctgcccttgtgttgctcatgggcgagggttaggaatgcatgtggctgaaatttgcctgttggtcatgacttacgctgtgctgagcgattttgattcctgggaaagccatatggaatgttcttttagaggcctgttccttggattgctccggtttttgtctgattcatgctcctaaaggaatatattttttctttcctgactttctgtggctcaatcctcatgctgtgccaggaagcttcagaaataaaataataatagtttgtgatttatgaaatgtggttgggtgcttataaatatttaacttttatttgaaaaatgtttgaatcattatcacttttagctacagtagttctgttggacgtaatccatctacactttaaggttttatttatgcataaaagcagtttaaagagatctgtgaaccaagattttctactgttatttgccggatttgattgcagtatgagaccatattgtaagttgattaatttatcctgcttgtcttaatttttgtgtttttaaacagatccatattactaatctgacatgaccaagtaaatcaccgtagaacaataaatctgttttagttgttcggtgtaattttgagtcagtgtgcacgcattatgcaaagtcgcattccaaatattcattttacattttaattattgaaattcattgtatggaaacatgtatgataaaccatttgttacatagcattactcattgagagttaaatggcctggaaggtttatagatactgtcaattgtcagctaggaaaagagctagcatcttgtactagctggaaaaagagtcttgccaataagactgaccgatccctcattgaggaaaccaatggttgaacacaagtccctttttgggtttcagcaatattgatttttgacaacaacaac

SEQ ID NO: 16518 - DNA, 1483 bp, Homo sapiens
aaaaaaaaaataaggcggggaactggggcgggggtgcgttgcgggaagaaaagagaaagaagtgaactggagctttcggacacagaaggacaggaagcttgagagaaaaggagaggataatgagtgaaatgcaatgcagcacctccttggaacacacagttacaattcagttcacagggcacactggctcaccgtatttttaactagtttctctccccacctcctttttaaaaattccctttttgcctctgtttccaaagaaatgccagctcaaaaccaaggcagttggaatttaacagctctaggaagctctagtgagaataaaagccaaataatatgaaccagccaaaattccttttgcaacatttttccccaaaagaaaaatacagaagatatttcttttcaagtctctaattctacctttaaaaaatatgtgtactaatgaacagtattcattttaaatctagaacctgggaatatattactataggcaagacacctttaggtaaagagctcataattttccattgaatacagtaaaattataaagaatgtaacaaaggctttggtaatttggtagaggggctttttgatgaaaaaaagacagatgatttagaaagcgaggaacacatcaagcctcagggaaagaaaatgtttgattggtattaattaaaacactgctaatatattctaataaaatcaaatttaacattctaaagtaatcctcttggtatgtcaaaggaaaagaaaagtattatcttatttgcatctctgcaatccaaatgcatttgctcattcagcagaattaatttttatcaccagcctgttttatctcctcacagatttagtcaaagttattctttcaaactagaaaggatcagggtggggaatccatggaaggtattggaagactagtgactgtatttagtaccggctttatattttacgatgttctttctcttcattcgctgtaatggggtgtggagggaaacggtgagaccgcagtgagaatgatgaacggttcatttttcctctttctctccttgtacctgccagattatttaagaatttcagctgccaaattatacgaatgccatttatttacgtgactggtgttggtctgttgattaatgtctaatgtttttctaatttcagactttaatttaccgaaaattcctaatgaaaaaggctcttaagccagaaaccaattgcctcttatcggttatccccaactgtagatcttctatgagaaagtggggaagtgaatgtaaaattttattcactacaaactgagttctttgttcctttattaagtcaaaatttctccaggaaaatttcatatttttatgaaacagcaagttttatgttctttattgttaaactctcacaactgataaaattatcccgaaatgacataaccaaaatgcttctcctctcattagtctaccatgactatgatatcttatgtaaatatgtgactaac

SEQ ID NO: 16519 - DNA, 1727 bp, Homo sapiens
atttaaatgtctgtctacccagacttactcgttcaaaaactgtctcatttacattttgtagaagtagagtaccatagtggatagaaccacaggctctggggctgtcctgtctggggttatttgctagctctaccacttaacaatcttagacaagtcacttcagtcttttttttgagacaggatcttactttgccacccaagctggagtacagtttaagagctcactgaagcctctacctcccagactcaagtgatccttctgctttagcctccctaagtattgggattataggcatgagccactgtgcccagcctcacttctctttttttttttttgggatgggcccttgcactgtcacccaggctggagtgcagtagcctgatcatggctcataacagcctcaactttctgggctcaggtgattctcctgcttcagcctcccgagtagctgggactgcaggtgcatgccacaactggctaataattttttgtagagacaaggtctcgccatgttgcccaggctggtctcgaactcctgggatcaagcaatttgcccacctctgccttccaaagtgctggtatcgcaggcctgagccaccgtgcctggccctcacttcattgttgatgccttagctccctcatttgtaaaatggggataataatagcaccaacttatgtggtggttgtgagaattcaatgatttaagctataaagctggtattcttggccttagcttatcttgaggggggtggtatttatttacaaataaaaggattatcagcacttagctcagtgtctggcacatggaagaaggcttttaatgaatgcagaatgaatgaataaatgagagcaaatggtacagaatgagcctacacaaaggagatgtttctcctctagttctaccagttggcaagatccctacagctaaaaacagttccaccatataatctccagacctggcctggccacagagtagatcagactaaaaatagagcctgctaagcttgataaaaaagactgatattggcacaccctgtccttccagactcctgcaagcctcgctacttctactctggtgtctagaatccacctcacaggaaatactaaagaaatgttttcctttaatgtccaaaatcacaccagcatatttggaagttagttttcaacaaaggttctactgactgagtcagttccctggatttagaaggaaataaatttcttaagccctaactagaacaagaaatcaggagttagttcatacttagttgaagaatgatcatgtatgaattcataaatatagtcaatgactacaacaaaaaaatttcgtgatcagaatgcctatttcagttggatatgagtgatcagatggtagtatgtgtacccattgatgccatacaaattttgtaggaagctggtagagaatttggttttaaagaggtctgtgttggccgggcacggtggctcacgcctgtggtcccggcactttgggaggccgaggcaggtggatcacgaggtcagaagtttgagaccagcctggccaagatgttgaaaccccatctctactaaaaatacaaaatttagctgggcacagtggcaggcacctgtagtcccagctactcgggaggctgaggcgggggaatcgcttgagcccaggaggtagaggttgcagtgagccgagattgagccattacactccagcctgggcaacagagcaagactccatctc

SEQ ID NO: 16520 - DNA, 2179 bp, Homo sapiens
  CDS (83)..(1591)
atttttggagtcttccctaaggatcctctaccggcttttcgagtcagtgctgccgccgctgcccgcggctttgcagagcaggatgaatgtgatagaccacgtgcgggacatggcggccgcggggctgcactccaacgtgcggctcctcagcagcttgttacttacaatgagtaataacaaccctgagttattctccccacctcagaagtaccagcttttggtgtatcatgcagattctctctttcatgataaggaatatcggaatgctgtgagtaagtataccatggctttacagcagaagaaagcgctaagtaaaacttcaaaagtgagaccttcaactggaaattctgcatctactccacaaagtcagtgtcttccatctgaaattgaagtgaaatacaaaatggctgaatgttatacaatgctaaaacaagataaagatgccattgctatacttgatgggatcccttcaagacaaagaactcccaaaataaacatgatgctggcaaacctgtacaagaaggctggtcaggagcgcccttcagtcaccagctataaggaggtgctgaggcagtgcccattagcccttgatgccattctaggcttgttgtccctttctgtaaaaggggcagaggtggcatccatgacaatgaatgtgatccaaaccgtgcctaacttggactggctctctgtgtggatcaaagcgtatgcttttgtgcacactggtgacaactcaagagcaatcagtaccatctgttcactagagaaaaaatccttattgcgagataacgtggacctattgggaagcttggcagatctgtacttcagagctggagacaataaaaactctgtcctcaagtttgaacaggcacagatgttggatccttatctgataaaaggaatggatgtatatggctacctactggcacgagaagggcggctagaggatgttgagaaccttggatgccgccttttcaatatctctgatcagcatgcagaaccgtgggtggtttctggctgtcacagcttctatagcaaacgctactcccgggccctctatttaggagccaaggccattcagctgaacagtaatagtgttcaagctctgctacttaagggagcagcacttaggaacatgggcagagtccaagaagcaataatccactttcgggaggccatacggctcgcaccttgtcgcttagattgttatgaaggtcttatcgaatgttacttagcctccaacagtattcgagaagcaatggtaatggctaacaacgtttacaaaactctgggagcaaatgcacagacccttacccttttagccaccgtttgtcttgaagacccagtgacacaggagaaagccaaaacattatttgataaagccctgacccaaaggccagattacattaaggctgtggtgaaaaaagcagaactacttagcagagaacagaaatatgaagatggaattgctttgctgaggaacgcactggctaatcagagtgactgtgtcctgcatcggatcctaggagatttccttgtagctgtcaatgagtatcaggaggcaatggaccagtatagtatagcactaaggtaggcactagcctcccttgggggaaggccactgaggagggtagaggaggcagtgagctgtgtcacaggagttatggaaacacacacacactttgtgtccatggttgaaagcagaataataatagtaatggtagaagagttatttgtgaattcatgacttctaaaaattttttcttaaaatatattaacaacattagagaactgtttcactcataaccatcccacaccactataacatctgtgttcatttgtatagctcatcttctgtccttgcccacacacacatatttttatagggctgtacctagtatatattttatattcttctttttcaaatcaaagtattgtaagtactttcccatgtttctatctactgtagtcattaagaacttgaggtctgaagttttgaatactaccttcaccacctgtgatcttgggcaagttactaacacatttccttgtctatatctagctaccttattagatattaaatgatcgaatgagggttaaatgattatttcatgtaaagctcttagccctgtgcctggtacatagtaaatgctaaataaatagtggtattcttactgtt

SEQ ID NO: 16521 - protein, 503 aa, Homo sapiens [sequence omitted]

SEQ ID NO: 16522 - DNA, 1813 bp, Homo sapiens
  CDS (9)..(977)
cttcagcgatggccgcggagctgagcatggggccagagctgcccaccagcccgctggccatggagtatgtcaacgacttcgacctgctcaagttcgacgtgaagaaggagccactggggcgcgcggagcgtccgggcaggccctgcacacgcctgcagccagccggctcggtgtcctccacaccgctcagcactccgtgtagctccgtgccctcgtcgcccagcttcagcccgaccgaacagaagacacacctcgaggatctgtactggatggcgagcaactaccagcagatgaaccccgaggcgctcaacctgacgcccgaggacgcggtggaagcgctcatcggctcgcacccagtgccacagccgctgcaaagcttcgacagctttcgcggcgctcaccaccaccaccatcaccaccaccctcacccgcaccacgcgtacccgggcgccggcgtggcccacgacgagctgggcccgcacgctcacccgcaccatcaccatcatcaccaagcgtcgccgccgccgtccagcgccgctagcccggcgcaacagctgcccactagccaccccgggcccgggccgcacgcgacggcctcggcgacggcggcgggcggcaacggcagcgtggaggaccgcttctccgacgaccagctcgtgtccatgtccgtgcgcgagctgaaccgccacctgcggggcttcaccaaggacgaggtgatccgcctgaagcagaagcggcggaccctgaagaaccggggctacgcccagtcttgcaggtataaacgcgtccagcagaagcaccacctggagaatgagaagacgcagctcattcagcaggtggagcagcttaagcaggaggtgtcccggctggcccgcgagagagacgcctacaaggtcaagtgcgagaaactcgccaactccggcttcagggaggcgggctccaccagcgacagcccctcctctcccgagttctttctgtgagtcgtggccggtcctggccccagccttgacctgtttgacttgagcgagagggaggaagggcgcgcgggccgcgggcgacgggcgggtgcgcgggcgggcaggggaccttggctaaggcgagagtagcgcacgccagcgccgcctcctagactcgagcagagccggagagagagacgagagggtgggaggtcccggagtaacttctctccaggctgaagggcggcgaggcatagtcccgagaagtcaccaaggccatctggagactcctggctttctgaactttgcgcgttaagccgggacagctgctttgctgcccggagagtagtccgcgccaggaagagagcaacgaggaaaggagagggactctggcgtcccggcaggcgagaggcgaggctgagcgaaagaaggaaggacagacggacctgtctgtcagagttcggagaacactggctctcagccctgagacacaggcctcagttaggacgctcggcgcccaaatctcatcagttttattgcctgctcgattatatagaaaaatacaaaaaatctgcattaaaaatattaatcctgcatgctggacatgtatggtaataatttctattttgtaccattttcttgtttaactttagcatgttgttgatcatggatcatactccccttgtttctttgggtgagaagggatcgcagtttggaaactccggcggctgcgtgcggggtttcagtcccagctgtaggcttgtaaatacccgccccgccaaaccgcatagagaacgtggcagcaagctgagggtctttgtttgggtttattattacggtatttttgtttgtaagtt

SEQ ID NO: 16523 - protein, 323 aa, Homo sapiens
MAAELSMGPELPTSPLAMEYVNDFDLLKFDVKKEPLGRAERPGRPCTRLQPAGSVSSTPLSTPCSSVPSSPSFSPTEQKTHLEDLYWMASNYQQMNPEALNLTPEDAVEALIGSHPVPQPLQSFDSFRGAHHHHHHHHPHPHHAYPGAGVAHDELGPHAHPHHHHHHQASPPPSSAASPAQQLPTSHPGPGPHATASATAAGGNGSVEDRFSDDQLVSMSVRELNRHLRGFTKDEVIRLKQKRRTLKNRGYAQSCRYKRVQQKHHLENEKTQLIQQVEQLKQEVSRLARERDAYKVKCEKLANSGFREAGSTSDSPSSPEFFL

SEQ ID NO: 16524 - DNA, 1938 bp, Homo sapiens
  CDS (5)..(325)
tgatatgtcatttttttgtttgtttgtttttgttttgttttgttttgtttttgagacggagttttgctcttgttgcccaggctggagtgcaatggtgcaacctccgcctcccaggttcaagcaattctcctgcctcagccttccgagtagctgggattacaggcatgtgccaccacgcccggctaattttgtatttttagtagagatggggtttctccatattggtcaggctggttgtgaactcccgacctcaggtgatctgcctgcctcagcctcccaaagtgctgggattacaggcgtgagccactgcgccttgcctgatatgtgatttttaatcatttgaacaagactgttattctgggatcaaaagattttattatgtttttaagtgttattataaagaagatgtagttatcactgctgcaatcctagtgggatttgtacacattggtgtatagcttggtataaaatttgagtttataatggaaataaatatttaaaaagttaacacttaaaaaagaagttaagtggtatgagagtttttataatgaaaccttttagacatttagagaatagcaccacatccccattgaaaatttaagtgaaagagagagagagaatgtgtgtgtgtgtgtgtgtgtgtgtgtgtgtgtgcacatgcctaccagttttttactatggagtctctgttttcttaagttataaatagaaacaacaaaaatatcttattagattactgtgaggataaaataatatctaaactggaaggttgtaattacttgataaatggtagccattattagaattgttattattaagaacaatgtacagtttctatcttttcagcatcttaaggaatttcataaatgtcatatacctatggtcccatgaacttatcctccttcttatgtttaaggactataattagattattcccttaacttgattcagtattacgtttgttctttcttaagagcaaaaccgaaagaaaaacacaaatttaaaaacaattttatcaaaattgcaaatgcagttaagaacttcgacaaaacaataaaaaagaagcacccaggggaaataataataatgtctataattatattatccagaaatatcctctgctaacaccttggaccatttctttctagttttgtgtgcataggcatgtgatcttatttactaaaatggattcatattgtagatatagtagcatttcagatgtttaatgatgatgatggtgttgatggtggcagtgacaatgatagttaacaatttatcatgtttactatgtgtcagtcactgtgctgagaccttttcatagattgactcatttaactcttaccctgagaagcaggtgctcttattatcttcatgtaacagatgaggaagttgagattaatgatttgctcaagatcacatagcaagtcacatgtgctcaaggtaacacagccagtggcagagtgggcttaacccctaatttatacgtatctgctcaattaaactttctattaagtcattagtgattcatctccttttatcatatgaaaagttaatgattacaacatataatatagtaatttgttttggaaaatgccctctttcaaacactgttagtgtttcacaaaactttaaaaaaaaaaaaacttactaggggccgggcgcagtggctcacacctgtaatcccaacactttgggaggctgaggtgggtggatcacctgaggttgggagttttcaccagcctggccagcgtggtgaaaccctgtctctacttaaaaaaaaaaaattagccaggtgtggtggcgcgcgactgtaatcccagctacttgggagactgagggaggggaattgcttgaactcgggaggtggaggttgcagtgagccgagatcacgccactgcgccactgcactccagcctgggtgacagaaacagacgtctc

SEQ ID NO: 16525 - protein, 107 aa, Homo sapiens
MSFFCLFVFVLFCFVFETEFCSCCPGWSAMVQPPPPRFKQFSCLSLPSSWDYRHVPPRPANFVFLVEMGFLHIGQAGCELPTSGDLPASASQSAGITGVSHCALPDM

SEQ ID NO: 16526 - DNA, 2305 bp, Homo sapiens
actggcatttatagtcaagtattggggatttttaaacccttacaagatgaggctaaaagttatataacaaaatctgtagctaacttcatatagtattcttcatacatacacacacattgattggcagtgagagagaagggcagtaattgaccgatttagatattaattggtttgttacaatctgtgactctgagctaatcagaaccagaacatgtagttctgaagctgtgtttcagtctgctcattgtaccataattaggaagaactgctttggcaaatcatggaatttgggagcttatataaagggacttcattatcattattctataggaagaactgctttggcaaatcatggaatttgggagcttacgtaaggttacttcattatcattattctaacttatttttccaatgaagaagcagatctgtctggagaggttaagttgaactaaggttttatagaaagctggtggctaaggcagaactaaaggtaactttctaagacccaatctgatatccttgagtcttattgtaggcttttgcctttgttaagcatactccaactaataccccaactaattccaggcaaatggaagtttaatgcaaaagcgtcatggaatacagcagttttctaataatataatttgttatttagaatatacactgtcatgtcatgctatatgtaaaataattaggcaaccattaacaccattattacacagtttgttttgaaaatgtgttaatcctgcctccaacctaaattttgtcaaggggcttctatttctttttttggggggcaggtaatatttctcttggttatgatatgacataatatttaagaactacagattctgtttttcttggcattagtggtgattgggaggaatagaaaagaattacaagcataatattccagcacagttacgtgtgagatgtaaattaaaactgttctataaatttgtaagtttcaaacaagtataactgttaagcaaacacagcaggaaattgtaaactgtttcgtgcaagagggtgttttagggcatttttgccaaggttaggtttcaggctcatagacctactatgtataattatcacaatattttcaagtaaagtttacaagattctttaaatttgggaagaccaaaattaaagacttaattgttatttttttgagacagggtcttgctctgttgcccatgctggagtgcagtggtgtgatttcggcttactgcaacccccgcctcccaggttcaagtgagattcttgtgcttcatccacccaagtagctggattacaggcatgcaccaccatacctggctatttttgtatttttagtagagatggggttagaccatgttggccaggctggtcttgaactcctggcctcaggtggtacacccacctcggcctcccaaagtgttggattacaggcatgagccaccatgcccagccaatatattagaatttctataaatgctgtttgagaagtaacatctttactttctaagagtccaaaaattagcaaacaggtacatgttcaaaggtaaatgctaagaaattgggtaatccactctaacagagaacagagattgtatctattaatctatagaaggaattgcgtaactcattattttgggaataatgcttgtctttacatggattatgtctatcaatctgtagaaggaattgcataattcattattttaggaataatgcttgtctttacatggggcaagtaagaggttaattattagtgtggattcttcttaaaaggaaattagaaattatctacatgacaacatatcctccctaccagtgactaaaggaggcagaataggagtatctatgcaagcttttaacactgacattgtcccaaagtaaaattagcagataaaatcatatatgacagctgttagtataattttttgcttttgctattgttttataatttgacaactttttaaaactttagaattcctaatgtcttgtcttaaaagtttttcaggctgggcatggtggctcaagcctgtaatctcaacatgtttagaccaagacaggaggattgcttgaggccaggaatttgaaattgtcctgggcaccgtagcgagactctgctttctacaaaaataattaaaaaaaaaaaaaaattgccaggtatggtgatgtgcacctgtagtcctaactactctaagcctgaggcaagagaattgtttgatcccaggggttcaaggttgcagtgagctgtgattgtgggccactgcactccagcctgggtgacagagcaaaaccctatctcaaagaaaac

SEQ ID NO: 16527 - DNA, 1973 bp, Homo sapiens
  CDS (335)..(655)
ttgctcaccactgaaaaatgtcagtgtaaatgtgaccgctttaaagatgagtcaagtaattcttggaacagggaaaaaaatgaatttgccaggtcaggagttcacctgcctttgtcagagttgaacccaaccactcttgacctcgactcactcccttagggttaagaaagcccaaacacattcctgagcacagagcaaacactcccatgtcactgaaaagaaacaaaaggatgctaaaaagtgctcagacctgatcacattttttccaatattttttccttttttttttttttttttgagacagggtcttgctctatcacctaggctggagtgcatgtttttgagacagggtcttgctctatcacctaggctggagtgcatgatcatggctcactatagccttgaactcctgggctcaagccatcctcagcctcccaagttgcgaggactacaggtgtgcaccacaacgtcccagctactttttaaatttttagtagaaacgaggtctcactatggtgcccagactggtctcgaactccggagctcaagtgatcttcctgctttggcctcccaaagtgttagaattacaggcatgagccacctcgcctggctggtttttgcctttcttatagaccctgggcatgtaagcatttattagtttgcatttttgaaacagtaatttcaatattttagtgccaatgtcaggccgcttaaacactgtattacatatcttcatctgtctggtggaactattggtgtgatcctagagaactgagtcctattctgccattcatttaaagtgttttaaactctaatctctctacttaatgcacagtagtcagattattctcttaaacatttgcctagtagaggttaaaatagtttaatccttatgaagatggaataacttcaaactcacattgtggcacttagatcttccaccaagacttcatccgtgaaatccacacctccctgttgggttcccaattacattccaaatttacatttcttttgagaatctctgcatactccagctctgtcctgttgatcctattctagaagtgcttaatgcagcaagacacagaaagttaaacgcaaattgctgcaaaattcaccctcagtggaggactagaaacacaacatgtccaatttaaagctcagttcacaagcagttcaattctgctggcatcagaaaaggagattctaattaaacattcttagggaaggacatcaaatgaggttaatgggaaacgttaccagattaaaagcagttttttgacaaagtaacagatttggaaattctgactctctgaaagccttgatttgaacctcaaacttgatttcaccatgagaagtggggatcaagggcctgcgcagttcttttcctaaatcgattcggtgccccccaccccgacgcaggcacaggtccgcaaccagatagggagatgcctgaatttcaggctacctttgacaaagctttcttcctccctccctccctttgcacgctgcatcccacgctgcctgcttaaagcgccctcatgtgtctacagatggtaaaacgtttatttctcaacagacattccagtgatagcatccaatgacctatgtaacggcacccttttttgctgtacgcgttttttgagatggagtctcgctctgtcgcccaggctggagtgcagtggcgcggtctcggctcactgcaagctccgcctcccgggttcacgccattctcctgcctcagcctcccgagtagctgggactacaggcacccgccaccacacctggctaattttttgtatttttagtagatacagggtttcaccgtgttagccaggatggttttgatctcctgacctcgtgatccacccccctcggcctcccaaagtgctgggattacaggggtgagccactgcgcccggccccagtcacttgttcttaagtttcttaagcaaactataaaatagcaaaagacc

SEQ ID NO: 16528 - protein, 107 aa, Homo sapiens
MFLRQGLALSPRLECMIMAHYSLELLGSSHPQPPKLRGLQVCTTTSQLLFKFLVETRSHYGAQTGLELRSSSDLPALASQSVRITGMSHLAWLVFAFLIDPGHVSIY

SEQ ID NO: 16529 - DNA, 1670 bp, Homo sapiens
  CDS (24)..(356)
agtcaaggaggacagtgacatgcatgtgtaggggctggggaccaatctgtcttgggggtcccagagatggatctgctgtgacagagggggccaagaccccgttcagagtgggggagggggagaggagtcacaggttcaacatgaagaacagttttaggaagtgggagggctggggacctacggcccatgcagtgccagatgggaccccatgcaggtgggttgctggaggaggacagggaaacagactgcagttttcagggatgcccttggaccttctgactcagtggcccaactcctggctgctgccctcctcccccactcccaagacctccaggtctgagcagctgtcctgcggttgaggtggacctgttggggaagtccatcaggaacctgccagggcccgaaagagagtgctgggggctctgtggcaggaaatgagggaagtgtccccagccacctccccccttagaggtgtggagattctggtcagtgggagaagctttaaaagagcttgttctccaggccccaaagtagggcaggagaggaggagtggcttccaggcaagtggctagacccagtcacctcattgtgaccttgcactctccagggatgtggtcccctgggtggtgggagctatatacccacattgcagagagcaaaaccaaggaagacgaagcaaccactagctctggttcttcacctcccacccccatcccccaagaaagaacgggtgctggtgcgggccacagggtgctggcagctccggcatcactaagaccggcccccatgcccatgctggagagccattccctgttggctcatattggaaatgggcctgttacccgcagctgcccctctatgccttgggccaggatggacagcccccaggggtagggggatgatgaatgagtagcaactgaaggaaaggtgcctccgctctcatgaaacaagtgaaggatgagacagccggatccttggcactactgttctcagggtgaaaaaaaagcaagctggatcctcatgctgccccactccatatggagcccatccaaactcagaggtgtcagagggggcagaaagaggggactggcctttttagagagaagcaaccctggtcacttgggagcgtgtgcccagggagatggggtggggtggggtcactctttgtctgtgaggaggcaagggcatggctgcccacaccttgtcctactcctgagctgggccgtgtagcatgggcccatgcacctccacccacagtgcagtgttgtggcccctttgccaggctgtgagttgacgggcagcagactccccgggaggggtgaaatgcggagggcacagggcctgtgtgagacgcagggaaagctggagaggccaaaccaggggccccagcagtaggtcggaggtgaagtcgggccaggtgcagtggctcacacctgtaatcccacactttgggaagccaaggcaaggggatcacttgaagccaagagttcaagaccgtcttgggcaatacagcaaaaccgtgtccaaaaattaaaagattagccaggtgtggtagcacgtgcctgtaatcccagctactcaggaggctgaggcaggaagatcccttgagcccaggtgttccaggctgcagtgggctatgattgtgccactacactccagcctggcatctc

SEQ ID NO: 16530 - protein, 111 aa, Homo sapiens [sequence omitted]

SEQ ID NO: 16531 - DNA, 1558 bp, Homo sapiens
ttgttggcctactggaaaaaaaaaaaaaaaaaaaaaaaaaaaaacacattcgaggtggtaatatgatacttttaaaccggaacctgcatctgatatcctggaatttgtttctctacttcctgtatttctcctatcatgaatgactgctctgacaaagaatatgtcatgggacacaccttcagctaactttgctttttcatgcttgttttcaattcactagaagaaaatctaacttgtcaggaagcaagtacataataggaagtgtctgtcttagtttgtcttcaacagttaagaaaatgaatgtttccactcttactacattcttagtcacctgtccactgaccaagagccttgtggccctgagtaatcatttagaacttggaatcagcaggggcgctctctctagttgcagtttagggaatgggttattagctttctaggatatttatcatgctttgaaataatttaatgaattttattccataagatccaattcaggttaggcttgtttgattttttttttcagaaaatgtattccataaagtttgtacttagaccagacgggtgtactaagaatcattcatgagtaaatgtgtgttgaatatctacccttgaccttttttttgagaaatagagtaaacacagtccctgtagtctgacagctaatggggagagagggtaggcttttcatcgaattaaatttctacatgcacctttcccccagaaatcttactcatggctggtctcaagtaagtctttattgaaaaatattgacatatcttcttcctcttccttctcctcactgtcttccttttagtagttaggcagagttaataggtaagaaaaattatctgcatttatgtgtagtttgtaatctactaaaggggttctagaataaatgttgacattttgtaacttacattgttgttgctactgattaaacacataacccaagtgtggatgaactctagcattacaaagcttaagcacctcaggctcctatgatgttgtaatggactctttttacaattagagtagggtggggtaacagagggtctcaaagaaaatgcatatttaaatttcaggcttctcagataacctctggagccctactgtctggaaacagccagtttccatgctgttacaataatttggcaatggcaattggttaatctccagtttctttgccacctgaaattttgagttgttcagccagtagatattggattaaatagaacaactttgttaagctggtttaataatgattatgaaaaaccaaatagagaaaaggtgaaaataaggcagaattgaggagcatgacctttggcatatcatcagagtaatagcagtaaaaaggattaaaatatttctaatttaagaataatggcaataataatagtgatgttgatggcaaaagtggcttgtcagaactttaaactcttagccaggcttggtggcacatgcctgtaatcctagctacaagtaagactgagatgagaggatcccctgagggaaggagtctgaggccagcctgggcaacatagcaagaccctgtctt

SEQ ID NO: 16532 - DNA, 1499 bp, Homo sapiens
  CDS (989)..(1354)
tgacttttgaggcaaaatatcaataggtcacatgaaaagtgagatgttcccggggacagagctggagatcaggagtgagtggacaagaaaggaatccaaggaaaatttcctaattctattatgatataatgtctatgaaaatatggaggagatgatatacattgagaaacacctctttgaagacattaagcattaatgtgtattaacttgatgcctagtataagaggatgaactaatttgcaacgtagtatatatggttaagagcacagattctagagctagactgcctgggtttgaattctggctttgttattttctaaagtatgcattggaaaagttaattaacttctctatgtcggtacacaatggggataatagtagttactctcataggaggctgttgtgaagatagagtacatgcacatatgtaaagcatttagcatatggcctggcacatagttcagtgcccgctgctcttagtattatttaaggagaagagctgtaagttgcaaaggtgattttaatagtgacattttggtggatggaagagattgcagaatggaggtaccagttgcccaggattttgaaaggagcagatcctgcccccaccctctgccccatgcagacaattaaagggtaggaatttttatttatttatttatttttgagacggagtcttgctctgtcgcccaggctggagtgcagtggcgcaatcttggctcactgcaagctccgcctcctgggttcacgccattctcctgcctcagcctcctgagcagctggactacaggcgcccgccaccatgcccggctagtttttttgtatttttaatagagacggggtttcaccgtgttagccaggatggtcttgatctcctgacctcatgatccgcccacctcggcctcccaaaatgctgggattacaggcgtgagccaccgcgcccggccaggatttaataatagactgtcagaggagataaaggaaatagatgatcagaacatggagacgagaattagaggaagagcaagggattttccacatagaattgggctgtgatagccctaaagacaggaaagaagcccctttctttgatttgctgctagatgttcttttcgtagcatgggctcttcctggggaggatccgtgctgtgctatttcccctctactgagctctgctcactttgccggtcaaaggtgtgttttcaggctcccgcttgtcacttctctgagccccctgaattacatgttgtttccaccacctgagctttcaataattggagcttcttggatcagaattcttctttgttcttctgactttgaattacggcaattaaagcaggtgatttttaaattttaaaacttaaaaagtttagatccttatctatagactaaacaaagggcttaagaggaataaagacgggagagactttctggtttattttagtgggggtattagcttctttattgctatgggatttctcatttccatgagcaaaaat

SEQ ID NO: 16533 - protein, 122 aa, Homo sapiens [sequence omitted]

SEQ ID NO: 16534 - DNA, 1977 bp, Homo sapiens
catactgtccccaaggtccatccattctcttccttttgaaggctgagttgtgccccactgtgtgcctagaccgcatctggttgacccatccatccgtcgatggacacattatgaatggtgctcctgtgaacactgtgtaccaataagtgctttttgagcatgatcacgtgcctggcattgtgctgggctgcagtgggaaatgaacttggttcccatgctctgggggtaatgttaagaagcaaacaccaatagatgtttactaagagactgcaatatgtcccgtgatgggaaagagcagtgttcggggagagaattatggcaggggtggaggtgggtggctgggacaatggtcaggtctcaggaagtggcctgaagaatggggaggagaggtgggcaggggtggggagggtccaggcagaagtaacaacatgtgtgaagccactggattgcgacagagttgcccgttggagggattgatgcttagatttctgcttcagtgtcttctccagcaagcatcctatcagcctccaggcccacctctccccaccatcttctcctctctgctcttattctagttcattcaaactgcctctttgctcagctatttctcccactgtccagtgagcggcttgagtgcaggaactgttttattttatgtttgcgccttcttttcatatcttagtaggtgtcagtgactctcaaacagatactctcctgaaggagggtagtgctttcactggcaatgacccaagaccatcatctggggcctgccagagtcaggcacagccccggcattagaactttgggctgtaagcctgtcctctgtgcttatgtgggtggtgcacaaagcacttgcaaacatctgtgtgcagtgctgctccattcggcctgctgaagctttcctgccctgttgccgctgaagcagggagtgtgggaagcgcccagctcagagctgggccagatgtggccatacctcccagcagtgcaagcagcatcactgcgccaggccagctgactcggctggccctggtgcacagtgcttaggggcttgtggccacgagccatgccccaccacctctcctgttagccttggtagcttcccagcttcctctcacatgactgtttctgtttacttctccctctggccttcctgcctgcggcgtccctgtgccacctagagtctcatctaccgcactagacatagcctctgcaatggccccgcaccagggcctccttccagggcatatcccgtctctgtctcacccttctagtctgcgcttgcccttctcactccccagctctctctgttactgtcagtggagggtctgtgcactttgtcgttttgatcctatgacgttgtatctgtggctcttccttcaagtgcccaggagaggcccagctcctggggccagaaaggggttagtcttgaagtcttgggttggacatttcaccatggccagcccagagctcggctggaaacagatgagagacaacatgtgaggaggcagacaggagctggggatccaggctctgagcacctgagaggtttgggggaaggtattggtaatggattggattgtgtcccccaacaaaagattttcaagtcctaacccctgtacaggtgaatgtgaccttatttggaaatagcgtctttacagaggtaatcaagttaaaatgaggtcatttgggcaggtgcagtggttcatgcctgtaatcccagcactttaggaggctgaggtgggtagatcacttgagtccaggagttcaagaccagcctgggaaacatggtaagaccctgtctctacaaaaaatacaaaaaaattagccattagctgggcatggtggcatgtgcctgtagtcccagttactcaggaggccgaagtgggaggactgcttgagcccaggaggtggaggttgcagtgagtggagactgcaccactgcattccagcctaggcaacagagcgagaccctgtctc

SEQ ID NO: 16535 - DNA, 1716 bp, Homo sapiens
ttcctatattttatcaatgaatatttattgagcacctcttttattctagccattttgctaggtatcccaaggaaagcctactgtgttctgaaaaattggaattcattaattaaattaaacaggactaacatactatacttttccatccagagaaatgcaaaattataccttgattcaagacaaaatagtttgtccctcccagccatagagaaagctgagttgtttgttacttttagatcttaggtacagaatctgataaagtctaggtggttctgtataccagcccttgaatttataatcgtagagacttgccttaaatatatgatcagtttaggtaagttcgagaaattctgaagtgtcaattatgttgtattagtccgttttcatgctgctgataaagacatacccaagactgggtaatttataaagaaaaagaggtttaatggactcacagttccacgtgactggggaggcctcacaatcatggcagaaggtgaaaggcctgtcttacatggctgcaggcaagggagaatgagagagccaagtgtaaggggaaactccttataaaaccatcagatctcatgagacttattcactaccatgagaacagtatgggagggaaccccccgcccccatgattcaattatctcccaccaggtccctcccacaacccgtgggaattataggagtttcaatcaagatgagatttgggtggggatagagccaaaccacaccatatataaaaatagtatagataatagttatatggagtactacccactgaagggatacatgtttacctgttcccccaagttaggtagccagaagtgttgtgtttgcattgttggcacaacctgtcaacattaataataactaatttattaagtacttctgtgtgccagggattgttcctaagcttcctacaagaataaatttatttaatcttcctaagaatcctgtgaagtgggtacagttgagcatcccaaatcccaaatgctccagaatccaaaactttttgagcactgacatgatgctcaaaggaaatgctcactgaagcattttggatttttggattggggatgctcaaccgtaagtataattaatgcagatattctaaaatctgaaaaatcctgatatctgaaacacttctggtcccaatcattttggataagggatactcaacctgtactacttactctctccatttcacagatgaagaaagtgaggtagggaaaaagataagtaacttgcccaaggttacagagctggtaagtggcagagccccaggcagccttgctgtatagcttactgtctcctaaccattattctatgctacctttcatgggccctcatgttaagagtaactcttcagtttagcaaattattctgcattatatgatgagcttacatataatagcaataatagaccagaagcggtggctcacacatgtaatcccaacactttgggagaccagggtgggcagattgcttgagttcatgtgttcaagaccagcctggacaacttagcaaaactccatctctacaaaaaatacaaaaaaaaaaaaaattagccaggtatggtggtacatgcctgtagtcccggctactcgtgaggctgaggtgggaggattgcttgagcccaggagttggaggttgcagtgagccaagatcgtgacactgcactccagcctgggcaatagaaccagacattgtctc

SEQ ID NO: 16536 - DNA, 2580 bp, Homo sapiens
ctaatcattgagagacatgacaccaagtaattccgaggctcagctttaatcttgacaacattcctgtcacattcactcccatgatagaagacagattgctttagaagacttaagttaccttgaccttaaactagaactttttattaacagctgttcccaagataaacatttaatacctctctggaagggagagattgagaacatttactgattcatcaaaaccttggggatttccttgttctctgaagcgtcagtgatatttttattagctctatttttatttcttaggtgcttagaaaaattcccatcttttcccatcagtgaccattcactagttcaaaatgggaaaaacaaaatctttgttagactttcatttctttcggtttattcaaccttgtattttaattgtagatagggataaattatctggtgtttgatacccttagaaagttcttcccacctggagtgtaaattagtttaaccattgtagaagatagtgtggtgattccgcagacctagaggcagaaatgccatttgacccagcaatcctattactaggtgtatacccaaaggaatataaatcattctgttataaagatacaagcacacatatgttcactacagtactattcaatactattcaatagcaaagacatggaatcaacccaagtacccatcggtgatagactaaataaagaaaatgtggtacatatgcaccatggaatactgtacagccataaaaaggaatgagatcatgtcctttgcaggggcatggatggagttggaagccattatcctcaacaaactaatgcaggaatagaaaaccaaacaccaggccaggcgcagtggctcacgcctgtaatcccagcactttgggaggctaaggtggacggatcacaaggtcaggagatcgagaccatcctggctaacatggcgaaaccccgtctctactaaaaatacaaaaaattagctgggcatggtggcatgcacctgtagtcccagctagtcgggaggctgaggcaggagaatcgcttgaacccgggatgtggaggttgcagtgagccaagatcatgcactccagcatgggtgacagagtgagactccgtctcaaaaaaaaaaaagaccaaacaccacatgctctcacttataagcaggagctgaatggtgagaacacatggatatatggaggggaacaacccacactggggcctgccaaagggcgatgggagttggggaaagcatcaggaagaacagctgatggatgctcggcttaatacctaggtgatggcttgatctgagcagcaaaccaccatggcacacgtttacttatgtaactgcatatccagcacatgtactcctgaacttaaaagttgaacaacaaaaaaagaaggaaaatgcgttaataccttattgtaattattatttttttggaagactattttttatattcagaagaagtgtcagagtcagcagaaagggattatttctccatttacctacaacaatggttttaaatgactggatagatagaaatctctttcaacttaactgcttagcacattgcatttttctctgtttcatgttagtcttccaaaggattactgactttttacctaatttgctaagggatgtcaggccttaatgacatatttctcctcaaataaagatacaacatgcttttactgtgtaggaggaattgttaacaggatttatgatggctgtgtttgacttcccaacaatgatagaacatttgggcatttttatgttctttttctatattgtttgtgtgcttattttgtgttttaatagtcactgtcttactgatgtgctgcatttgtgaattgaaatgtcttgcccatgtttctaagatctctaaatcctgattcttttcatcttggttgatatgacagtgtcatatcaactgacactgtcaattgatagtgtcattttcaatgacagtgtctactctgcatatttaatgcactctacagtgttgatatgacatgtctactctgcatatttaattaatgtgttacttccactctttacatattaatggcagcatttagaagttaggctatgtttagaagctaggcagaatgtttagttttccttcacatttttgctgctcttttaatgtacagtgaaaatgttaaagtacaaggatgacaaccttgattttattataaaccttcctcatacttccttaatgttatgactatttgtaagcaaattaaacgaccttagagatatatttaatgttcctaatactgatgttcctgaatggtagataaatgtcttatcatctctttatcttctagggttatgatcatagctactacttcattgcaacctttattactgaccacatcagacatcatgctaaatacctgaatgcatgaaaaaactccaaataagagaatctcttcaggattataaaagttgtaaaatgcaactgtattgctgagcaaaaaaaaaaaaaattcaaaacattggattttatagtgctaaaagggctttattctatagttgaatcacctctgaataaagatataaaacctacttctgattttaaaagtt

SEQ ID NO: 16537 - DNA, 2153 bp, Homo sapiens
  CDS (1335)..(1643)
aatcccagcgaggctggggctccggctcggcgcccccttcctcgctccctggtccggcgccccatgccgcccccgcccggtccccggctcccccagtcccccacttaggcgggctcacagatcccggggtgctggcgcgtgggccgggggcgcgtagggcgcctgcagacggcccctggaagggctctggtggggctgagcgctctgccgcgggggcgcgggcacagcaggaagcaggtccgcgtgggcgctgggggcatcagctaccggggtggtccgggctgaagagccaggcagccaaggcagccaccccggggggtgggcgactttgggggagggtctctgggcctggggggtggaggtgggatgggacctcgggaggctgagcctggggagctagggatagctctgcggggtggcggggctgcagatccccccttctgcccccactatgagaaggtgagtggtgactatgggcatcctgtgtatatcgtgcaggatgggcccccccagagccctccaaacatctactacaaggtatgagggctcctctcacgtggctatcctgaatccagcccttcttggggtgctcctccagtttaattcctggtttgagggacacctctaacatctcggccccctgtgcccccccagccccttcactcctcccggctgctgtcctcgtctccacttttaggattccttaggattcccactgccccacttcctgccctcccgtttggccatgggtgcccccctctgtctcagtgtccctggatcctttttccttggggaggggcacaggctcagcctcctctctgaccatgacccaggcatccttgtccccctcacccacccagagctaggggcgggaacagcccaccttttggttggcaccgccttctttctgcctctcactggttttctcttctctatctcttattctttccctctcttccgtctctaggtctgttcttcttccctagcatcctcctccccacatctcctttcaccctcttggcttcttatcctgtgcctctcccatctcctgggtgggggcatcaaagcatttctccccttagctttcagccccccttctgacctctcataccaaccactcccctcagtctgccaaaaatgggggccttatggggaaggctctgacactccaccccagctcaggccatgggcagcagggctccattctctggcctggcccaggcctctacatacttactccagccatttggggtggttgggtcatgacagctaccatgagaagaagtgtcccgttttgtccagtggccaatagcaagatatgaaccggtcgggacatgtatggacttggtctgatgctgaatgggccacttgggaccggaagtgacttgctccagacaagaggtgaccaggcccggacagaaatggcctgggaagtagcagaagcagtgcagcaggaactggaagtgccttcatccaggacaggaagtagcacttctgaaacaggaagtggtctggctggaactccaagtggcttagtctgggggatcaggaggtgggaggtggatggttcttattctgtggagaagaagggcgggaagaacttcctttcaggaggaagctggaacttactgactgtaagaggttagaggtggaccgagaaggacttttcccagtcttcagtggcacttcccaagatctcccttcccttgtgctctgtgctgattttaggacagctaagatgactgccatgtgctgtggcaggcctaatttgtcttgttctttcctttccatatcccagtataatctctgttaatcaacaggactaccccaagaacccatgtgctctcccgagtaacccagatggctgtcttgttcattccatcctacatttccgactcctttcagactcaacacagttttattagatcaaagctgttgttgggcaccaggttggccacctcaatcaccagccaagatggttgctttgtccaccagaggtcaagttcacctctctggtgctgtagttcccagctccttcctgatttttctaatcgctccttctggggaacaggaagttgatattgccatggtggcggggtatgccgtcacctcagtagttttactgtaaaagggaaatttgaacaacaaaaacc

SEQ ID NO: 16538 - protein, 103 aa, Homo sapiens [sequence omitted]

SEQ ID NO: 16539 - DNA, 1507 bp, Homo sapiens
gggaaaaagtttgaccagcctcagaaggctttctctgtgtaaagaagtataatttctctgccgactccatttaatccactgcaaggcacctagagagactgctcctattttaaaagtgatgcaagcatcatgataagatatgtgtgaagcccactaggaaataaatcattctcttctctatgtttgacttgctagtaaacagaagacttcaagccagccaggaaattaaagtggcgactaaaacagccttaagaattgcagtggagcaaatcggtcattttttaaaaaaatatattttaacctacagtcaccagttttcattattctatttacctcactgaagtactcgcatgttgtttggtacccactgagcaactgtttcagttcctaaggtatttgctgagatgtgggtgaactccaaatggagaagtagtcactgtagactttcttcatggttgaccactccaaccttgcccacttttgcttcttggccatccactcagctgatgtttcctgggaagtgctaattttacctgtttccaaattggaaacacatttctcaatcattccgttctggcaaatgggaaacatccatttgctttgggcacagtggggatgggctgcaagttcttgcatatcctcccagtgaagcatttatttgctactatcagattttaccactatcaaatataattcaagggcagaattaaacgtgagtgtgtgtgtgtgtgtgtgtgtgtgtgtgctatgcatgctctaagtctgcatgggatatgggaatggaaaagggcaataagaaattaatacccttatgcagttgcatttaaccttaagaaaaatgtccttgggataaactccaatgtttaatacattgattttttttctaaagaaatgggttttaaactttggtatgcatcagaattccctatagatctttttgaaaatataggtacctgggtatcacacatagaacttttaattctgctggtgtaggctgttgcccaaacatctataattttactgagctcttcaagtgattctgataacacagcctggattgagaatttttataagattggcaatggaaaaacatttattcttttaaataataatttttttaaaacccaagaggtcaggggattttataaaccaatagccaagtgttctttaaataggaggcacccttcccattgtgccaaaatcatcttttcatttattttgaaatttgtatgattattttatacttgtatgttgcctttcttcgaaggcgcctgaagcactttataaacacaaatcctcacaatacctctgtgaggtaggtaaatagtacttttctatgtagtaaacctggaatatggagaatttcataacagttcattctacttaataatgcaataatggagctccaagttgtcttggacttctacaccacactcagacttctggaaagttttctgtacctcattctttagtccctgtcaaggttagtaaataaaataagtggcat

SEQ ID NO: 16540 - DNA, 2019 bp, Homo sapiens
  CDS (1154)..(1480)
ggaggagtacccgccaacaagcgggaccgagcaggaatccgtatctgggaacaggtgagagaggatgtgtgctgggccttggaggaagggggccgagaccgggccttacttctgtaacgatactgtgaggcatcggaaggctagcctgttgtgtccgttttgaaggtcggtgggctagactggctggccttctaggggtgtggagacttcccaactctgcccttgtgctttcctggaatccccaatatgcccggaccccggtttactcctttgctgcgagcccttctctcccgtccagagttgctccgagcctatctgctcagtcctagcgattcctgtggggcttgggacgcgcggtccaagcaccccggaccatatggatgcagcacccatgggttctcgctccaatgcttctttcctccttggggcgtaactcagaccctgggcacccctctccactgcccaggggagacctgggttctagatttggctctgcctctactatcttcctacctcctagagcctcagtttggcttgtgtaaaataggatgacttaagggtcctttcagcccctaatcctggggtactttactctgtaccgcctccttacccagccttgtgcacgccatcttgaaggcactgagttctagcctgtttattgtaagtggtgattagttgggtctcagtcacccagccatacttttttgttccctgcgtatccttcctgtaattgtccccaagcacattccacaagagggaggggcactctgggctaaggcgggggtgggagttatctgaggagctgccaccatgcctctgcctttggtgcttgcccctgcagggagtgcttagtgccccctccctatgccactcccaggatgcccctgtcccgctggttgagatctgtgggggtcttcctgctgccagccccctactgggcaccccgggagaggtggctgggttccctacggcggccctccctggtgcacgggtacccagtcctggcctggcacagtgcccgctgctggtgccaagcgtggacagaggaacctcggtgagtgtggttggggtgaggggccttggggaggggagcagctgatcaggtttctgacttgtttttcttctacttagagccctttgctcctccctcagaatgaacggagaccagaattcagatgtttatgcccaagaaaagcaggatttcgttcagcacttctcccagatcgttagggtgctgactgaggatgagatggggcacccagagataggagatgctattgcccggctcaaggaggtcctggagtacaatgccattggaggcaagtataaccggggtttgacggtggtagtagcattccgggagctggtggagccaaggaaacaggatgctgatagtctccagcgggcctggactgtgggctggtgtgtggaactggtgagaggggtagggcaagggagaagaagtttcctgcaatggtggtgacttgggtgggaaggggagggatgggcctgaaacttatttctgggttgtgtttgtgtttctttgtctctagtgtgctacggccaaatttagagtgaatcactccgagggttaactaatgtggggagcctcttttggcattaggtatgaagatggctgtagatagttgtagacagtgtggactggggcctcgagactgggcagagaggtgtcagctctttcctctgagcagaggatggctataaaagtgacagaggaggccgggcatggtggctgacacctgcaatcccagcactttgggaggccaagggggaggatcatctgagttctggagttcgagaccagcctgaccaacatggagaaaccccatctctactcaaaatacaaagttagctggatgtggtggcacatgcctgtaatcccagctactcgggaggctgaggcaggagaatcgcttgaacctgggaggcagaggttgcgatgagctgagattgcaccattgcactccagcctgggcaacaacagcgaaactccatctc

SEQ ID NO: 16541 - protein, 109 aa, Homo sapiens; identical to SEQ ID NO: 14756

SEQ ID NO: 16542 - DNA, 1534 bp, Homo sapiens
  CDS (890)..(1267)
ggatgtgttctggctccccttactggaaaaggtctacgccaaggtccatgggtcctacgagcacctgtgggccgggcaggtggcggatgccctggtggacctgaccggcggcctggcagaaagatggaacctgaagggcgtagcaggaagcggaggccagcaggacaggacaggccgctgggagcacaggacttgtcggcagctgctccacctgaaggaccagtgtctgatcagctgctgcgtgctcagccccagagcaggtgcccgggagctgggggagttccatgccttcattgtctcggacctgcgggagctccagggtcaggcgggccagtgcatcctgctgctgcggatccagaacccctggggccggcggtgctggcaggggctctggagagaggggggtgaagggtggagccaggtagatgcagcggtagcatctgagctcctgtcccagctccaggaaggggagttctgggtggaggaggaggagttcctcagggagtttgacgagctcaccgttggctacccggtcacggaggccggccacctgcagagcctctacacagagaggctgctctgccatacgcgggcgctgcctggggcctgggtcaagggccagtcagcaggaggctgccggaacaacagcggctttcccagcaaccccaaattctggctgcgggtctcagaaccgagtgaggtgtacattgccgtcctgcagagatccaggctgcacgcggcggactgggcaggccgggcccgggcactggtgggtgacagtcatacttcgtggagcccagcgagcatcccgggcaagcactaccaggctgtgggtctgcacctctggaaggtagagaagcggcgggtcaatctgcctagggtcctgtccatgccccccgtggctggcaccgcgtgccatgcatacgaccgggaggtccacctgcgttgtgagctctcaccgggctactacctggctgtccccagcaccttcctgaaggacgcgccaggggagttcctgctccgagtcttctctaccgggcgagtctcccttagcgccatcagggcagtggccaagaacaccacccccggggcagccctgcctgcgggggagtgggggaccgtgcagctcgctgcgtccgcatcactctgcatcagcactgccggcccagtgacaccgagttccaccccatcggcttccatatcttccaggtcccagagggtggaaggagccaggacgcacccccactgctgctgcaggagccgctgctgagctgcgtgccacatcgctacgcccaggaggtgagccggctctgcctcctgcctgcgggccctacaaggttgtgccctccacctacctgccggacacagagggggccttcacagtgaccatcgcaaccaggattgacaggccatccattcacagccaggcctcacacccagagggtagggcagcagatcttctttataactatttattgttcgaatcacttttaggatgtaactttataaataaacatgagcgctgatgatttgc

SEQ ID NO: 16543 - protein, 126 aa, Homo sapiens
MPPVAGTACHAYDREVHLRCELSPGYYLAVPSTFLKDAPGEFLLRVFSTGRVSLSAIRAVAKNTTPGAALPAGEWGTVQLAASASLCISTAGPVTPSSTPSASISSRSQRVEGARTHPHCCCRSRC

SEQ ID NO: 16544 - DNA, 1423 bp, Homo sapiens
  CDS (474)..(1127)
ttccggtcccggctcagcctccgacccaggtggtctggagcctgccgggagagtggtggcatctgagaggctggtcgtggactgtggttgggggaggtgggagctgttttaaccgtgtgccccctctcctgtgccggcgtgggcatcccccggggcagtggaacgcgggcgctcctccagcttccgagtccagccagcctgggcgcggggcgccgcccccgagacacccgaggagtccgttcctccctggttacgtggactgtggagctggtctcttgtggctcagcgccgtgcggaggttgaagcgtacctgcggaggtcgcaccagggcgtgaggaggaggaggaagggcatgagccgagcttgaggaatccgtgctccaaactctacactcaagggtggcccttgggtagggtgaagatcccctgtctttatcctagttccacaccttggtgtgggttactgggtgcaggatgaactgtcgctcggaggtgctggaggtgtcggtggaggggcggcaggtggaggaggccatgctggctgtgctgcacacggtgcttctgcaccgcagcacaggcaagttccactacaagaaggagggcacctactccactggcaccgtgggcacccaggatgttgactgtgacttcatcgacttcacttatgtgcgtgtctcttctgaggaactggatcgtgccctgcgcaaggttgttggggagttcaaggatgcactgcgcaactctggtggcgatgggctggggcagatgtccttggagttctaccagaagaagaagtctcgctggccattctcagacgagtgcatcccatgggaagtgtggacggtcaaggtgcatgtggtagccctggccacggagcaggagcggcagatctgccgggagaaggtgggtgagaaactctgcgagaagatcatcaacatcgtggaggtgatgaatcggcatgagtacttgcccaagatgcccacacagtcggaggtggataacgtgtttgacacaggcttgcgggacgtgcagccctacctgtacaagatctccttccagatcactgatgccctgggcacctcagtcaccaccaccatgcgcaggctcatcaaagacacccttgccctctgagcgtcgctggatctctgggagctccttgatggctcccagaccttggcttttgggaattgcacttttgggcctttgggctctggaacctgctctgggtcattggtgagacttggaaggggcagcccccgctggcttcttggttttgtggttgccagcctcaggtcatccttttaatctttgctgacggttcagtcctgcctctactgtctctccatagccctggtggggtcccccttctttctccactgtacagaagagccaccactgggatggggaataaagttgagaacatg

SEQ ID NO: 16545 - protein, 218 aa, Homo sapiens
MNCRSEVLEVSVEGRQVEEAMLAVLHTVLLHRSTGKFHYKKEGTYSTGTVGTQDVDCDFIDFTYVRVSSEELDRALRKVVGEFKDALRNSGGDGLGQMSLEFYQKKKSRWPFSDECIPWEVWTVKVHVVALATEQERQICREKVGEKLCEKIINIVEVMNRHEYLPKMPTQSEVDNVFDTGLRDVQPYLYKISFQITDALGTSVTTTMRRLIKDTLAL

SEQ ID NO: 16546 - DNA, 1367 bp, Homo sapiens
tagtttaaataaatacatttaaatcttgttaaaatttaattgtttctggctgggcacggtggctcacacctgtaaccccaacactttgggtggctgaggcaggaggatcacttgaggtcaggagttcaaagccagcctggccaacatggcaaaacctcatctgtattaaaaatacaaaaattagccaaatgtggtggtacacgcctgtaatcccagctacttgggcatctgattcacaagagtcgtttgaccccaggaggtagaggttgcagtgagctgagatcgcaccactgcactccagcctggacgatagagtgagactctgtctcaaaaaaaaaaaaaaaaaaaaaaaaaattatttccataaagaatagatcaacatgtaggtataatgcctgctgttacttaataggcaagatcacgtctctggataccagcaccatgagagcagccatgaaaccaggctgggaggacctggtaagaaggtgtattcagaagttccatgcgcagcatgaaggagaatctgtgtcctatgctaagaggcatcatcatgaaggtaagcatctctaaatgatttttcttaaattattgcttcctgtgggagctttctgtcaatgattcctggagttcaccttgggaacagagctggtgactgttctcgtgagctgtctcatctggccccagtgttgccatctaaaggaaaatttaacaggagaacctgtaggacagaagagtgatgaaagtagaacaggagatgatagtgtcacagaggcaggcaaaaggaggaagaggtcattttctttgatccaggggcttctagatatgtgacaagattataagtaccatctaatgaaaagaaatattaacgattcagttagaatctgaatataagagtaagtggaattttggagagtgagtgaacccctggtgaaggtaacagtgggaccccaagcccttcttcaaggtggtaaccaacaaagactatccaggtgtttctagagggcccaaaagttgacacgacttgtctcagctcacagacttaagcaataggacagctggaactgagcccaagacttcagtaataacagcagcccttattgagcacctggtctttgtgtggcattatcccttttgcctcctcactggccctcacagcaagcctgtgatgtgaacatcacgtctctcactctggacaaggggacgaggaggttcaggcaagtgaaatgactgactctctagcattcagtgtcagtgcaggacgtccatctgagctcattttggtcactgtcatgctgcttccgaaggtcttcccaaagaatcactttttctcaagtgcattgttgttttctgttaaagaggtaggaacc

SEQ ID NO: 16547 - DNA, 1336 bp, Homo sapiens
atcatagtagaaccaccgtgttctaaccttattgtgtatcaccataacagtttattgtggctctgatgtcataaaggaagagacatggaggaagaaaaagggggaaaaacgtagtatttaaaattctttagtctttttctactacataggctgcgagatttccttcaaattttattaaagtataaattatgtatgtaaactaatgtcccgaaataagctcttaaagcttactttagctatttaaaggatttatggctttctgtgtttttctttttgttaatttaattttttttttttcttgagccagagtttgagatcgctcttgttgctcaagctggagtgcaatggcgcgatctcggctcactgcaacctctgcctcctgggttcaaacgattctgcctcagccacccgagtagctgggattacaggcatgtgccaccatgcctggctaattttttttgtatttttagtagaaacggggtttcaccatgttagccaggctggtctcaaacttctgacctcaggtgatccacccgccttggcctcccaaagtgctgggattacaggcatgagccgccacgcccggccaattttattcttaatttaaatagttttcccgggtttatcaagaatctttaaactttattccttccataaagtcattattatgaccacacccagtggaagaggaggaatgaaagatgcaaactttaaggtttcaggatatttgaagtgttgggtgcattgagaccagtagctgataataatcctttaattttctcgtttattaaaggttaaagacatatactcaatcccaagtactaaaatagatgtaaaaaaattctggatttgaaaactgttggtttttaaaagagaaatatttttaaattcttattttaggatgaggatatgttcatgaaatttgtaagtgaagatcttcatcggtgtgcacttttaacaggtttgaacctattcatatagtttttgtttagcataaaactttgaatggataaaaaagaagatgaggaaactaaaaagtcagattgaataatatagggaatgattattctagtagattgtgaaagagaactgtatctacttgcagagttcaaacttttcaggtttgttttaggtaagcctattttatattagaaaataataaatgaaagtggtgattatcttatatttaacataaggatttaccttgtcatttgtttaaatgtattgactgtatgactcaagttataacggacagattatgttagaagtacatcttcatttaaacgaagtacattgtctaaagagtctcattaataaagtcattcatttgcaactg

SEQ ID NO: 16548 - DNA, 1653 bp, Homo sapiens
  CDS (32)..(1279)
aaacgcaaggcttgaattttctcggggccttatgatgctggttcttgagaagttagccactgatattccttgtctgctatatgatgacaatctcttctgtcatttggtggatgaagtactcttgtttgaaagggagctacacagtgttcatggctatcctggcacttttgctagttgtatgcatattctatcagaggaaacctgttttcagagatggttgacggtggagagaaaatttgctcttcaaaaaatggactcaatgctttcctcagaagctgcctgggtatcgcaatataaggatatcactgacgtggatgaaatgaaagttccagattgtgcagaaacttttatgactctactcttggttataactgacaggtataaaaatcttcccacagcttcccgaaagcttcagttcctggagttacagaaggacttagtagatgattttaggatacgattaacacaagtgatgaaagaagagactagagcttcccttggctttcgatactgtgcaattcttaatgctgtgaactacatctcaacagtactagcagattgggctgacaatgttttctttctacaacttcaacaggctgcactggaggtgtttgcagagaataatactctgagtaaattgcagctaggacagctagcctctatggagagctctgtctttgatgacatgattaacctcttagaacgtttaaagcatgatatgttgacccgtcaagtagaccacgtttttagagaagttaaagatgctgcaaaattgtataaaaaagaaagatggttgtccttgccatctcagtcagagcaggcagtgatgtccctgtccagttcggcttgcccgttgctgctgacgttacgagaccatttacttcagttggagcagcagctttgtttctccttatttaaaattttctggcaaatgcttgtagagaagctggatgtatacatctaccaagaaataattcttgctaatcacttcaatgaaggaggagcagcccagctgcagtttgatatgactcggaatcttttccctttgttttctcactattgcaagagaccagaaaattattttaaacatataaaagaagcctgtattgttttgaatttgaacgtcggttctgcactactgctgaaagatgtactgcagtcagcttcagggcagcctcctgccacagcagcattaaatgaagttggaatttacaaactggctcaacaagatgttgagattctacttaatttgaggacaaattggcctaatactggaaaataatgtctttcagaaaaaggtttctttggtttttgtttctaagaaagaggaagccaattggatttcaagttatatgatgaaattctgaattaatgaaactggaaaactttatagaattacttattatcttggatttatggtgttattaaaatgctgaccatatttccttcatcctcttgttcctaaggaaacaaaaacagaaaacgaaacaatgaaaactcaattctatttacaagtataaatgctgagtatgtctgttgaagacgagcagagatattaaattataaccaactttcaatttcctgtgctaattaagggaaattctgttgtggataatcaaacatagccaataaatttttttaaaactccctttg

SEQ ID NO: 16549 - protein, 416 aa, Homo sapiens
MMLVLEKLATDIPCLLYDDNLFCHLVDEVLLFERELHSVHGYPGTFASCMHILSEETCFQRWLTVERKFALQKMDSMLSSEAAWVSQYKDITDVDEMKVPDCAETFMTLLLVITDRYKNLPTASRKLQFLELQKDLVDDFRIRLTQVMKEETRASLGFRYCAILNAVNYISTVLADWADNVFFLQLQQAALEVFAENNTLSKLQLGQLASMESSVFDDMINLLERLKHDMLTRQVDHVFREVKDAAKLYKKERWLSLPSQSEQAVMSLSSSACPLLLTLRDHLLQLEQQLCFSLFKIFWQMLVEKLDVYIYQEIILANHFNEGGAAQLQFDMTRNLFPLFSHYCKRPENYFKHIKEACIVLNLNVGSALLLKDVLQSASGQPPATAALNEVGIYKLAQQDVEILLNLRTNWPNTGK

SEQ ID NO: 16550 - DNA, 1659 bp, Homo sapiens
  CDS (61)..(429)
aaagagtgtaatctcacgtatcactaaggtgctgatgagtcccaaatcataatacctaccatgccttttctgtatgacatttccagctgttggacatctttttgttttttgtttttttctcccctagacggagtcttgctctgtttcccaggctggaatgcagtggcacgatctcagctcactgcaacctctgcctcccaggttcaagcgattcttctggtctcagcctccggagtagctgggattataggcacatgccaccacgcccagccaatttttgtatttttagtagagatggggtttcaccatgttggccaggcttgtctcaaactcctgaactcaggtgatccaccagcctcggcctcccaaagtgctgggattacaggcatgagccaccacgcccggccttttttttttttcttttctttttgagatggagtcttgccctgtcgcccaggctggagtgcaatggcgcgatctcggctcgctgcaacctccgcttcccaggttcaagcgattctcctgcctcagcctcccgagtgtgggattacaggtgcgcaccaccacgcccagctaatttttttgtatttttagtagagacggggtttcaccatgttggtcaggctggtcttgaactcctgacctcgtgatccacctgctttggcctcccaaagtgctgggattacagacatgagccaccacccccagctgctgttagacatctttatctggatgtcctacagataactcaacatgacttcactggttgtccattgcagttaaagcatgactgtcctccaaagctagaaacatgagaatcatctttaacaaattgggtatttctttaattcaacagatattcttttattacttgccattctgctaggcctgctgagagctggggatacagtgagagctggggaacagaacagggatggtcctaatctttatggagaaccattgggtggtccattgggtgagatggacatttctccaggaatcccacaaaaatggaatcatgaacttcaagaagaggtcatgtagggaaaggacacaatggggtaagagtatataacagagggcctgacttagtgggaagagagggtggacaggggagactcaaaatggcttaagcaaaatatcaaagaagagctaagtgaaagtagaatattgaggaaagaatattccctgcagaagccctgtgttgttttttttttttttcgatttataaatagtttatcctgttcacattatgcagaatttcagtgtcgttaatccacaatgttagtacggtaacagaaacataaaggagaaaaaaggcaggtggggggaggttcatagtgtggcctgacatagtctaagggttctctcctgtagtatgcatctcctgcaggcaagtattaatatcacttcattgtttgaaggacagtacactatccaggattcatttattgttcaggtgtcttttctaaagtatgagaaaacaggaataaattcaataatgaatatctgcaattcaaaccaatttaactacaggtcagtggtgtctttcttatctattatcacaaacatcccagttgcctccatctaaaaatttctttcaaaagttaagacacaattaattatatcttattaattccctcaaaagcaaaaaaaaac

SEQ ID NO: 16551 - protein, 123 aa, Homo sapiens
MPFLYDISSCWTSFCFLFFSPLDGVLLCFPGWNAVARSQLTATSASQVQAILLVSASGVAGIIGTCHHAQPIFVFLVEMGFHHVGQACLKLLNSGDPPASASQSAGITGMSHHARPFFFFFSF

SEQ ID NO: 16552 - DNA, 1558 bp, Homo sapiens
aggcattttactaaccaatactcattaagcatagcgtggattcatatgacatcaaggagctattttatttggtaaaacgaaaaagcacaagaatgaacgaacgcaagaactgaaacagtggagacacctagaatgacttgtctaagatctaaatcattttgttgtcttcccagcgtacttattatcctgatcattgtcatcagcattgtttgggtccttttagcacagatttctcaaaatgggtaactccataacagttggaagcttacgaattcatataatttgtaagaggtcaatttggaagtacctatctattttaaaattccaataacctgggaatttcatcccatgtctagagtcttttatgtaaaatatttccacaattaggagaaatatgtgcatggggattttctatgtagcggtgttttgatggaatagaaaattgggataaaccaaatttccatcacgaaggaaatagtaatatgctgaataataatacagcgaatattatgcaggctttaaacatcaaaaaagagttcaacttctgacttccgatgatggtgttgaagcaggtcactgctggtttacatttgattttcatgtgggaactctggaagtccgccttagtgattttacatgtggctaaattgagctaatgacaagctgttcgaagtatggcaaaatggaactttaaaacagtatcttgtcaacaaccaagaggacctgtttcacataaagcccacgcattcatctgcctgtccatcattctgtctgtccacacgggcatcattcgttagtggaactgagtgcccgctgtcgagctgacaagcccataacctccctgttcctagtcacacattaattcttcaacaagtcccttttgatagattgtgattaagcttagctactatttccaattgcttccccaaacgtacttctcactgttctcccatcacacccttcagcccatccatgcggggttcctttgcttttcccaccttacaccaaactccctatttttactcccacttttacctcctctccaagacaaaacaaacaaaactagcattttaaaacttagttgtaatctttcttccttcatgaaaatttctccaacagccactcccacggtcctgtgtgttccggatattttaaaataatggctataaggttgagcacttcaggatacgctgttttgctgtgtgcagatggaggcagtggctggagtgaatgaacggcaacacttgctggcaaccggcagaagctgagagacagggaacaggctctcctccagagcctccaggagccaggcctttggacaccttgaatgtgggcttctgggagaccatgcgtttctgttataagcagcccagtctctggcagtttttacggctgccccggaacactcatctatacctgtctgacaaggtcaagctccaaggaagggactctctacatacctacattgtttgcagattttacaataatcatttattcttgcatggctgatcattgttaaccaatacaaataaaataataaagaaatgacccacatttt

SEQ ID NO: 16553 - DNA, 1506 bp, Homo sapiens
  CDS (1107)..(1505)
tttttttttttggtggaggtggggtttcgccacgttggccaggttggttttggactgctgacctcaggtggtccacccacctctgcctcccgaagtgctgggattacaggcgtgagccaccacaaccagcctcccttttgtcagcttatcaccccacccttatgaccttatttaaccttaattacctcccaaaggccctgtctccaaatacagtccctgttggaggtcagagcttcagcatatgaatttagtcatgggtaggtgacacaattcagtccataacagatggtcaaagtctgacccatagtgttcaacagctgctgttagttactctccttggctagtagtatgccttgaggcattaaagaacaaacacacaaagctagtgtggtgtaggaggcaccctgagaagttctgtgatgggctctgtctcctggtgctgcagaggaaggcatttgtgtgtaagtgactggtggcctcaaccatgggagggtctcagatttcaacatcctcctaaatcccttgggggtgtttttgtggaattcagattctgcctaacaggctggggaggtacaggctaagggcctacatttcttttctttttcttttttgagacacagtctcactttgtcacccaggtgaggcgatcatggctcaatgtagcctcaacctcccccaggctcaagcgatcctcccacctcagcctcctgggactacaggcacataccaccacagctggctaatgtatttttttgtagagacgaggtttcactatgttgcccaggctggtcttgaactcctgggctcaggtgatcctcctgccttggcctcccaaggtgctggggttataggtgtgagccaccacacctgatcaaggacctatgttcctaaggagctccctggtaatgctaatactgctggtccacggaccacacttttgagtagtgagggcctgtgttcagcagcacagtagccaggagccacgtgtggctgtttcagtctccgtcttagttaaataaaactagaaaatccagtgcctcagtgactgtaattgcattgcatggaggaaagttctaattgggcagtgccacatcttaaaggaccgaatgatccactttttctttacttttaaattttctttctttatatttttagagacagggtcttgctctgtagctgaagctggagtgcagtggcactatcttagctcactgcagcctaaacctcctaagctcaagctgtcctcccgcatcagcctcctgagtggctgggactgcaggcacatgctaccacacccagctattttttttgttttttttgtagagatggggtctcactatgttgcccaggctggtcttgaactcccaggctcaagcagtcctcccacctcagctactcgggaggctgaggcaggagaatggcgtgaacctgggggggcggagcttgcagtgagccgagatcacgccactgcactccagcctgggcgacagagcaagactccgtctc

SEQ ID NO: 16554 - protein, 133 aa, Homo sapiens [sequence omitted]

SEQ ID NO: 16555 - DNA, 1074 bp, Homo sapiens
  CDS (67)..(690)
gcagtaccagtttgtgcaccacgtcatgagcctctacgaaaagcagctgtcccaccagtccccagaatgactgcgcttctcctacaaggttctctgggcactgcccagcctgagtctcggccctcacccagggccctgcctcgggtcctgggcctgctccccgcttcctccccttcagtcagctccctctgtcctctgtcagcctggcctgacccctaccctccagcattgctcttcctactgtacatattggggagtggggggcagggtcgggaagggacatgccaggccaggcctggggccccggggcctgacccacaccacgcagaccccgggctccagtttttaacgatggttccatcaatacctgatccagaatgtttccgtgctacactttgtgtcctgctgcaatgtgttctgtctgtccatccatctctgccctctgtaccggacactgtgtctcctcagccaggaaggggtaatgagctccagcccctaagcaaccggacttgcctgcctcggcctcacccgcacttctcccaaaaggcagatgacggggagttaggcatggggagctccagaaggtcaccagagagctttcagctgagggagagttctctaggttggagtgggcatcacagccagggtggcctctgggtgtcagatgctctcaggagggtgcccagcctgtgaggcactggcaaggtagggggcagatggggcatggagaacccagaggatctaggccctgttggggaggggaggggagctcaaggtttgggtggggactcagcccagatctacgtgagacatttttctgtgtcactgtgggaaagccttcccagaagtctcactgcgtgttgctctgcgtgtgttcccatgtccgtgcgtgtgttgagagcccatcaggagggcatgcatgactctttggcaacatgtattatcttggagccacgtgtttttattgctgactttaaatatttatcccacggcagacagagacatttggtgtctttttataattcgctcgtggtcattgaatagagcaataaacggagcattttgagcaaaact

SEQ ID NO: 16556 - protein, 208 aa, Homo sapiens
MTALLLQGSLGTAQPESRPSPRALPRVLGLLPASSPSVSSLCPLSAWPDPYPPALLFLLYILGSGGQGREGTCQARPGAPGPDPHHADPGLQFLTMVPSIPDPECFRATLCVLLQCVLSVHPSLPSVPDTVSPQPGRGNELQPLSNRTCLPRPHPHFSQKADDGELGMGSSRRSPESFQLRESSLGWSGHHSQGGLWVSDALRRVPSL

SEQ ID NO: 16557 - DNA, 2281 bp, Homo sapiens
  CDS (44)..(550)
acaactggcctgaccttcaaaggccttcacagctcctgccttcatgttaccgtctactatgttcctcgtgcaccttccactcagcacaaacaggctgcactgcctccgaaacacatcacttgaatcctacctctgctcctttgtccatctgaatcaccctctccacatttctgaccgtgtaatcctgatctcacttcatgaggcagttcgcttctcttttgcatttagctttccccggggtacactgtcaatagcctactgtctgatgtcatcagtcagcacttcatcagaggcaattatgtccacagagcttttggctaattactgtcactcctctttacatgtgtgcatatgcatatcatctttccctaatgagactggaaatcatgattcattccctggagcagtggtttccataagtgaccaacccacagaccagtgcaaactggctgcaaaagagcttcctctgaggaacttattagaatgcagattctttgactgcatgggagaggaggatctcataaatctgggtgtaataggcacagaacgttaggtgtaatatgggcgggactctggactcagcatatccaacaagctgctggctgattccgacgatgccgatgaattgccaggttgggaactgctgcccccagagaacctagcagagagctctgtacgtggtaggtgctcactcccctattgtttgggtgtatgcctcctgataatgaacttgatcgtaactttattgttgtattatgcctgtattgtttccttaagtgaaggaagaatgcttttgagtacctaataggtggcaagctctgtgcctacttacatacatgaactattccttttaataacctttggaaataaagtggcatttccattgggcattagaaatctgaagactttcgtttacagctgttgcaacagcagaactagaattcgacctccgacatttctgctcaccagagggcatgaactgctggtttgtacctggcttgcagataccttctttgggcagcacaatgttcaaaattaaaaaaactaccaacacttctaaactggatactttgtatcaatatctgggtttctggcttctcttcacgggaaaaaaacaaacaaacaaaaaggtttggtgaacactggggcccacattcctgcagggcaacagtcacatggagactttagatgggcacgtgcccagaacacactagagtccccatcgctccccattctcttacattctgttcccaactaggttcttataggcctgggtttgtgcctgttgcacacttatctactctcttgcttcccactggtcaggaagtctggcaaacttaaaaggcctctttttgttgctctcttctgtatggatctctcatcatagaggtgtgtgcatttctgactttgtgatttcaatactaaggaagctgtcggcagattatcaaggaaaacggggatcgctgctccccaacgtacacattctggtgtgccccagtaaaattctatattcagcctccaaactagctgggaaaaatgtggcaaatcatctacttgctccaattcaatggtgtttagaagtaggaagtcactgtgagcaatgccaccaagtggtggagagactccatgcagaatcgccaccttcagccagagaggctgggaggccgaagacctctctcaatgcacagggccattcagaaactagaaacaaaatgcttgctcatctccctaggccactccttccgaggctttttgagacggggtctcactgtcacccaggccggagtgcagtggcacaatcaaggctcactgcagcctcaaccttctgggttcaagcgatcctcccacttcagcctttcaagtggctgggatgactacaggcatgggccaccacagccagctgattttttttttctttttagtagaaatgaggtctcgccatgttgctcagactggtcttgaaccaacacatctttagctttttaaaagacagccttggccagccatggcagctcacacttgtaatcactgcactttcggaagctgaggtgggcagatagcttgagccgaggagttcgagaccagcctgggcaacgtggtgaaaccccatctctacaaaaaatacaaaaattagctgggtgtgatggtgcacatctgtggtcccagctgctggggaggctgaggtgggaggattgcttgggcctgggaggtcgaggctgcagtgagctgtgattacctcactgcattccagcctgggcaacagagaaccctgtctctattt

SEQ ID NO: 16558 - protein, 169 aa, Homo sapiens
MLPSTMFLVHLPLSTNRLHCLRNTSLESYLCSFVHLNHPLHISDRVILISLHEAVRFSFAFSFPRGTLSIAYCLMSSVSTSSEAIMSTELLANYCHSSLHVCICISSFPNETGNHDSFPGAVVSISDQPTDQCKLAAKELPLRNLLECRFFDCMGEEDLINLGVIGTER

SEQ ID NO: 16559 - DNA, 1702 bp, Homo sapiens
  CDS (899)..(1576)
tttggaggagaaaggatcacaatgaactcctgaaacatacaacgtgctagtttctttcatgcctctgagctcttaagtcttcagagagagaggcaggcaggtataatgcagagaacacaggctttggagttagaacctgagttggaacctcactgtaatcagctacctgtgtggttccctgaagttgcatgtctccaactgtaaaatgaggcagaatcatgcctgccttgaagggctgctgtgaggaatgactaaaacaacatatttggtattgaatactcatcatttttagtattctggaaataagagaacaaattttattataaggcaagggggctgaagtgtgggactcagaggatgcagatggaggaggacagtcgtgccatggggagcatcctgtgtgcatcagatgcagtttaattgctgagagtccacaataccaaggaagagggcgcccctcaggaagcttatggtagagtggagaatacaggaaacaagtaacaaactaaatcacagaagaagaaacattcaagtcactatcaaaggaataagaaacagcacattcagtaggagggttcagtcaagagcagagggctttgccaggcgtggtggtgcacgcatgtaatcccagctactcgggaggctgaggcaggagaatggcgtgaacccgggaggcggagcttgcagtgagctcaaatcgtgccactgcactccagcctgggtgacagagcaagactctgtctctaaaaaaaagtacttctcattcaaggaaggcttgtagaggaaaatgaccacagcttgcatcttttaggcagtcattccgaaaatccctcctgatgacaggttccccactcattccccccttcctccacaggcttccacctctacctcggatgggatgctgaccttggacttgacccaagaggaagacccttcccctgaggaaccaacctcttgtgctgagagctttcgggttgacctggacaagtctgtggcccagctggcagggagccggcggagagcggactcagaccgcatccagccctccgcagaccgggcaagcagtctctcccgaccttgggaaaaaacagacaaaggggccacctacaccccccaggcacccaagaagttgacgcccacagagaaaggccgctgcgcctccctggaggagatcctatctcagcgggatgctgcctctgcccgcaccctccagctgcgggctgaggaacccccaacccctgccctccccaacccggggcagctgtcccggatccaggacctggtagcaaggaaactggaggagactcaggagcttctggcagaggttcagggactgggagatgggaagcgaaaggccaaggacccccctcggtctccgccggattctgagtcagagcagctgctgctggagacggaacggctgctgggagaggcatcatcgaattggagccaggcaaagagggtgctgcaggaggtcagggagctgagagacctgtacagacagatggacctgcagaccccggactcccacctcagacagaccaccccgcacagtcagtaccggaagagcctgatgtgagggcagggtggggtctggaacttgtcgggttggacagactcttatctccgtgttgctggataaagcttttttatttacctcaatcaaaaaaagaaaacaaaaatgaactcattgctcttgctg

SEQ ID NO: 16560 - protein, 226 aa, Homo sapiens
MLTLDLTQEEDPSPEEPTSCAESFRVDLDKSVAQLAGSRRRADSDRIQPSADRASSLSRPWEKTDKGATYTPQAPKKLTPTEKGRCASLEEILSQRDAASARTLQLRAEEPPTPALPNPGQLSRIQDLVARKLEETQELLAEVQGLGDGKRKAKDPPRSPPDSESEQLLLETERLLGEASSNWSQAKRVLQEVRELRDLYRQMDLQTPDSHLRQTTPHSQYRKSLM

SEQ ID NO: 16561 - DNA, 1492 bp, Homo sapiens
  CDS (16)..(1389)
tcttcccttcccgcgatggcggcacagggagctgctgcggcggttgcggcggggacttcaggggtcgcgggggagggcgagcccgggcccggggagaatgcggccgctgaggggaccgccccatccccgggccgcgtctctccgccgaccccggcgcgcggcgagccggaagtcacggtggagatcggagaaacgtacctgtgccggcgaccggatagcacctggcattctgctgaagtgatccagtctcgagtgaacgaccaggagggccgagaggaattctatgtacactacgtgggctttaaccggcggctggacgagtgggtagacaagaaccggctggcgctgaccaagacagtgaaggatgctgtacagaagaactcagagaagtacctgagcgagctcgcagagcagcctgagcgcaagatcactcgcaaccaaaagcgcaagcatgatgagatcaaccatgtgcagaagacttatgcagagatggaccccaccacagcagccttggagaaggagcatgaggcgatcaccaaggtgaagtatgtggacaagatccacatcgggaactacgaaattgatgcctggtatttctcaccattccccgaagactatgggaaacagcccaagctctggctctgcgagtactgcctcaagtacatgaaatatgagaagagctaccgcttccacttgggtcagtgccagtggcggcagccccccgggaaagagatctaccgcaagagcaacatctccgtgtacgaagttgatggcaaagaccataagatttactgtcagaacctgtgtctgctggccaagcttttcctggaccataagacactgtactttgacgtggagccgttcgtcttttacatcctgactgaggtggaccggcagggggcccacattgttggctacttctccaaggagaaggagtccccggatggaaacaatgtggcctgcatcctgaccttgcccccctaccaacgccgcggctacgggaagttcctcatcgctttcagttatgagctctccaagctggagagcacagtcggctccccggagaagccgctgtctgacctgggcaagctcagctaccgcagctactggtcctgggtgctgctggagatcctgcgggacttccggggcacactgtccatcaaggacctcagccagatgaccagtatcacccaaaatgacatcatcagtaccctgcaatccctcaatatggtcaagtactggaagggccagcacgtgatctgtgtcacacccaagctggtggaggagcacctcaaaagtgcccagtataagaaaccacccatcacagtggactccgtctgcctcaagtgggcaccccccaagcacaagcaagtcaagctctccaagaagtgagcagcctggcccctgctgtcggacctgagcctcctggctcccagcctgtaaatatgtatagacctgttttgtcatttttttaataaagtcagttctggtg

SEQ ID NO: 16562 - protein, 458 aa, Homo sapiens
MAAQGAAAAVAAGTSGVAGEGEPGPGENAAAEGTAPSPGRVSPPTPARGEPEVTVEIGETYLCRRPDSTWHSAEVIQSRVNDQEGREEFYVHYVGFNRRLDEWVDKNRLALTKTVKDAVQKNSEKYLSELAEQPERKITRNQKRKHDEINHVQKTYAEMDPTTAALEKEHEAITKVKYVDKIHIGNYEIDAWYFSPFPEDYGKQPKLWLCEYCLKYMKYEKSYRFHLGQCQWRQPPGKEIYRKSNISVYEVDGKDHKIYCQNLCLLAKLFLDHKTLYFDVEPFVFYILTEVDRQGAHIVGYFSKEKESPDGNNVACILTLPPYQRRGYGKFLIAFSYELSKLESTVGSPEKPLSDLGKLSYRSYWSWVLLEILRDFRGTLSIKDLSQMTSITQNDIISTLQSLNMVKYWKGQHVICVTPKLVEEHLKSAQYKKPPITVDSVCLKWAPPKHKQVKLSKK

SEQ ID NO: 16563 - DNA, 1916 bp, Homo sapiens
taagttaattcatactggagaaaaaccctacaaatgtaaagaatgtggaaaagcttttcaccgatactcaatccttagtacacataagaaaattcatactggggagaaaccccacaaatgtggagaatgcggaaaagcctttaactggtcctcaactcttattacacataagataattcacagtggagaaaaaccctacaaatatgaagaatgtggcaaagcttttaaccagtcctcacaccttatgagacataagaaaattcatagtaaagagaaaccttacaaatgtgaacagtgtggcaaggtctttaagaagtcctcaactcttactgcacataagatcattcatactggagagaaaccttacaaatgtgaggaatgtggcaaaggttttagccaactctcaaaccttactaaacacaagaagattcatactagagagaaaccctacaaacgtgaagaatgtggcatatcttttaaccagttctcacaacttgctatacataagatgattcacacttgaatgaaaccctacaaatgtgaacgatgtggcagttgttttaactagttctcgaactttactatgcataagaaaattcaaactggagagaaactctacaaatgtgaagaatgtggcaaagcttttaaccaagtctcaacacttactatacataagataatttatactggagcaaaaccttggaaattcaaagaatgtggtaaaacttataatcctcaaaacttcttacacctaaaattcatgcaggagagaaaccccacaaatgtgaaaaatttggtaaattctttaacaaatcttcaaccctttctgcacataatataattcatactggagagaaaccccacaaatatgaagaatgtggtaatgcttttaaccaattctcaaatcttactaaacaaaattaatactgaaaatgttacaaaccagaaaaatgtgaaaatgattttaaaaaaaccttcaaatttttctaaacataaaggaaatcatactggtaagaaattataaaaatgtgaagaatgtgacaaagcctttaaatggttgtcacacttgattgtaggtaagataattcatactggcagaaactcccagaagtgtgaagaatatggcaaaactttaattcctataccttattgcacaggaaagcatttatacttcagaaaatgttgtactgatataaagaatgtagaaaagccattaatatgtgcttacatcttattcaacattagagagttagtacttaataaaagcattataaatgcaattactgtcaaaactcagtataaggttttgttttagtgtgtgtttttgtttgtttgtttgttttgtttgtttttttttaaatgagactacgtaatactctctcccaggctggagtgcactggtgcaatcttggtttactgtaacctctgccttccaggttcaagcaattctcctgcctgggcctccagaatagctgggactacaggcatgtgccatcacgctcggctaagttttgtattttttagtagagacagggttttactgtgttggccaggctcatctcgaactcctgacttgaaatgatccatacacctctgcctcccaaagtgctggaataacaggtgtgagccactgttcccagccaatataagcctttaaagtaaaaaaagagtttttattttgaagacaaacattagaaacataaagagggttgtagtgcctgccttacttgtatcacagatcttattgtacacattttgtatccgaagcagttgctccaaacttcgttcaacatcagggaatttatatcggagaaaaactacaaatgtaatacatttcaaaaatttttcaaaaactacatcttagaaaacaccaggggatgcatactaaactatatttttccacatgcagtaaatat

SEQ ID NO: 16564 - DNA, 2274 bp, Homo sapiens
tttatttcccaactcacatttgaggtttacaagttttgcttagtgtgcttggtgctactcgatcaattgagacacagttcctctctggtgggggttcatgtctgtgtccagacatcttgttggctgtgctctaatcacagtgatcattttgagctgttgttaagaaaaaacatggcttccaacatagatgccttgttttctccaacaaatatttaagctatattgccacctccattttagttgtttccctttagatctggctgtcataatttatctgttttgcttcatccaagatgattgctgtaaacaggcatagggtgctgtcttcccttctaggcagcccagtaattccatctcagataatttctagttacctgttggatacttacgtgaaggtctgaataaattatgatcattacgaacatgatacatgagtaatgaattaaaagaaatatttaaaagttttatattttaagtctccagggagtaaggcattgagaaaatggggtaaatatttcttgtcgaagagaaatcaaatatgggtgaatcattgactactgggagtccttgggtttattctcagatctttcactttttggcagtattctggaagcaagttagtgacttgactgaagctcagtttgcacatctgtgaagaggacagtaatttctggtctcatagggctgttaagagcatggaatggaatccaattcggcttcatctatctttatttttcatgtaatctgtcaggcaccatgttagtggaatgtcttgtaaataatgaatcgtatagcctctggtctcaaggatctcataaacctactggacagatattatgtattttggtttcctacatgacatccaagttcatgaatcttttgaattctttccatacaacccaggatgcaagcttctggtaagacaaatggatatttattaagatcctgtaagaaacaaggcagaaaattaaagtcattaggagtatagaaataaaagatttcttgggctttcacctctgtaaacttgaggagtttggctaagtcagtagttggaagcgtagtaaggtcagaagtcaccgtcaacttccgttaaatcccaaagcttacaattatttaacagaggatcacctacgctaacagaatgttgggattttgtttgtttggggttttggtaaataattatatacattcaggggtcttagtactgggtagcttatataagtccaaaaatatgattgttagccttgccttttgattaataaaatgggggaaatatgttgttaaaaaaaaaaacgaaaaagggcaagaaactatttgaaaaccaggcattgggttgaattggaagtgaatacacttcaaaaggtctgaggagaaaatattagaaaccactgatttggataatgtctaatagctcttttaactcttagtcttttacctaaatatccttgatatttacagcatagtaaaatctggttttccaaggattctgatgaaagaaaagaaaaaaaatgaaaacagatggacaatctgagaagtaactagtgattgatggtaaatgtgaacaatgcttcagaaaggaaatgaaatgtctgcagcagatagaagtgtgtaaattttgccttcactttagagctagaatcactatgagtggtagcatttcagaatcagaagaatggaaagctcagttgattatcatcacacataggagtaaaaggaaaggttcacatttttattgacagctcatatcgaaaagacagctcctcttagagagaagtgaattctccaccttcttgttgtttcttctgccacctttgccctcatacagcacgctctatcttcatcttcttcccttttccctcctcctttcctgtctttccttatcttcctccattctctccccatttcctttctgtgctccctctcctttctgcactcacctccttcacctttcatctgtaggtgacactaaaccaaggtttaagaagagccaccttggctgggtgcaatggcttacgcctgtaatcctagcattttggggggctgaggcaagtggaacacaaggccaggagttcgagaccagcccagccaatgtggtgaaaccctgtctctactaaaaattcaaaaattagctgggcgtggtggcacgcgcctgtaatcccagctactcgggaggctgaggtaggagaattgcttgaaaccagaaggtggaggttgcagtgagccaagatcgcaccactgcactccagcctgggcagaagagtgaaactccgtctc

SEQ ID NO: 16565 - DNA, 1632 bp, Homo sapiens
  CDS (74)..(376)
gagaggccgcgtcctcagctggtcctagacatgcgtggcgtcggggctgtggcacggtcgggtccgggcttgaatgcaccaaggaaaggccatttgtggggacatagcaagaaggcagctgtctgcaagccaggaggagaaccctcaccagaaacctcacagaaatcggccaacaccctcatctcgggcttccagcttcagagcaacgagaaaacaaatttctgttgtgtcctggttcccatttgtaattggcaccctaatgaaaccgttttctgtagccctggaaatggctgaaaatgaggggagggaaataaagtgctataattcagagcatggagcacaccttcctggttcacctgagctggattcggagaggtaaaatggccattacctcgtctaagctgccacttacagacatctgcttaggaatcaggcactggatcacagccataccctactcattaacacctgggggacctcaggcatgtcactcgaccttctgtgagcctcatctataatatgggaatgatatctcctacttcactgaggtttgtgaggactggagatcgaacatgtacctactgggccctctagaaatggtagacatcatcactgctctttcagacatgcagcaggagggggaaggtgccatttaaagcaataattgactgcagggttgttttttttcttgagacggagtctcgctctgtaactcaggctggagtgcagtggcgcgatctgggctctctgcaaactctgcttcctgggttcacatcattctcctgcctcagcctcccgagtagctgggactacaggcgcccacgaccacgcccggctgatttttttgtatttttttagtagagacggggtttcgccgtgttggccaggatagtctcgatctcctgacctcgtgatctgcctgcctcggcctcccaaagtactgggattgcagacatgagccaccgtgcccagctaatctactgtgttgtgtagagatgcagacatctgcttaggaatcaggcaggcggatcacatgaggtcaggagttcgaaagcagcttggccatcatggtgaaaccccttctctactaaaaatacaaaaaattagctgggcatggtggtgcacgcctgtaatcccggctacttgagagactgaggcaggagaattgcttgaacctgggagtcagaggttgcggtgagccgaggttgtgccattgcactccagcctgggcaacaagagcgagattccatctgaaaaaaaaaaaaaaaaacaccgatctcaaagagggagttgtgagaaccccaacttgaagctggttgctctcaagttccagaggcccggacttgcgactgacgtctggggagttgggggcagcagtcttgggaactgagctgtgagatctgatactatctctgggtctatagtgctggcattgaattggagaacacccagctggtgttcactgcttggtgtgtggcggaaaaaccctcacacatttggtcacagaagcccttttctgtgttggtgattgttgtgctggtgtgagaacagaggaaaaacaccgcttgcagagtttttcctgaaacaatactctttagagcgatagaaataaataccacgacctgcgcattc

SEQ ID NO: 16566 - protein, 101 aa, Homo sapiens [sequence omitted]

SEQ ID NO: 16567 - DNA, 1645 bp, Homo sapiens
ggattgaattgcactgaaatgaaataactgcttaggcatgtatctttacatatgatcccagtattgcaaagtacaagagagaaaaagttattttatagctaaaatcaggaaattataaaaacaggaaataataacaagagttttaatgaaagataagtgaaaatgctgtaactttttgtttgcatgtttgtctgtttaaaattgaggtataattatgtaaactaaaaaatcatctattttggctggacgcagtggcttacgcctgtaatcccagcactttgggaggccgaggcgggcagatcacttgagatcaggagttcgagaccagcctgaccaacacagtgaaaccccatctctactaaaaatacaaaaattagcagggcgtggtggcacacacttgcaatcccatctgctcaagaggctgaggcatgagaactgcttgaacccagaggcagaggttgcagtgagcggagaccatgccactgccctccagtcagggtggcagagcaagactccgtctcaaaaaaaaaagagagagaaaatatatatatattttactgttcaatttgatgagtttcagcaattttatatatctttgttaaccaccatgcaacacaacatacagaacatttccatcacacttcaaaattcccttgcgtctttttccagtcgatactgcccctccccactagtaatcattcttctgactcctctcactgtagatttgctgtgcctgttcatgaatggaatcatacaatatttgttcttttgtgtttggcttctttcattcaatacagtgtttttgagattcatctgttttgttgcttatattagcagttcattcgtttttattgagcaatacttcattgtatgaatacaccacaatttatttctgtaatgataggcattaggattggttccagtttttgactactatgaatacaaattcagtgaaaattcttatgcaacttttttttagccacatttttatttcttttgggtcaatacctagaagtagaattgtcctgtcgtgtaaatatatgtttaactttataagaaactgaccagtagttttctgaaacgattgcatcattttacacccccgtcagcaatgtatgaaagttctagttgctcttcatgctcactaacatctgatattgttctccatttgattttagtcatgttagtagatgtaagatgttagttgcatttccctgatgagtactgatgttgagaacttttcatttgcttgttagccagtcacatattttcttttgtaaattgactgttccaatcttttacatgttcttaaatctcattatttttgttattcatatcaacagttaccaatagggcatttttatattttatcactagaaatcctttgtcacatatacatacctatattgcagatatttttcctcaaaggcatgtcttgcttattcattttcttttccttagtgatgtcttttgatgagcagaaatgtcttgatcatggtagttttatagtagtcttgaaatcaggtgatgtaagttatctttttcaagattgttttgactaatatagattctttgatttttccctaatgtggcaatcaacctttcctgccaccagaggtatgctagaagaaaaaaaaaaaagaag

SEQ ID NO: 16568 - DNA, 1741 bp, Homo sapiens
gaattatgccaagcatttgtataaggctaatgtttagcaggaagcattcatgatcaacgatttatcttgaaaataagattccttcgtctgagggattgatctgtatgtgtgtgtatatttagtttctcatgacaagaaaaatggtattcagtcagctataatatcagtatctataatctatttctcggtaaacatatttgtacatatacacgtttatttttctaatttaacagatgtccttggtatttatttgcattttgtcatagcattcttgctcatatgacctgcactccagcctgggtgacagagccagacttatcccaaaaaaataaatgtacagtttacagagaaatactagacacaggtaagttgaaaataaatagattgaaaagcatattttaagaaaacagtaaaagattgaagtgactatattaatatcaggtaaaatagattgcaacagaaaaattttgtatcaggtaatgtggattcttcatagtaacaaaagttcatcaggaggacatatcaatcataagtgtatatttatttaatgcagaatgacttaatacatgaaaactgactaaaggcagaaatagttccacaatcagattgagattttaatgtaactctttcagcaactaataaaaaaaaattactcagaagatttggaatttattattagccattcttgatcatattgatgtttattaaacgttatatcttacagctagagaattctcattcttttcacatgcatatggtacattcaccaaaacagagcatgctgggctttgtacatgctgggccataaggtacaaaggattaagattatatagagtatgaattttgaccgcagtggaattaaatttcaagtatttggaaagtgacacacttttttgtaatcagttggtcaagaaatgtcaaagggaaatcagaaaatattttggaccgagtgattgtggaaatgcaagataacaatttatgagatgaagctaaagcagtgtttggaggaaatttatatatttaattatgttggaataaaactacaattatctaatttcctacctaattaaacatttaaagaaaacagcaaggtaaacccaaggtaatgtaaaaaaaggaaataataataaattcttgaaatagaatacggacaagtagagaaaaataatgaaactaaaaagagttcttggaaaagttagttaagataaagctctaattagactaatccagaataagagagaagacactaattaccagtatatttaataaaataggagacatcactgtcgatcatatggacattaaaaggccttataagagaatatcataaacagctctaagccagtaaattagacaacttagttgaaaaaaataaattctttggaaaacacaaattattacccaggagcaatagaaaattttagtatccctatattgattagagaagctgaatttgcaattaaaaattattccaccaagacaatgtgaagcctaaatggccacactaataaattttatcaaacttcaagaaagaaatattgtgaatcttatgtaaagtcttccattaagaaaaaaaaatgagaatacttcttaactcattttattataacaaattggtaactatcattgttactgtgatactaaaattcaacaaagataacagcaaaacaaagaatcagtattcttcatggatatagatgtaaacattttaaacaaaatttgagcaaattaaattaacgat

SEQ ID NO: 16569 - DNA, 1701 bp, Homo sapiens
tgtccagtctggtctcgaactcctgacctcaagtgctccacctgcctcagccttccaaagtgctgggattacaggcgtgagccactgcacccggctagaactcactttctccaaatccctctgcttcgaatttcaccgtcttcagctctttctagttctgggcctcaccagcctctcattctgcctgttttcaaaccttacgatccccaaaaattgtctggttctgggcctctaactccctctggctctatagtctatgactaccagattcttttggttctagaattcactaacttcctctggttctagacctcttcctataaattaatccctcttgttttagatctcacaccctccaacgccctctggttccagatcttatattcagtgatttcctctggttctggaccccacaactccaagcttcctattggttccagttctcctgatcggtaatacatttggttccaaatccagacctcttaatctctctcttttttttttttttttttttgagacagagtcccactctgtcacccaggctggagtacagtggctcaatctcggctcactgcagcctccacctcctgggttcaagcaattcttgggcctcagcctcccaaatagctgggattacaggcatgtgccgccacgcccagctaagttttatatttttagtagagacagtgtttcaccatgttggccaggctggtcttgaactcccgacctcaactgatccacccgcctcagcctcccaaagtgctgaaattacaggagtgagcctggccagacttcttaatttctaaatcacttttgttttagaccttatgaggctcagcttattcttctgcagttctctataaccaagactcattttctctcatcaaaaacaagtacagagagtttgatgtgtttatctcttttttcttcctcttcttttttttttttttcttttttgagatggagtctctctctgttgcccaggctggagtataatggtgccatctaggctcactgcaacctccgcctcctgattcaagtgattctcctgcctcagcctcctaaattggtgggattacaggagcccaccaccacatccggctacctttgtgtatttttttagtagagacggggttttgccaagttggaggggctggtcttgaactcttgacctcagatgatccacccgcctcagcctcccaaagtgctgggattacaggcataagccaccgtgcccgaccctgtccttatcttataataaccagttcttctagaaccagacgatgctctagttctcctagattctgaacctcatgacctgtaccactcactagttccagactacacaacttctagaaggtgccacctccagggtcctgattcaagatctggtgatctgctgtttctctggttctagaactgacttacaagtgccttctgattctagacctcattccgtaagttcccttggctctagacttcatcatttccagctcctcctcactcaagatctgactccaaattaccctgggtctagaattcagccttcaaatatcttctgattttagactttgccttatacatttctctggttttagaccttaccaccctcaactccttctgattctagatcttatggttcccaaatctctctggttctagaactcagattttaggcttttgtttttccttttttttgtt

SEQ ID NO: 16570 - DNA, 2192 bp, Homo sapiens
cacatttctcagaagcacaccattctgctctgcaaatatctttgtaggagaaattggaaattgacaaatacattcacttaaattttgctttgtgctgaaaattgaggaaaaatttaaattggccatttgcacattattagtagtaaatcaacccatgtaaagatggaaactatggtcatttcaaaagtgattttcatttttggtaagtgggtcctacagcattatgtcctcatatttgtgagttattgcaccctggctagtattttcattgctgccttatgtttatttgctgcaaatccctctcaaaactgtgtgcattggttataatgctaatgaggaagataattcaaactaaaattcaaatcataatagctttaggattttagagagatagtataaggttaactcattttcagcatgtgcagacttaattatgcatgggatgaaatacagtaggcaagtctcagcctaataataaataattgaaaaatataacctgtacaatatttaaactggctttaatattacttaattatcacattattctttttcattcatcatttcttttccaattctctcaccctaccattaagacagtaatgattttataagatgtagatccggtattaagttttgcttgctctactgtctcaaattattataacttctttgttattactggcttgtttctgtttgtctttcacaagtctttgactcagtagtagtagcaaatgacagagatcttcaagtgtcttaatgcttgtcaatataatattattccacttgataggatgtgtccccagatacattacagagtttaatcgttgatcactctgcccacagtctaattgtgataacaaactaatcgcagctgttacagagatgccagttaagtaatccgtgtttcagctgagtttctcaatggcagctttattttatagggccatctctgacgagattcatttggcagatatttttctaacaaatgttcgtcccagatgctgctagtatttaaacaggatatgctaagatttagatagaaatataaaatccttggatattttaaaacctagaattctaaaataatcccatagaaagaacagtagttctgcatatgggaaagtgccttgtacttggtaaaataagttaaattttcaatatttacatgtcaaagagaacaaggactatctatatatgcaacatttatttttgcttatcatggttgaacaattgtcagcatcagtgctaacaccccatatgtgatgtatgtattttcactctctcccactcaaggtttttattgaactctaattagcagtttcttgcgtgtgaaattttgtagaacatttgctactcccagaagtcttgaaggtctaaaccagcaatgaaaaccactctgatttcctagatactgtgaagtaaaccaatttgatacttataagaaattatattcccccttaatgcttttcctacattttaatttcaaactaaggaaaggcacaaatttcacttttttatgtataatttattgcttggcatccctccaaatacaaatcctgtatgaataattacaacccctttatgtttatatggttgctgctacaatgaacaggaaaataaagcaaaaggaatgaaaatgaatgtttgggtttcattatattgttaagtcagttttgtacattgaattatttagtatttaataataaatatctttagtaagttaatatgtgcctgatataaagaaaatgttaaggcgttcataagttaaagtcagaaatagcaaaacgaccagatggttagtaatcagattaaaacaaaacaaattacaatattatttttaaaagaattaagtggatttaaattacttccaaaatacttttgtttataggcaacaattaagagaaacaaagtgtaccagcacacagttaaactggcttttattcttcacttgagactagttctaattgatcactgtgctattgtatgatttgattgtgctgacagttacatgccactgttcccataataacaatttttcttctttgttcaaatgaattttctaattacacgtgtgatgggatgttttaattcttttcccttttcaaatccaccttcctgttgcaatgcatgatgggcaggctcaatattgtgcatgacacccgctacaagtgttggtaggtgccagctttgtt

SEQ ID NO: 16571 - DNA, 1308 bp, Homo sapiens
  CDS (842)..(1183)
acacttccatgcacatttcaagaatgcagatggacacctctccctttggtgctactgtctgagggtgtaagattttaaagtgagcatctggcggtagtagcatttttagatatattcttggctaagtttctcattgcagtgcctttctttcctgccagtagtttcacagctatttatccagcttggagaaccttccctaatttcatatcttctagccaagtttttacatgtctgtcaccacaacataaacatgtgagttgaataacttttaaaagcagagtctgtctgtaaacaagtttttgccttctactttcaattgccttcttagatgagctaagtgttgaacggccggctcagtgctgtttttgggactatggaatgcatcttcctccaccactcccctcatttaatgaaaggactttcttctctctccatctagcacagtaatcgctaatcccttagacaatgttttcccaaaatttcaggcagctattctatcaacaaactgataattaaacttgtgtcacatctttgatattctgttgtattaattctgttggggtagtctttaatcttcgtgaaactttttctttccatattaggaaatattttcctaatatctctaaagcctaacttgtccatctgacttactgtctgaatcttcccaacttatgcatgcccacttttattgtttaaatttgtttcttttttttttttttttaaacatagggagactgcattgcttattgatccaaaaaattcctgttcttcatcccgccagtgggttgctctggttgtgggacatgaacttgcccatcaatggtttggaaatcttgttactatggaatggtggactcatctttggttaaatgaaggttttgcatcctggattgaatatctgtgtgtagaccactgcttcccagagtatgatatttggactcagtttgtttctgctgattacacccgtgcccaggagcttgacgccttagataacagccatcctattgaagtcagtgtgggccatccatctgaggttgatgagatatttgatgctatatcatatagcaaaggtgcatctgtcatccgaatgctgcatgactacattggggataaggactttaagaaaggaatgaacatgtatttaaccaagttccaacaaaagaatgctgccgcaggtaatctttaatagcttgagatagaaatggagagaaagtattgtcactctatccaggctgggacattttatttttgttctgaatacttaactcaaggtcaggatccatgtaataaataaattagccttatttg

SEQ ID NO: 16572 - protein, 114 aa, Homo sapiens
MEWWTHLWLNEGFASWIEYLCVDHCFPEYDIWTQFVSADYTRAQELDALDNSHPIEVSVGHPSEVDEIFDAISYSKGASVIRMLHDYIGDKDFKKGMNMYLTKFQQKNAAAGNL

SEQ ID NO: 16573 - DNA, 1394 bp, Homo sapiens
ggtagtggctgctgtgaccgtctcccagcatatcctaagaatggaactttctcaggattcttcatggctcatggaagaaaacatataagagcatgcagatcctgtgtatctacggcagggaacattagctccctgctcagcctccatggaaccacaggattgtattgtatattcctaggagtgaaactgctgggtcatatggtatctgtgtcatctgtttgaggaaccaccagacggtttttctaaatgcagcatttttctgttcctaacaacagcatatgggggttctgatttctccacatcctcaccaatgcttgttattgtttgactttttgattctagccaccccagtggatgtgaactgatatctcactgtggttttgatgtacatttctgtattagtcagctagggctatcataataaaataccataggctgggtagtttaaacaacagaaattctcatgattctggaggctgggagtccaaaatgaaagtactaataagttggtttctggtgaagcgtctcttcctggcttgaagacagccactttcttgctgtgtgtccatgtggcctttcctctgtgcacatgcagtgggagagagagaatactctggtgtttcttccgcttcttataaagatatcagtactactggattagggtcctttcctgtgacctcatttttaccctttttgcctccttgaaggccttgtctgcaaatacagttacactgggggttagggcttcaagataagaatttgggaaggacacaaataagtctataacaatttccctggtcactaatgatatcaggcatctttttatatgcctattaggctttgtacaaataaatgattccagaaatcttaaaaagttatagttttcaatgtcatttttagaataaaaaggtaaaatcatcttattagaagtgaagcacaattaaggtttttgtttgaagccataccaacaaatagcatcacataaagagtgacataatttagatcaagtatgttgctgagtcactaaatgtaaattattggatcatattgattgtctaaaaaggatatccctaaataagtaacatagaaagatcattataaaagatcagtaaagttgggccaggcgtggtggctcatgcctgtaatcccagcactttgggaggccaaggcagacggatcacgaggtcaggagatggagaccatcctggctaacacggtgaaaccctgtctctactaaaaatacagaaaattagccaggcgcctgtagtctcagctacttgggaggctgaggcaggagaatggtgtgaacccaggaggcagagcttgcagtgagccgagatagcaccactgcactccggcctgggcaaaagagcgagactcagtcccaaaaaatt

SEQ ID NO: 16574 - DNA, 1340 bp, Homo sapiens
cagcaaaatgccgtgactgggtagcttataaacaaaagtaatttgtcaccattcttgagtctcagaagtccactcaaggcacagactgtgcctggtgagggcccactttcaggttcataagtgatacttggctatatcctcacatggtggaaagaacaggacagcactctggagtctcttttatcagggcactaatcacattcatgagggctctaccttcctaattgaatcatagccccacctcctaatactatcatattggtaattagacttccacatatgaattttgtgggggacacaaacattcggagtatagcacaggttcacaggaaaaacgtaaggaaaagagtactcagaatatagggtgatagatacatataattttaaggtaattcaaaggagggagtgattaacttgtgactgaatcaacaaagactttttgatgagtttgtagctgaggttaagcataaaacagttttttagtggaaaatttgaagcatgtcattgttgggcagaggaattgacatgtaccagaaaatcagaagtatgaaacatcagatgctaacagaaagagacaggtacatcaatatttgtaaagcaaagaaatgaggatgaaaatcagtaggaacaagccatattaagaaagtatattgactattttaaagtaacagactgtgtgttcatttattcttttgttcattcttggagtttcttattcacataaggaaagccactatataatttttaataagatggatccattataatagaaattaaatagcagaaatacatataagagtgaacagtgtgacagtacctagtcttggtaagaatatggagcaccgattgtgaatacatgaattgttcaaaccacctcaaaaatcattttcattatgagaactggaacatatgtatatcctgtgacccagtatttctattctttgtcttctagagaaactttttgtcatatataccataaggcctatacactattattcctagcaacatttattgaaatagcaaaaaattagaactgcccaaacatccatagacagagaatagattaataaattgtagtgttcttatccagactctgccgcctagtaacatttattttaggcaagttgcttaatccctttgaattttagtctcttcatacggagtaggttgataatactatgtacctcaaaggattattgtgaagattgagttaacccatgtaaagtagttgagactgtctgatacacagaaaatgctcaatatattttagctatcattggtacacagaggtcaaaatgactgattattgctacacatgtcaaggtgaatgaatttcactg

SEQ ID NO: 16575 - DNA, 1657 bp, Homo sapiens
acagcgctaaaaaggcctggaggttcggactgggtggagctcaacacagtgtggcaaagtggctgcagccagactgcctctctagattcctcttcactgggaagggcatctctgaaagaaaggcaccagccccagtcaaggggttatagataaaactcccatctcactggaccagcgtatctgggggaaggggcggctgtgggcacaacttcagcggactttaaacgttcctgcctgctgactctgaagagagcagcagatcctgacaaggagggctctcccagcacagcgcttgagctctgctaagggacagactgcctcctcaactgggtccctgacctccatacctcctgatggggagagacctcccaacagcgattgtcagacacctcatgcaggagagctctggctggcatcagcctggtgcccctctgggacaaagcttccagaagaaggagcaacagcaatctttgctgttctgcagcctacactagtaatacccaggcacataaggtctggaatggacctccagcaaactgcagcagacctgcagaagacgggcatgactgttagaagaaaaagtaacaaacagaaagcagtaacatcatcaacataaggaacccccatacagaaacaccatccaaagatcaaaggtaggtaaatccataaagatgaggacaaaccagcacaaaaacgctgaaaattccaaaaaccagaatgcctcttctcctccaaatgattgcaactcctctctagcaagggcacaaaactagacagagaatgagtttgatgatttgacagacgtaggcttcagaaggtgggtaataacaaactcctctgagctaaaggagcatgttctaacccaatgcaaagaagctaagaaccctgacaaaaggttacaggaactgctaatagaacaaccaatttagagaagaacataaatgacctgatggggctgaaaaacacggcacaagaacttcatgaagcatacacaagtatcaatagctgaatcaatcaagcagaagaaaggatatcagagattgaagttcaacttactgaaataagacatgaagacaggattagagacaaaagattgaaaaggaatgaacgaagcctccaagaaatatgggactatgtgaaaagaccaaacctacgattgattagggtccctgaaagtgacaggggagaatggaaccaaattggaaaacacacttcaggatattatctgggagaacttccccaatctagcaagacagggcaacattcaaattcaggaaatacagagaataccactaagatactccttgagaagagcaaccctaaggcacaaaatcatcagactctccacggttgaaatggaggaataaaagttggctgagcgtggtggctcacgcctgtaattccagcattttgggagcccgaggcgggcggatcacaaggtcaggagatcgagaccatcctggctaacacggtgaaaccccatctctactaaaaaaatacaaaaaattggccaggcgtggtggtgggcgcctgtagtcccagctacgtgggaggctgaggcaggagaatggcgtgaacccaggaggcggagcttgcagtgagcggagatgtgccactgcactccagcctgggcaacagagcgagactccttctcaat

SEQ ID NO: 16576 - DNA, 1905 bp, Homo sapiens
agagaatcccggctcctgctgcaataagaggctgttctggaagctctggggttcgggtctttgtccctgcaggttggtggtgggatgaaacaggagacagcgggcttggaggcaccactgggaggcgggaccgacgtgccacagttggtgggagcagaggcgtgggcacatattgagggggcggggcctgacgcacaggtgcgggccgcggaccccggctggggctgaaagggcggcgctgctgggagggcgggcgtggaatccccgcactgaagccagttccagaggcgccaaagcggctgggcgaagccggtggcgcgggaaaggggtctgcagaccgcccgagcctgggaggtctgcggggaggctgcgctccggcactgcatggaccttgtgcagcattccgtgcacgccattgtaagatcagcatatggacagttctagggagatgcctctcattcccagaagaggactacgaaacgcgtgcacaccgtcctactgcctggcgagtgtattagtagggtttcccggtgtctttcagcaagtgaagattctccttgtgtcccattcctacgcatcccatccatgttttagtttataggagtttataaaagatctggtttctagggaagttggggatccagatgatggtcctgttttctgtgtaataaggtaagtacaaagtttggaagagggcgccttttaggaatcccacctgaaagaacccctctttggacaaaccttctcactggtacttcaaagcagaggaagcgtcacaggtgaagattccagtttgtatgacccaagcagttattttcccactccccagagtggccaagatttggttgataagaccttatccagtagctctcaaacactgggtggtagcggaaggtttggaccaacattcagaaggaagaggggagtttggctgcgaatgcaggcaagggccaaagagatgtgacttattggaggggacttaatagtgtggtcttcggtggaaaaataacctgttactcctgagaggatctgtctggagtactctgtaaagacactttcattccttcaatcttttctcattgtttctagtggctgaactttcttaaaagtagtgtaggccaagacgggaggatcacctgaggttaggagtttgacaccagcctggccaacatatagtgaaaccttgtctctactaaaaaatacagaaattagctgggcatagtggtgcacacctgtatagtcccagctacttgggaaactgaggcaagagaatcacttgtaccgggcaggtggaggttgcagtgagccgagattgtgccaccctactctagcctgggcaacagagagagactctgtctctcaaaaaaaaaaaaaaaaaaaggaaaagaaaaaaaagcttgtcaccaaatttagcatccagtcacgaaatttagcatctagtgatatgccaaagctccctctatcctggtagctcttcctggtagttcagtaagcgtttgccaaactatttctaccttatgagaaagatgaaaaaaatttggctttgaggagctgggacttgccagggtcacatgatatacagatgttatgcatcctgactttttggctagtgttactcattttgccccagttaagtcaaaacttttttttcctttttttttttttagatttttgttgacactgaagtcaactaagaacaaacattgctttaaaatactttctcagccgctccctgcctgaccaaaccctcccactggaaaaaataataataaagtactttcccttgccgggtgcagtgtctcacagccataatcatagcattttgggaggccaagacaggaggatcgcttacacccaggagtttgagactagtcttggccacatagggagaccctatgtgtttac

SEQ ID NO: 16577 - DNA, 2020 bp, Homo sapiens
tagatgaaatcctttttcgggccaaactcaattgttttaacttaaaaaaaaattcattcagtttaagataaaataatgcttccttaataaaactaaaaacaaaaagcatctttagaagctgtgtagcgtactttatttatttatttatttggagacagggtctcactctgttgcccaggctggagtacagtggcacagtctcagttcattgcaacctccgcctcccgggttaaagcgattctcctgccttagcctcatgagtgactgagactacaagtgtggaccaccacgcctggctaattttggtatttttttggtagagacagagtttcaccatattggctaggctgttctgttgaccatgaggcaccatacctgggctgtgtagcagacttaaaaaaataagatttgaagttagaacttaaggctttgggccaattaatagttttgtttgtttgtttgcggcggaatctcgctctttcacccaggctggagtgcagtggcgcgatcttggctcactgcagcctctgcctcttgggtttaaggagtcctcctgcctcagcctcctaagtagctgggactacaggcgcatgccaccacacctggctaatttttgtatttttagtagagatggggtttccccatgttggccaggctgttctcaaactcttgacttcaggtaatcctcctgactcagcctcccaaagtgctgggattacaggcgtgagccatcacgcccagccccagttaatggttgtgttaccttgagcaattcacttaatctctgagactcagtttgctcatttgtaaaatggtgatcatcataatatatacctcttatagttattaggaaattaaatggtaatgtatatataaagcataagcataatgtttgatgtgtattaaatactcaaatgtagctcctgttattatcagaggactccttacactgtaaatacatgctacaaaaattttagaatgcactttatcaggcattttagtacaaataagcaaaacagttgatcttgtagactaattttgaagtttcatattggttccagttcaagcactgtatataaaatatccagaataattcactatattaattagtttaatactgtcttagtctattcaggctgctctaataaaatatcataaactggatggcttataaacaatagaaatttatttctcacagttcacatttaggaagtcccatgtcaagaggctaacagatttggtgtctagtttggtgccctagtgagggtttgctcttctggttcatagatggtgctttcttgttgtgtcctcacatgatggatagcacaaacaagcccccttaggccccttttataagggcactaaccccgttcacaggggctctgccctcatatccaatcacctcctaaaggccccatctcttaatactgttgcattggggattaggtttcaatatatgacttttgagggaacacaaacattcagatcataacaaatgtgaaaatgaattaatctttaggaaaattggtggcactttttgtgtatcctagtaagaagtttggttactgggtaataagtctgttgaaaagattataatttaacaaaatgtgaaaattatggtaatatttatgaagatttttttaaagcagcatatcagattctttctcacattttatattggtgtggttggtgtttttcttatggggagaaatactagtaagtgaactatatagacatttaaaattaacatgagttaaatccattataaattttagaaaaccatttattctacagtagtttccaaaactggggtatacctatcccaagctatacactaagatttttcaggatatataaaggcacagagagctttaagggaatctgtttctagtcttcggagatcttgtttatgttttttgcattgtcttttccaaagtctcttacttgttaccttttgctgttatgtatttcccattatgcattgatccaagatgtaaaaacctctagggcaccaaacagg

SEQ ID NO: 16578 - DNA, 1793 bp, Homo sapiens
ttttgttttgaaactttttgtagagatgaggtcttgctgtcaagaccagcctggccaacatggtgaaaccccatctctactaaaatacaaaaatgctgggcgtggtggtgggcgcctgtaatcccagctactagggaggctgaggcaggagagttgcttgaatccaggaggcggaggttgcagtgaactgagatcacaccactgcactccagactgggtgccagagcaagagtctgtttcaaaacaaacaaacaaaaagaactttaaagatctgggccattgtcgacccataacattaaagcaaactttgtgagattttacattttaattctattaatactgctgttttaattgaggaactaatcaggtaaagattctgtccaccttcaatgcttctgtaaactagagcattttatcttgtaaaatatatgtttttcaaggtgttattctgacacttcttaatgtttttgagagacagggtctcgctctgttgcccagtctcaaactcctgggcttaagtgatcctccacctcagcctgccgagcagctgtgactacaggtgcacaccactgcacgtggcttgatggtttccctataaaatataatcatcgactgagtcacctgaatccttttggaactagatgggagtaaacacacccacaaataagtgcttatcaagagtattccatttcccgtcattactcagggctgcacagattttcctaagtgctcatcaaaagttcagtaaataatgtagggctatttcataaatcttttatgctgtttttcaggggtcagaagtttcctaaaatttttgagtggttttgcctgttatagaaacgtatatgtttattaaggagaaaatggagtgggaaataaaaagaataacgacaggctgccattgtctgaagtctagctatgtatattgtaaaaataccttccttctgctgcattaaaaaaatatggctctagaaaaatcaaccagttttcctggcaatgaggtaagagttaaccagaccagaatatagtccatgcatccaacatgatagctagctcattggcttttagggacaggtttttgtgtgtttgcctggtttttgtttgtttgttgttgtttttattgtaaaatatacataacataaactttccaacgtgaccctttttgagtgtacaatgcagtgggattaagaacctttactttcctatgcaaccatcaccaccatctctctccagaacttttttgtcatcccaaactgaaactccatccccattaactaccaactccccattcctccctcctccctctccttgtttgtcctgaaagcctgagtgtcgtggcctaaccctactgcaagagagcactgcaaccagcacatgggaggcaggatgcacctcttcccttcatgctttctactaaggcattaatatattacccactaacattttgatgtttatatgtgggggaacattgaagaacccagaattttatgattgaattattggtggggcgtggtggcccatgcctgtaatcccagcactttgggaggccgaggtgggcggatcacctgaggccaggagttcaagaccagcctggccaacatggtgaaacctgtcactactaaaaatacaaaaattagccgggcatggtggcgcgcgcttatagtcccaggtacttgggaggctggggcacaagaatcacttgcgtgggggaggcagaggttgcagtgagccgagatcgtgccactgcgctccagcctgggtgacagagcgaggcttcctctcaaaaaaaagcc

SEQ ID NO: 16579 - DNA, 1517 bp, Homo sapiens
ggacggagatgtgctttatgacgagtacattcttcccccctgccacattgtggactaccgaaccaggtggagtggtatccggaagcagcacatggtgaatgccacacccttcaagattgctcgaggccagatcttgaagatactcacagggaagatagtggtggggcatgccatccacaacgacttcaaagcccttcagtactttcaccccaagtccctcacccgtgacacctcccatatcccccccctcaaccggaaggctgactgcccggagaatgccaccatgtctctgaagcatctcaccaagaagctgctaaaccgggatatccaggttgggaagagcggacattcctctgtggaagatgcccaggccaccatggagctatataagttggttgaagtcgagtgggaagagcacctagcccggaatccccctacagactagtggcagtggggacgctggtgatatgaggaggcagaggcagcacccaggagaaacagggcagtggaccaatggacagctccaccagctccacatctttggaagctagatttggggagagagaagctctaccccagacttaatacccattgaaatttcacctcaggtgttgtgtcctgtgtctggttaagtgtcccatggaaggggaaagccttcacgtcagaacccaaccctataccttttacttcttaaatggtgctaaccacaggtgtcccagggtgctctgtgccagttaagatttttaactttcaaggggcagggcatactgggaaatgtagtttcccaaactgccttatcacttgggtggacatatgtctccttttatgccttttggtcttgagtaattaacagcatcctcttccacgctcagaagtgttctggttggggccaggcatggtggctcacgcctgtagtcccaacacttagggaggccgaggcgggcggatcacctgagatcaggagttcaagaccagcctggccaacatggcgaattcccgttctctactaaaaatacaaaaaaatgtgtggggtgtggtggcaggagcctgtaatcctagctactcaggaggctgaggcaggagaatcgcttgagcccaggaggcggagattgcagtgagccgagatcgtgtcactgcactccagcctgggtgacaagagtgagactccgtctccaaaaaaaaaaaaaaaagaatttattaacctggttggttaataaattgtgtggtccctgccgggcgtggcggctcacgcctgtaatcccagcactttgggaggccgaggcgggcagatcacgaggtcaggagatcgagaccatcctggctaacacggtgaaaccccgtctctactaaaaatacaaaaaattagccaggcgtggtggcgggcacctgtagttccagctacttgggaggctgaggcaggagaatggcgtgaacccaggaggcggagcttgcagtgagccgagattgtgccactgcactccagcctgggccacggccacagagcgagactctgtctc

SEQ ID NO: 16580 - DNA, 1630 bp, Homo sapiens
gattacaggtgtgagccaccatgcctggcctcacccagaaacattttgaatgagcttaatggaagtagaagtctttgttagtagttctctgtaaacattttcactttcttcatgggacgatcctttccgcccccacttaaggcacccagtcctggctgggccctggacacattgctgagatgggctgaccaccaataccaggcccagtcattaaaagtacctgatgttagaagatcaagtgttaaatgtcatagcctagaaggagcagttctgggagaagaacccagatgtcctcagtgctccactccatacgagccctgggatgctggggtgtgagctaggccgtgcacaagccattagaaggtgttccacacaggggagcgtctctacccccttatccatgatgtccacacccagctggctggcaagatcacgggcatgctgctggagattgacaactcagagctgttgctcatgctggagtctccagaatccctccatgccaaggtaagcaggagcccgggcagcagggagcccgagggggcaggaggagagctaacgacaagggctctcctagtggagccagtggatagctgtttggccagataaagtgtttcttcttgctaatacctgaaggcctgctgaatcttaagagtggaaggggccttaggtaagggtttgctacttcagcccttccgtagactaattctgtgttgttctgtaggtaggtcttttggtacaaggaagtgtgttgtgactcagtgtaagggttaagatttttccagctgtccagcaatgtacctctgtgtcaaaggtgacagacagggccatgggatcttgcaagcagtggtggatgggagggttccacagaaaccctgtggatggaggaggatcctgtatccaggatggtgagcgagggggagatcaaggctcttctgtgacctgctaagatagctgcactaagcccccccgccactcatgtctcacagatagacgaggcagtggccgtgctgcaggcacaccaggctatggagcagccgaaggcgtacatgcactgaaaccaggtgggtggaatggtgacagaagcagctgagcccgggagaagctgtaaggaaacaggcagggactgactttcacaaacactgagaattgcgccgtgttcctggctttctctgaagcaccaaagagtttggaggaagttgtgagaatcagaggagatgattaactgtgatcggaatggggggtggtggagggtgaaggaggtgccctcttgccagctgccctgcctggcttcatgcagaatagtttgggctttcccagggccctgcctggctccattctgcctgcctgaaggcctggccaggatgtaaccaccttctttattgaagactgggtgtctgccatactttaaaaacacttatttttacctttttgtcctcagaaaaggaaatcctcgcttccatggctgccaaaaggacagtgtttctggctctcagccctaaggccctgcaaactctaacttatttcccaattagtctgtatctatacttgggctctgtatgtgaatgaaggttggtcacccatccagcctattaccttttgctttgtgtattaaaagtgctgcaaaatc

SEQ ID NO: 16581 - DNA, 1861 bp, Homo sapiens
  CDS (291)..(641)
actagaaagatggcggagcaagacagaagaaaggaaaagggctcaggtttaagcgactggaatcattcctacatgattcctggcggcagagacgtgacaaggtgcgtctcagacgactagaagtgaaacctcatgccttggaattgccagataaacattccttggcctttgttgtacgcatcgaaaggattgacggcgtgagtttactggtgcagagaaccattgcaagacttcgcctaaagaaaatttttagtggtgtctttgtaaaagtcaccccccagaatctaaaaatgctgcgtatagtggaaccttatgtgacctggggatttccaaatctgaagtctgtccgagaactcattttgaaacgtggacaagccaaggtcaagaataagaccatccctctgacagacaatacagtgattgaggagcacctggggaagtttggcgtcatttgcttggaagacctcattcatgaaattgccttcccagggaagcgtttccaggagatctcatggttcttgtgccctttccacctctcagtggcccgtcatgctaccaaaaatagagtgggcttcctcaaggagatgggcacacctggctatcggggtgaacgcatcaatcagctcatccgtcagctgaactagacccaggtgccaaactgcggtaaattttttatcagtgaagtggaagcatgtgttttgttttggaaatttttatcaagtatcttcagagaagattatttcctgctttatcttcagaaactggaaagggtcaaagaaaagacagtagctggtctcgaactcctgacctcaagtgatccacaagcctgggcctcccaaagtgctgggattacaggcgtgagcaactgcgcccagctcttgtgtaccttatgtgaggaagtcctgctcaatcaggatcggtcacgcaggccctgatcttgctactctggttccatgtcctatggaagaccaaagtttaccaagatagatttttcccctcatagtggcagatagtgttaacccctgcaccatctgtaactcagaaatccccaccatttcttcccctgggcttcagaatagaattgcctggtttctctgatgatcagcatggttccttaaaacccaaatcagcaaggaatgaacaattttgtttggcatggatgaaattagcactgtttggctcgttaggccccaggcaggcaggcaccttaattttttccttgcatattctagtcttcagaagcattgccttttgtcctactggtagtgacatagaccaataacagggcatctggggattttaatcctgaaaacagtgagtctgatactgcttgtgtttttcatcagtgtccaccccaagtgggtcttcctgctattctcttcacttagttgcccctcacttgccatctgagcaattggcaaggatgtgccaggcctaggttaaacttggaaacatgcttgaccattctattccctggtcctttaagatcagtttggctgcaattttggctccttggaccctcaagcatagctggtaaatcaagttagagatgtaactgccttaaaacatgccagcttaggctgggcacggtggctcacgcctgtaatctcaacacttcaggaggctgaggcaggcagatcacttgaggtcaggagctcgagaccagcctgaccaacatggagaaattctgtccctactgaaaatacaaaattggccggatgtggtggtgcatgcctgtaatcccagctacttgggaggctgaggcaagagaattgcttgaacccagggaggcggaggttgcagtgagccgagatcacaccattgcactccaccttgggcaacaaaagcaaaactctgtctc

SEQ ID NO: 16582 - protein, 117 aa, Homo sapiens [sequence omitted]

SEQ ID NO: 16583 - DNA, 1087 bp, Homo sapiens
  CDS (322)..(759)
tttttcccaagcctggaagaactcgtcatgctctttgtagcgtggtgcttctgttgctcacaggatgtttgccacacgagtcactcgagagaatctctgagtcctggcaagggctttctgaggcttcgtgtattagcagctgttgtcttccaactcagcggcaggtttgcctttccccacggacactctggaccttgtagctcctcaagcttccctgtctattgagcagataggaagccgtgtcaaatatgtggcaccttgaggaaatgcctagtgaatgacagacaacttgcctttgatgattttcaagagagttgtgctatgacgtggcaaaagtatgcaggaagcaggcggtcaatgcctctgggagcaaggatccttttccacggtgtgttctatgccgggggctttgccattgtgtattacctcattcaaaagtttcattccagggctttatattacaagttggcagtggagcagctgcagagccatcccgaggcacaggaagctctgggccctcctctcaacatccattatctcaagctcatcgacagggaaaacttcgtggacattgttgatgccaagttgaagattcctgtctctggatccaaatcagagggccttctctacgtccactcatccagaggtggcccctttcagaggtggcgccttgacgaggtctttttagagctcaaggatggtcagcagattcctgtgttcaagctcagtggggaaaacggtgatgaagtgaaaaaggagtagagacgacccagaagacccagcttgcttctagtccatccttccctcatctctaccatatggccactggggtggtggcccatctcagtgacagacactcctgcaacccagttttccagccaccagtgggatgatggtacgtgccagcacatggtaattttggtgtaattctaacttgggcacaacgaatgctatttgtcatttttaaactgaatccgaaagaaactcctattataaatttaagataatgtaatgtatttgaaagtgctttgtataaaaaagcacatgataaaaggaatcagaattaataaaatgtttgttgatcttt

SEQ ID NO: 16584 - protein, 146 aa, Homo sapiens [sequence omitted]

SEQ ID NO: 16585 - DNA, 2009 bp, Homo sapiens
gtttgtaaaatgaatgggagtggttgcctttagaatattcaggtaggatgtttagtggatgttgtaaaagagcatctagagcttagaaaacaggaggaaaggttgagatttagaagtcatgagttttctaaaagctaaagccctgagtgtcaggagatgtgggttttaatgtagagtctgtcattatattgtcctggggtagtagtcacttctctggcattggcagtccttgtttgtaaaataaaactctagacttgatctcacaggcctctcccaactctgaaactttgttctaaagaagaaaatatattctcttaaaatttcgtgggctagtctataagggaaaaaagatgctttagcaatggtttggggtatatgatgtcatgaaagtaatattctttttactgtccaagtcagtaatttactgtgtagagaattggaaatggaccagaggcagtttcccagaataggtcattatttggtgttagtaattggtcattcacgcatctgcataccctttgtttccttaagtaactctcctttctggtaaccaccttaggtttgtcaaggtggaagtcatgtggtcaaatcaaatggaaacacaagtgtgttaggtattagattcattttcctgtccccaaagtacccgtttggtaatgctggcagaagacatacatgcggccaacaatcataggaaaaaaagctccacatcactgatcattagagaaatgcaaatcaaaaccacaatgagatcgtatcccatactaggcagaatggctattaaaaagtcaaaaaataacagatgctggcaagtttgtggagaaaaaggaacacttatacactgtcggtgggagtgtaaattagttcagctattgtggaaggtagtgtggtgattcctcaaagacctaaagacagaaataccatttgacccagcagtcctattactgggtatatattcaaaggaatataaattattctgttataaagacacatgcacatgtatgttcattgcagcactattcacagtagcaaagacatggaatcaacctgaatgcccatcagtgataaactggataaagaaaatgtagtacatatgcagccataaaaaagaatgagatcacgtcctttgcagggacatggatggagctggaggccattatcattagcaaactaacacagaaacagaaaaccaaatactgcatgttctcatttataagtgggagctaaatgatgagaatacatcgacgcaaagaggggcacaacagacactggggcctaccagagggtggagggtgtgaggaaggagaggatcaggaagaataactaatggagaatgggcttattacctgggtgatgaaataatctgcacaacaaacccccatgacacacgtttgcctgtggaacaaacctgaacatgtatccctgaacttaaaaaaaaaatcaaattgatagtctataaacaagctgccagaggctccagtgaaacctgggagctgtgggcagagcaagtaggctgtctctgttacactctgccacctcctagcggtagcagcttttagttcctgtgtcacagaattgaacattttcctgctttgcaaggaactttcaaaggctaattcgcctttactctcacctgcttccgtggaggaggtgaataaagcctgtatttcagtgatgtagtagtttcttaggctgctgtaacaaagtaccccaaatttggtgacataaaacgagaaatttattctgcacagttcaggaggccagaagtctgaaattgagatggcagtaggggtagtgccaccttgggaggctgtaggggagagtctgttctttttctcttcctaccgctccagtttctgcttctgtggtcacactgccttttcttctctgtctctcctttgtacatctttcattatgaggacactgtcattggatttagagcccacctggatagaccagatgatttaatcttaagatccttactaacatagcgagaccccatctctacc

SEQ ID NO: 16586 - DNA, 2869 bp, Homo sapiens
  CDS (569)..(2170)
cacgaagcagggaaagggatctggtaaaacctaaatatgacctggatagaacagatccattagaaaataattatactccagtctcttcggtacctagtatttcatctggccactaccctgtacctactttgagcagcactattacagtaattgctcctactcatcatggaaacaacactaccgaaagttggtctgaatttcatgaagaccaagtggaccataactcttacgtaagaccacccatgccaaagaaacggtgtagagactatgatgaaaagggtttttgtatgagaggagacatgtgtccttttgatcatggaagtgatccagtagttgtagaagatgtgaatcttcctggtatgctgcctttcccagcacagcctcctgttgttgaaggaccacctcctcctggactccccccacctccaccaattcttacacccccacctgtgaatctcaggcccccagtaccaccgccaggtccattgccacccagtctcccacctgttacagatgatatttcttattctttggttttgacaggaccaccacctccacttccagacctatgtatagacacagagtgcatgcacaaaggcccaacttgataggactaacatcaggggatatggatttgccacccagagaaaagcctcccaataaaagcagtatgaggatagtagtggactcagaatcaaggaaaagaaccattggttctggagagcctggagttcctacaaagaagacttggtttgataaaccaaattttaatagaacaaacagcccaggctttcagaagaaggttcaatttggaaatgaaaataccaagcttgaacttagaaaagttcctccagaattaaataatatcagcaaacttaatgaacattttagtcgatttggaaccttggttaacttacaggttgcttataatggtgatcctgaaggtgccctaatccaatttgcaacatacgaagaagcaaagaaagcaatatcaagtacggaagcagtattaaacaatcgctttattaaggtttattggcacagagaaggaagcacccaacagttacaaactacttctccaaagcctttagtccagcagcccattttgcctgttgtgaagcagtcagtcaaagagcggctgggtccagtaccttcaagtactattgaacctgcagaagcccagagtgcctcttcagaccttcctcaggtgttgtctacatctactggcctaacaaaaacagtgtataatccagctgctttgaaggctgcacaggaaaccttacttgtttccacctctgcagttgataataatgaagcacagaaaaaaaaacaggaggcattgaaacttcagcaggatgtaaggaaaaggaaacaagaaattttagaaaagcacattgaaacacagaagatgttaatttcaaaactggagaaaaacaaaacaatgaagtctgaagataaagcagaaataatgaaaactttagaggttttgacaaaaaatattaccaagttgaaagatgaggtcaaagctgcttctcctggacgctgtcttccaaaaagtataaaaaccaagactcagatgcagaaggaattacttgacacagaactggatttatataagaagatgcaggctggagaagaagtcactgaacttaggagaaagtatacagaattacagctggaagctgccaaacgagggattctttcatctggtcggggcagaggaattcattcaagaggtcgaggtgcagttcatggccgaggcagggggcgagggcgagggcgaggtgtgcctggtcatgctgtggtggatcaccgtcccagggcattggagatttctgcatttacggggagcgatagagaagatcttcttcctcattttgcgcaatatggtgaaattgaagattgtcagattgatgattcctcacttcatgcagtaattacattcaagacaagagcagaagctgaagcagctgcagttcatggagctcgtttcaaagggcaagatctaaaactggcatggaataaaccagtaactaatatttcagctgttgaaacagaagaagttgagcctgatgaagaagaatttcaggaagagtctttggtggatgactcattacttcaagatgatgatgaagaagaagaggacaatgaatctcgttcttggagaagatgatttgactgatcattgatctgcatatgctagaactctacctgtgtttcattagtattatctaatgtacttttacatatttgtaaaaacaatttttggtaaaatgtgatgaagatggatttcacaaatagacaaaaaagaagaaaactaccttctgatcttgtattttgaaagattgatgtttgcattttacttcagtaaacaattgctaaagacatcacactagaaacatatgcaatgtttttattacatacttctactggacatcacagaattctttgggttctttgtaatttaatgaataggtctgaaaacttatgaccaatacttgttataacttagaggactttgttttattccaaataaggaatgaatttgcatttaaaatcttaatgaatgttttcaaaactgaatagataacatagtactctaactaaagtctccaagttatgtattataatattacatagtagtatgcttaggctttactatgtattagccttttgttggactgtgtatgtattttaccatatgggttttaatgataatggtgtatgactgctttacatgagtccttatgcatccagatgttataataaagtggaatggtctctttaaaaaaaaaaaaggaaagaaaagagaaaagcaatgacaaaaaaaaaaaaaaaaaaaaaaagccaagacaatgttccttgattt

SEQ ID NO: 16587 - protein, 534 aa, Homo sapiens
MYRHRVHAQRPNLIGLTSGDMDLPPREKPPNKSSMRIVVDSESRKRTIGSGEPGVPTKKTWFDKPNFNRTNSPGFQKKVQFGNENTKLELRKVPPELNNISKLNEHFSRFGTLVNLQVAYNGDPEGALIQFATYEEAKKAISSTEAVLNNRFIKVYWHREGSTQQLQTTSPKPLVQQPILPVVKQSVKERLGPVPSSTIEPAEAQSASSDLPQVLSTSTGLTKTVYNPAALKAAQETLLVSTSAVDNNEAQKKKQEALKLQQDVRKRKQEILEKHIETQKMLISKLEKNKTMKSEDKAEIMKTLEVLTKNITKLKDEVKAASPGRCLPKSIKTKTQMQKELLDTELDLYKKMQAGEEVTELRRKYTELQLEAAKRGILSSGRGRGIHSRGRGAVHGRGRGRGRGRGVPGHAVVDHRPRALEISAFTGSDREDLLPHFAQYGEIEDCQIDDSSLHAVITFKTRAEAEAAAVHGARFKGQDLKLAWNKPVTNISAVETEEVEPDEEEFQEESLVDDSLLQDDDEEEEDNESRSWRR

SEQ ID NO: 16588 - DNA, 1465 bp, Homo sapiens
gtatttaatctttacaacaatcctatcaggtatataagcccattttacagatgagaaactgagacacactgaagttaagtaacttgtaagaagtggaactggccttgatcagaggtagtctggcttagagcccaccttcttcacctgtacaacaaagcactcactagagattggccattatcattatcaacattattattaattattattattattattattcagccaggagttaagttatgaagggactcatatttgaattatgaaggaactcaaaatcccacagtcacataaaccagtttcaggatgaaatcggcatgccttccttttgttcaaagggttgtacagctaattagtatgtaaatctcacttctttgaattgaacacattttagagtcatctattacaaaagtgctgcatgcttgaaacagaaagcttgcaaaatctgtaatctcagcactttgtggggctgaggcaggaggatcacttgaggccaggaattcaataccagcctgggcaacataaggagaccctgtctctacaaaaaaaaaaaaaaaaaaaaaaacaaacaaacaaacaaaaaactaattaattaattaattggctgggtatggtggtgcaagcctataatcctagctactcaggaggctgaggtgtgaggatcaagaagatcaaggctgcagtgagctatggtcatgccactgcactccagcctgggtgacataggtagtagacctgtctcaaaaaagaaaagaaagaaacagaaaacttggaaaatccaggaaaaaaagtctttaatggatagagttctgattcattaaaacaattttttggtaaaaatctatatgtgttattttgaaatgagaacagttacctcctaatctatgtggactgggaagtagacttacaatacggcataaattggagagctgataaatttgaggatggtagagacacttgatagaaaacaactgtttagtcttaattaactatgaataactttggcattcacgttttgaaactcattcatgtttgctttacatcagattaattttattttaagaaagatttttgtatactcttatcctctccctttcatccaagaaatacaaccatacatcccaagatagtgatccacgaggcagatctttgggctgcctacgtggtgaaaggccccaccaacctcctataattcagagaactttgcctgtaattccagcactttgggaggctgaggcaagaggatcacttgaaccaaggagtttgagattaccctgggccacatagcaagaccctgtctctacacaaaataaaatataagccaggtgtgctagcacacgtctctagtcctagctacttgggaggctgaggcaggaggactgtttgagtccaggagttcaaggctgcattgagctatggtcacaccactgcaccccagcctgggtgacaggggagaccctgtctc

SEQ ID NO: 16589 - DNA, 2612 bp, Homo sapiens
  CDS (248)..(550)
ccagagcaggggacagtcctgggggctgcaggtcagtgcaatgaaacctagcccactggctcttacccttaaaagaaatactctgtgtcaaatggaaaactatgttcctcattctaatcaccaggataaccacagtcctctttggaatagcattttaaaagttgcaacatggttatgacacacttgcttgtcagtgtcttaaaactacccttcacaaggaagcagagtatcctcgtttccactgaaaatgaaacggagacttctgcctgggaagtgtagtccctggaataggccaggtcctctggcccctcggtcccacatgagctggaaggctcagctcctgccccattcccactcccacccctcccccacggtgccaagcccagcaggacggcttcctgggcaactccaccatgggcacacccctggccctcagggctgttgcctggagaactcattggcctcctgggaggtccccagttgccaggacaaggctatgtgggatggcttctccaacaacaactcgacatctcctctgcaggggtgcccctgacacaacagctggccactgggcctcccggcacccaccctgtctatgcacggggcttgtcattctgatctcagcagtcttctcaaggagcaataatcttggctcagctcttatcgtgctggactgatgaatgggggtgcctggtgaggccccaacctttccacagagtccacacatcacttcaggtgagtgtgggaatcaagtttggagacccacgctggacaggcttatctaaatcgtaagtagctcttgggcaatgcggaactcctttttacagcccaccctgctctcctcccctatatgtaggattcatggttgtagcaagtgtgaggatggacaggctcacacctgtgaccactgtgtcagagaccacatagacacagggctcccggcaagctccaacctgaccacaggctgctgtcccagcccagccttcctgcaggtcagccaaggaagcgtgtaggaaacccagtgaccagagaccctaacatgtggccttagagctgatttagaaactggagagtgaaggcatggagtgaagacacaagcagagtcaggcccgtgaaggtgaggttagggaagtaagattccccaaggagggaaaagtggagctgccgtttctccttcaggggctggcattacctttggtctatctgtgtgtgctctgccatttattgacttgggtgtctttagacacgtcatggtcacttctctgaccttccattttctcagctataaaccaggctattgttgacaataataataatagtaatacatttagcattctttaaagagttaaaggaaataatgcaggaggccaaagtgggcggatcacctgaggccaggagttcaagaccagcctggccaacgtggtgaaacctcgtctatactaaaaatacaaaaattggctgggtgtggtggcacacacctgtgtgtccagaattggtggattcttggtctcgctgacctcaagaatgaagccgtggaccctcgcagtgagtgttacagttcttaaagatggtgtgtctggagtttgttccttcagatattcagatgtgtctggagtttcttccttctggtgggttcgtggtctcgctgacttcaagagtgaagctgcagacttttgcggtgagtgttacagctcttaaaggtggcgtgtctggagctgctggttccttctggtgggttcgcggtctcactggcttcaggagtgaaggtgcagaccttcgcggtgagtgttacagctcataaaggcggcgcacacccagagagtgagcagcagcaagatttattgcaaacagttaaagaacaaagcttccacagcgtgaaaggggaccctagcaggttgcagctgctggcacaaatagcctgcttctattcccttatctggccccacccacatcctgctgattggtccattttacagagagctgattggtccgttttacagagagctgattggtccgttttgacagagcgcagatcggtgcgtttacaaacctttagctagacacagagtgctgattggtgcgtttacaatcctttagctagacagaaaagttccccaagtccccatcggtaggagaagtccagccggcttctctcactggcactcgccatgggactttgcagcacctagcttgggcactccagccacccagagggagctcatcccctgatcaagcccagcaggcacttgctgagcccacgctcacctagaacccgtgtgtgcgcacagccctggctcctgcccacacctttccctccacacctccccgcaatcagagggaaccagctccggcctcagccagccccagagagggacccccacagcggcagctgcgagctgaagggctccttgagcgtggccagagtggacgccaatgccaaagaggcaccgagagtgagcgagggctgctagcacgttgtcacctctcacctgcactcccagctactcgggaggctcaggcaggagaatcacttgaacctgggaggtagaggttgcagtgagccgagaccataccactgcattccagcctgggtgacagagcgagactgtctc

SEQ ID NO: 16590 - protein, 101 aa, Homo sapiens
MKRRLLPGKCSPWNRPGPLAPRSHMSWKAQLLPHSHSHPSPTVPSPAGRLPGQLHHGHTPGPQGCCLENSLASWEVPSCQDKAMWDGFSNNNSTSPLQGCP

SEQ ID NO: 16591 - DNA, 2922 bp, Homo sapiens
  CDS (189)..(2420)
aaaaaagcagcagaacctggaagtccacggggagcttggatgccaaagggaggacggctgggtcctctggagaggactactcactggcatatttctgaggtatctgtagaataaccacagcctcagatactggggactttacagtcccacagaaccgtcctcccaggaagctgaatccagcaagaacaatggaggccagcgggaagctcatttgcagacaaaggcaagtccttttttcctttctccttttgggcttatctctggcgggcgcggcggaacctagaagctattctgtggtggaggaaactgagggcagctcctttgtcaccaatttagcaaaggacctgggtctggagcagagggaattctccaggcggggggttagggttgtttccagagggaacaaactacatttgcagctcaatcaggagaccgcggatttgttgctaaatgagaaattggaccgtgaggatctgtgcggtcacacagagccctgtgtgctacgtttccaagtgttgctagagagtcccttcgagttttttcaagctgagctgcaagtaatagacataaacgaccactctccagtatttctggacaaacaaatgttggtgaaagtatcagagagcagtcctcctgggactacgtttcctctgaagaatgccgaagacttagatgtaggccaaaacaatattgagaactatataatcagccccaactcctattttcgggtcctcacccgcaaacgcagtgatggcaggaaatacccagagctggtgctggacaaagcgctggaccgagaggaagaagctgagctcaggttaacactcacagcactggatggtggctctccgcccagatctggcactgctcaggtctacatcgaagtcctggatgtcaacgataatgcccctgaatttgagcagcctttctatagagtgcagatctctgaggacagtccggtaggcttcctggttgtgaaggtctctgccacggatgtagacacaggagtcaacggagagatttcctattcacttttccaagcttcagaagagattggcaaaacctttaagatcaatcccttgacaggagaaattgaactaaaaaaacaactcgatttcgaaaaacttcagtcctatgaagtcaatattgaggcgagagatgctggaaccttttctggaaaatgcaccgttctgattcaagtgatagatgtgaacgaccatgccccagaagttaccatgtctgcatttaccagcccaatacctgagaacgcgcctgaaactgtggttgcacttttcagtgtttcagatcttgattcaggagaaaatgggaaaattagttgctccattcaggaggatctacccttcctcctgaaatccgcggaaaacttttacaccctactaacggagagaccactagacagagaaagcagagcggaatacaacatcactatcactgtcactgacttggggacccctatgctgataacacagctcaatatgaccgtgctgatcgccgatgtcaatgacaacgctcccgccttcacccaaacctcctacaccctgttcgtccgcgagaacaacagccccgccctgcacatccgcagcgtcagcgctacagacagagactcaggcaccaacgcccaggtcacctactcgctgctgccgccccgcgtggtggtgctggacgccaacgacaactcgcccttcgtgctgtacccgccgcagaacggctccgcgccctgcaccgagctggtgccccgggcggccgagccgggctacctggtgaccaaggtggtggcggtggacggcgactcgggccagaacgcctggctgtcgtaccagctgctcaaggccacggagctcggtctgttcggcgtgtgggcgcacaatggcgaggtgcgcaccgccaggctgctgagcgagcgcgacgcggccaagcacaggctggtggtgctggtcaaggacaatggcgagcctccgcgctcggccaccgccacgctacacgtgctcctggtggacggcttctcccagccctacctgcctctcccggaggcggccccgacccaggcccaggccgacttgctcaccgtctacctggtggtggcgttggcctcggtgtcttcgctcttcctcttttcggtgctcctgttcgtggcggtgcggctgtgtaggaggagcagggcggcctcggtgggtcgctgcttggtgcccgagggcccccttccagggcatcttgtggacatgagcggcaccaggaccctatcccagagctaccagtatgaggtgtgtctggcaggaggctcagggaccaatgagttcaagttcctgaagccgattatccccaacttccctccccagtgccctgggaaagaaatacaaggaaattctaccttccccaataactttgggttcaatattcagtgaccatagttgacttttacattccataggtattttattttgtggcatttccatgccaatgtttatttcccccaatttgtgtgtatgtaatattgtacggatttactcttgatttttctcatgttctttctccctttgttttaaagtgaacatttacctttattcctggttcttaaaaggtgacaattcattctttaacccagatggtcttaatttgtaattaatttgcctccctaaagagcaataccaaatcacatttttttcatgcccctatctttagctgaacttcacccactattatgcttatggtaaaattaaatagagcaatttggaagtgattccaattttccagcatttcttcatttgattctctttttttagtcttaaaataatgactcctattcagacatatcatttttcttttttgtaaatccagtacgtttttagttaacctttaaatatgctttttgctttcaaaaataaaccagaaaacctatatcct

SEQ ID NO: 16592 - protein, 744 aa, Homo sapiens [sequence omitted]

SEQ ID NO: 16593 - DNA, 1593 bp, Homo sapiens
ttctcttatgtgtttttaaattagcccttcatataaacttcaaattttaggtaggggagcttttatggttccctttatgccagtgaggaaacagccagagaggttgagtaacttgtccagggttatatggttaataagtggttaggattagtaactaggccagacccttctatggcctgtttttatctctaagatgatccccagtatgttagacttgaaactatggatggagtgaaaaatattctctgcaaatacatcaacactctgaaagccattgttttctctgtttagaaagtagttgaaaaagtagtgagaaactagagctttttcttttctggtgttagtttcagcttcctaccttgaagggaaccttaaggcccaaaccttcttttttacatttgaggattctaagtccatgcatctcggaaactatggagacgggaacttcttgtgtgagttggagagcagttgtagaccgttatcatttccatcggtgcggatgctctttgggtggtggtggcatagaagatctgttttggttacctttattgacaagctctactgtgtgactggcagttcagttcagcagataggtttccagcactaatcttaggcactgtgatagattcccgagatgcaaaactgaagaaaataccttgagacaagtcagtgccatctcagatataatttcctcagaaatcaagattttagagcatttgatgtttttaaattagagtcctttcaactaatagcctgtatgaagtttttaaaacacttataaaaaatttatggtgattattattattttgagacagggtcttgctctgttgcctagctggagtgcagtggtgcagtcgtagctcactgctgcctcaaacttctgggcccacacaatcctcctacttcagcctcctaagtagctgggactaaaggtgaatcccaacaccctgggctaacttaaaaaaatattttgtggagatagagtctcactacattgcccaggctggtcactgaactcccagcttccagtgatcctcccacctcagcctctcaaagttctgagattctaagtatgagctgccaaacctggcctatatgaagttttaaacatttgtagaaccagttgttaacattgcttttttttttttttaccataaaattggtatatgtcgaggaattctatcgtttgactatatttctattgtgttaaattttttgttttcttatatcaaaaatatttttgtaaatgtaaagaaaattcaagcagacagaagatggtgcaggtgctttctattatttaatagttcacctggccaggcacagtggctcatgcctgtaatcccggcactttgggaggctgaggcaggcacatcacctgaggtcgggagttcgagatcagcctgacaaatatggagaaactccgtctctactgaaaatacaaaattagccgggtgtggtggtgcatgcctgcgatcccagctactcgggaggccgaggcaggagaatcgcttgaacccgggaggcaaaggttgtagtgagctgagatcgcgccattgcactccagcctgggcaacaagagtgaaactccatctc

SEQ ID NO: 16594 - DNA, 2056 bp, Homo sapiens
  CDS (247)..(1419)
agatagggaaggagggcgggtcggggaggagggatgcggttcggcggaggcggccgccacagggacttgccgccatcacccctgctgccaccaccgcagcctcgggctcccagggcggacacggccaccgcctcagcgggagaggagtctccaccaggactgaccgctgccgcccagcacgtccaggtaaggtactcaactgtgtggggtactacataaatcctgaaagactacaataaagtggtgatgtctcgggaacccaccccacctctacctggagatatgtctactggtcccatagcagaaagctggtgttacacacaggttaaagtggtaaaattttcctatatgtggaccattaataacttcagtttttgtcgagaggaaatgggtgaagtgttaaaaagttcaacattttcatctggcccaagtgacaaaatgaaatggtgcctgagggtaaacccaaagggattagatgatgaaagtaaagactacttgtccttatatttgcttttagtcagctgccccaaaagtgaagttcgagcaaaattcaaattttcccttctgaatgctaaaagggaagaaacaaaagcaatggaaagccaaagagcatatcgatttgtgcaagggaaggactggggttttaaaaaattcattagaagggactttttgcttgatgaagctaatggtcttttaccagatgacaagcttacattattttgtgaggtgagtgtggtccaagattcagtaaacatatcaggacatactaatacaaatactttgaaggtgcctgagtgtcgtctagcagaagatttaggtaatctctgggaaaacacaagatttacagactgcagttttttcgtgagaggacaagaatttaaagctcataaatctgtgcttgcagctcgatctccagtttttaacgccatgtttgaacatgaaatggaagaaagcaaaaagaatcgagtggaaataaatgatttagaccctgaagtttttaaagaaatgatgagattcatttacacagggagagcaccaaaccttgacaaaatggctgacaacttgttggcagctgcagacaaatatgcactggaacggctgaaggtcatgtgcgaagaagctttgtgtagtaacctctcagtagagaatgttgcagatacccttgtccttgcagatttgcacagtgcagaacagttgaaagcacaagccatagactttattaataggtgcagtgtacttcgacaacttgggtgtaaagatgggaaaaactggaacagcaaccaagcaaccgacataatggaaagtgaacgggatcgccaacattttgataaagaagttatgaaagcctatattgaagaccttaaagaaagagaatctgttcccagctataccaccaaagtgtcttttagccttcaactttgatatccatcagaagactgcaaatctcactattctctggagctatatataaatctttgttatgatcatgtcatataggaagaatggcttgtgcttaaggacaaagtctagaaaccactatcatagttgctaaaaaaaatggttttcaaatgtcaaatacatgagtatctccctccatggactggagaattgaaaaattggtttgtatattgatatttccaggttcatttgcatatacttttttccaaataatgcacatttaatatgttttaaaatgtcttatttttaagaattataactaaaagaccaaatactgaagttaagtgcattgttttcaggaatcaaaagataaaggggccgggtgtggtggctcacacctgtaatcccagcactttgggaggccgaagtgggtggatcacctgaggtccggagttcgaggctggtttggccagcatggcgaaaccccatctctactaaaaatacaaaaaattagctgggcatggtggcagttgcctgtaatcctagctactcaggaggctgaggcaggagaatcgcttgaacctgggaggtggagttgcagtgagccgagatcatgggactgcactccagcctgggtgacagagccagactctgtctc

SEQ ID NO: 16595 - protein, 391 aa, Homo sapiens
MSREPTPPLPGDMSTGPIAESWCYTQVKVVKFSYMWTINNFSFCREEMGEVLKSSTFSSGPSDKMKWCLRVNPKGLDDESKDYLSLYLLLVSCPKSEVRAKFKFSLLNAKREETKAMESQRAYRFVQGKDWGFKKFIRRDFLLDEANGLLPDDKLTLFCEVSVVQDSVNISGHTNTNTLKVPECRLAEDLGNLWENTRFTDCSFFVRGQEFKAHKSVLAARSPVFNAMFEHEMEESKKNRVEINDLDPEVFKEMMRFIYTGRAPNLDKMADNLLAAADKYALERLKVMCEEALCSNLSVENVADTLVLADLHSAEQLKAQAIDFINRCSVLRQLGCKDGKNWNSNQATDIMESERDRQHFDKEVMKAYIEDLKERESVPSYTTKVSFSLQL

SEQ ID NO: 16596 - DNA, 1415 bp, Homo sapiens
tgtattaatttgcaaataaatgtctatcttattattttgagagatttaaaaaattttagttcttcaaaattgcattttcacattttgaattacgttatctttgacaaatacagaagatgtcaaattttggtttattttctttggttctaatttatatttttgtttaaaactatatttttcactatagactctttctgtctctcgaggtccctgtataatgaaaaagaaggctggaaaaagtattaacattgtcaaaatccaggaaaagtagttggtcatgatattgatcgttaactttagaaactttttgtatcttgtgggttaaattaggattactatgtggtagtgataaatgatgttaattagggccgagtgcagtggctaacacctgtaattccagcatgtagggaggctgaggtgggaggatgtcttgaatccaggagtttgagaccagcctgtacaacatagtgtaagaccccttctccacacaaaaaattagaaaatttgtcaagcatcttggtgcacacctgtagtcccagctgcttgggaggatgaagcgagagaatcacttaagcccaggtgttcgaggctgcagtgagctatgattgcaccactgcactccagactagatgaccatctcttttaaaaaaatgtgtttatatgttatatgtgatagtgctttttaaaaacatttttaaattatagagacagggtctcactatgttacagcccaggctggtctcaaattcctgggctcaagcaatcctcccaccttagctaacctcccaaagtgctcggattataggcatgagctgcatgcccagctaatttagtgatttttaaaaactgagctggtaattataaattctcttcctggaacttctgactttctcacaattggaatcttttgacaaaaattatcagtaatgggaaaactttgtgtagttgtcatttttcctcccatcagtgtgatagatatgattggagttatgttggactgatattttgaaaaaagatttaattatagctattaataaagacatttaaactactgactatgcatttttattcttttgggagggtttaatgtttatagtttaaagcaaactgttgtttttaaaaaagtatctaacagggccgggcgcggtggctcacacctgtaatcccagcactttgggaggcctaggcgggcggatcacaaggtcaagagatcaagaccatcctggctaacatggtgaaaccctgtctctactaaaaatacaaaaaaatagctgggtgtggcggcgtgcgcctgtagtcccagctactcgggaggctgaggcaggaggatggcatgaacccgggaggcggagcttgcagtgagccgagatcgcgccactgcactccagcctgggcgacagagcaatactctgtct

SEQ ID NO: 16597 - DNA, 2762 bp, Homo sapiens
ttagttatcttcaaaaatgctgtgactgttcagttcaattgacctaaacttcaggtgcttttgtgttatacgggttctttttttggaactgatgagaatgaattggaatctcctattttttaggcagagcaaccatcgaaccctgtatgctaacaataagacatgaccaggcttcattctcccacggcagaatatttatttctgtctcttagaggaagggttaactcccaggtggtgtttgtgttgagttttagaacaatataaaattctaacagagcatttttataatggatgtgccatgtgttcacttaattgaaactcattctgcaaggctggtaaaatggagcaaaacggggaaaaaaaatcaatagttaagaaaggttaatagcacttgattctcctaaatagcgtttttttcatatgtgttcatttacaagaaacgtaagtcattggaatggatttcaacctgttgagtgatacttctttaaaaaactttgcatacattttaagagtgcgagtaatcattttaatatttgctccttttcccctatggaaacaacctgaaaacatccacctcctcacctaattgagtaattggttatgccagatttttaaacagagattacttcacttattttatagcttctgtaattgcattaaggggaagccacataacaaatgcatggggcacagctacatttttgtaactcatctacaggattccttgaattgtgcacagtgtgctcctgggattggctgtctgcgagaggtgacaatgtgtgttcttatgctgctttgcactttcttataggcgtacagagtccctcttctctacagcaatgctgtgcaaagttcatctgttttctctctggggcatctttgtagtgtttttgatgaactgttattccaaaaaagcaggccatgtacaagagtgcaaaccagaaacgagctctgataagtcaacaggatgtccaagttcttttatattcctagcagacgctatcaacagcttgaaaaacgacctgactgtgccgccttagagttaaaaataataggagagctggggcagggggccatgtgcgagcatattcctgcacatgcctggcaaattaacatgaccctgcagtcatctctgagatagaagcttatagtaaacttgccagcttactgacagagaacctggaactgcatcagcaagattatttttgggccgggagcagtagctcacacctgtaatccccgcactttgggaagccgaggcgggcagatcactcaaggccaggagttcaagaccagcctggccaacatggtgaaaccctgtctctactaaagatacaaaaaaaaattagccatatatggtggcgtgcacctgtattcccagctattcaggaggctgaggcatgagaatagtttgaacctgggaggcagaggttgtagtgagctgaggtcacgccaccgcactctagcctgggtgactgagccagagcaatactctgtttcaaaaaaaaatttttttttagtaaaaaaaagactgtttctgggctgccattgctcagtaatattttagcaagtttttgttatcattaaagccattttccatacaccatgctgattctctgtgcttggggaacttgtctttctacaaatataggagtgacttctcaaatgttgtatgtgttcatgcctcattgccagtgggtttaagtttttaaacaatgactatgaggaacgcctttgaactagatttctgcagtttgatttcgaaacataggacatctgttgtcaaacttggcaatggctaaaaaaataagattttcatgcctcccatagttattttaattgaagattgaaatacagaattactgcaaaagaatatgtgttgtcattaattgtcccattttgtgacattcctgggagctaagctaaacaataaaagttattttatatggtagtaaatcagggaccatatggtatcccaaaataagtctgactgagcagttaaattccaggaaattaaaggctaatgttaatgtaattctcacatttgatcactaggggatgaaatcctagatgtaaatggaataccaataaagggcttgacatttcaagaagccattcatacctttaaggtaacaacattcttattgatctcctttatcctattttcctttcttatttccttctggcttgggtttggtgagttgttttttttttttaaccctttgatataaggacattccaaatgtttcagcccacctttcctcactgttttctcagcaaatccggagtggattatttgttttaacggtacgcacaaagttggtgagccccagcctcacaccctgctcgacacccacacacatgagcagatccgcctccccgaacttcaataccagtgggggagcctcggcgggaggttccgatgaaggcagttcttcatccctgggtcggaagacccctgggcccaaggacaggatcgtcatggaagtaacactcaacaaaggtgatagcagctattccttacctttgtctcatttcttgaataacattttggaatctgttgttagcttaattcttccttgttgttctatgaattattcctttggtacaatcttctatcaacaacacgtggtctctgcatgggacagtgaggtcaggtagagagatgttagtcactttagtcaaagtgaagggaagttaccagtagcatggagctctctaagctctccccatgaatcactgtgggtcagaggcttgtgttt

SEQ ID NO: 16598 - DNA, 1912 bp, Homo sapiens
  CDS (1437)..(1862)
ttaattgctttcttccaaatggattgaatcacttcttttaaagtgttttaattaatttttatctatagaacaaaataacaaataagtattttttttttataccataatggtcacccacagcctgtgtatactaagaccatgcatactgataatcagctttattttacaaaagagtttcgctttacccctctggtaattaatggattctgggtatttattaaaaactttaacacaaagactgttaaataccaccagtccagctttggcaaggcactgttggctttgtttatctccatcatcatccaaacagactaccaatcctgatcccagcccaatcttgggcccttgaaaaaataacttaacatcctaactacaagggagaaactcctttcaaattaatgaacctggctgacttatatagccttaaaattatggaaatgacaagggttacaatgtcagaatgagcagtaaaccttccccagtcctatcagagcaaactttctggggttgcatcccctcagaaacccatttggggcccaatctcaatgcacatatcagtgcgcaaagcactaaaattccaggcaacactttgtattgagagaagccaaaattttggtcaggccctgggacatctaaagtcaccaatgtaactacaccatacagattaaaccctcacatgatcatgtaagctatgcagttacccaagctgcatcatttagaaaacctgtacagtttttatggaaaccatccctagtcaaggacactttaaatatatagtctaaataccgttaaggtaggcccactagctgtgttcacattttcccttggccacctaccagggactttaataacttgggaaagtgaaaacaacaagctaacccacatgttcaccatagaaaacaattttgtcttgaaaaacaaggactctttttcccgtgtgggaccagttcctacttatgttttaccagccaattggactggaacctatacagttgtttatttagcccccgaaattaatatagctcccaacaaccaatccttcattatacttttaactgcaaccaccagacacaaatgagccatccaactgataccactttcggtagagctaggaataaccgcaggagtaggaatgagagttagcagccttgcagtttccctatcctattaccaatgcttgtccaaggattttatggaaagcttaggtgacattgcccaaaagtatcatcaccttacaaaatcagatagagtctttggcagtggtggctttgtaaaatagaaggggactggatctcctaaatgctgaagaaggtggcttatgtctttttcctagaggaagaatgctgtttttatgtcaaccaaacaggattagtaagggatgccacccaaaaactagccgattggtaccataagatatgacaacagctgtctgagtcatggggcgcctagtcaaaatgctaatttggggctcacatctccttcctctggccagtccactattaattattatacttgccttggcttttggatcatgtttgttaaatcttttaaccagatttatttcttcttgcctagacagagcaggttgcaggaatttagccaattcagaggtcttgttctccataatttggaattttccttcggatttgatcaagttggatagagttggtcaaacccaatgggaaaaagatgaaaacaacaagaaacagaaacaaacagcaacaacaacaacaacaaaaacaaagcaggaaaaaactgaaactcatcttccctgctggaaacgagctcaaactccagaaaggagttacctgccttccatcatcatggacgcaggaaaatttgccttccttgttggaagcaagtaaaactccaaaaaaggagttgcacagcaaaataaacttcagatctcaac

SEQ ID NO: 16599 - protein, 142 aa, Homo sapiens
MGRLVKMLIWGSHLLPLASPLLIIILALAFGSCLLNLLTRFISSCLDRAGCRNLANSEVLFSIIWNFPSDLIKLDRVGQTQWEKDENNKKQKQTATTTTTKTKQEKTETHLPCWKRAQTPERSYLPSIIMDAGKFAFLVGSK

SEQ ID NO: 16600 - DNA, 2440 bp, Homo sapiens
ttagtagagtactgaaacattccaaaatgtattctttaagatagaattgtatttggaatacaccagttgtatacttgtattagtttgttttcatgctgttgataaagacatacctgagactgggtaatttataaaggaaagaggcttcattgactcatagttccacatggctgaagaggcctcacagtcatggtggaagatgaaggaagagcaacgggacatcttacatggtggccagcaaagagagagcttgtgtagggaaacttccctttataaaaccatcagatctcgtgagacttattcactatcacaagaatagcacaagaaagacccaccctcatgattcagttacctcccaccaggtccctcccatgacatgtgggaatcatgggagctttgattcaagatttgggaggggacatagccaaaccgtatgaatactttcatctggttcatggaaactgtaattatagctgcatgctctggagacaaaatgcctgggttcaaattttcatgtgtctagttcttagctgtgtgaccttacccatcagatttcccctaatctctaatcagcacctgtaaactagaaataataccagtaataacctcatagggattttagaaataccaaatgggagaatccataaaaagtgtttagctcaatacctggcccagaataagcattcataatgtattctagtaattgtagaatagcagcaggaggagtaaaagaataaagcaagatgtcaggcagaaataaactactctcgaatcctttctttaaaataagagtgttcatgttgtggagatcgggtttttcactgtggttctcaaaccctgtgtgccagggtccctgtagggcttggagcccactctcacagtgtctcattcagtaggtctaggctggggccagaggatttgcatttcttacaggttcccaggtgatgctcatgctgcacatctcaccacactctgaaaaccactggcctcaagtatttatttaaattgtgcaccaaaaatatcactgattgatatgaaaataacagtaataattgcttgacatttataaagtctccatctttcaagaagccagagacctctaataaatgtaaccttaaaatacatgatttgtcttcaattgggatggggaaatgggggaggcataggtctctgcccagcacccatttaagggactgatctgaagtcaagcatcaagtccaatgaaactctagggttaggatcaggtatcctggagccacacctaacactttctcccccagaaagtggtctctcccccatttctataaagtcatccattcatagactggtcatacaggtcactgaagatctgctgatcgaccctaatgatgttccacacgttttccttacacacacacacccaggcattcagtttttaaatgccctgaaaacagtcataaaatacatttgaaagtgacaaattcccttttcttagctgcctctcagcagcagaaagatatctcaaactgatgtttcagtaaaatatgtgcgcattaaaaactgatttttttattgaaaatgacgacaacagcagagtttaaggatacaaatccttgccatgagccaccacagaaaggcatatactcaacctttatttatacgtacaaaaaacttctgccacagacttctatacataacctttatgatgtgtaatgtatatgaaatagtaattaaaccacccatctttgctgccttttatacttttctagtgttctccaaaaagcaatacaaattatacatttttgttcttgcatagtatatcattctatcattttgagatttaacattttaacactatcaccattaagtatgaccctgtgaaatttcatctaacaccaaagaagacaatagcataaactgtcctggttctgttgattttgtacatgtcttcaggttttatatgtgtgttattaagacattttgtactgtagatttactgactctcaattctggtattgactagagccaaactccctatagtacttgggagcatggttctattcagttctcaccccagttttcatggttttctgtttgttctgttctgccatctgatctagagtcgcctggcactgccagtgttccgcttagagttcagaactcttggcgacgatcccagtttttctcccagtcaggtaaactgcatactgggtagctgtatttcttttgtgcgaaaatccatgttggggcgatcaatgatgtgtggcacttgtcttcatttctgatttctggggaaaaaattatttcttatgcacagttagcaaagagctagttcttttatattactaccagttatgctaaaattgggggtaggaggagaggaatcacacaactttatgttgatttcaagaattcaaagaaataataatattcatcattttcttgagagtcccctgccttt

SEQ ID NO: 16601 - DNA, 1306 bp, Homo sapiens
  CDS (17)..(1084)
tctggtcctggtcgtcatggtgtggtattccatctcccgggaagacaggtacatcgagcttttttattttcccatcccagagaagaaggagccgtgcccccagggtgaggcagagagcaaggcctctaagctctttggcaactactcccgggatcagcccatcttcctgcggcttgaggattatttctgggtcaagacgccatctgcttatgagctgccctatgggaccaaggggagtgaggatctgctcctccgggtgctagccatcaccagctcctccatccccaagaacatccagagattgaacaatgccccagtggctggctatgagggtgacgtgggctccaagaccaccatgcgtctcttctaccctgaatctgcccacttcgaccccaaagtagaaaacaacccagacacactcctcgtcctggtagctttcaaggcaatggacttccactggattgagaccatcctgagtgataagaagcgggtgcgaaagggtttctggaaacagcctcccctcatctgggatgtcaatcctaaacagattcggattctcaacctcttcttcatggagattgcagctgacaaactgctgagcctgccaatgcaacagccacggaagattaagcaggatgcggaatttggtcagagccgttcatgtcagagctcagcagaatggcagctgaaccctgggagatcactgcctgttctgagaaaggcctgcaattgtgtcttcacgatgcttttccaagacagccaaggcaggtataattttcctcagcaagaaagaggaacctcggaggtgtgcaccgcctggctggccacccaggtattggcaaaagtgactgtcgggctgctggcccggcccccgcccgccgtccctggagcactcacgatgcggtccggcggcggcgtgctccggatgaagcacttgatctggcccttctcgccgtggagggcgtgctgggtctgggtgctggagatgatggggggtcctgttgagaaacagcgtcccattaggcacccgggaagggcacgtccctgctggcgccctcttgggtgggttcagaagtgtattcattaatccaagcattcagcaaacatttgccgaaggcctgtatgtgcaaggtaaagtgcaaggtagaggactcagagataaattaggcattcagtcataaacctctcaagggatcatgagcgaatgcttctaagtcagaacccccagaagatacaaataactgtaataaaaggtggtgagtgttagtaccacaggagcggtgcagataaagtgctaaccgacttc

SEQ ID NO: 16602 - protein, 356 aa, Homo sapiens [sequence omitted]

SEQ ID NO: 16603 - DNA, 1617 bp, Homo sapiens
atagaaattggccgctacaatgaagtctggaagtggcatcataagaacacaaagcaacattaatggagacagggtcattgtaggtagagttctcactgctttcaactaactgctgtatgtgctctccataaatcatgtcctccatatcattgataacctctaaattacatcagtcccgcttcctggatctcctctcccgatctggaattaaactgccctgcttaggcctcattttttctttattaggtgttaactgcctccagtgtcctctccttaaaaccattcaccaacttggctgggggtggctcacgcctgtaattatccggggggcccttttcagctctaaaattctatctaaaccatctttgtagatgttttttaagtaatgagttggtttaaaagtgaacaagggaagactgataaatttttctttttcacttttctgctgtcatatccgattggctaaaagtttttcttgacctgactttttgatctttaaaatgcagcagggtattgatgccaaggttttcactggactttgtaatttgagaagcagaaaatatggttatgcctttcaaaaacatctgcaaaggtttttgtttttgtattttttaaaatcttactcaagcttttcaaaacaataactttctggttcttagtggctatctcagacagttttacggaaaatatttcttacagagacagaaaggattcccacccagttaaatgtttcatcttctgtgatttgccctgcaaggagctcatctgtgtgttgagagggcatctagctttgggctccaattacaagagcagggccataggtggccatgctgcagggcactgctgttcagagggggctggccaaggaaaacactttcttgagcatttgaagcagaagatgaaacagatggtttttagctaggaaagcactcatgaacgtgtccccaagtaaatgttccatatgttaaatcctgactgcagtggaagcagcttgtcattaagtatgctacctgggaaatctccagtcaaacactccatacctgccattttatattctttgattggaaagccacacattaaatatggttctcaactttaaaagcagcactttctaatgcagacattaagtgcttgtggtaaaaatggaaatacaaacaaacctctttcatgttggctgaatcatcatcgttcttattatcatcaatagcaataggaaaaatttatatctcaccagtaaccctgctgttctttttggggtagagaagtagttatgaaatttaattcctgtcttcaagaaatttctaggctgggcacagtggctcacgccggaaatcccaacactttgggaggccaaggcgggcagatctcttgaggacaggagttagagaccagtcgggttaacatggtgaaaccctgtctctactaaaacaaaaattagctgggcgtgatggagtgtgcctgtactcccagctactcaggaggctgaggcaggataattgctcgaacccaggaagtggaggttgcggtaagccaagatcgcaccattgcactccagcctgggcatcgcagcaacactccaaaaaagaaagaaagagagagcgagagagagagagagag

SEQ ID NO: 16604 - DNA, 2549 bp, Homo sapiens
  CDS (523)..(921)
tactggtttggtcacagggctgcaggactacaatgccagcatgcagcgggttcatggacagtgtgtatcactggaggaagacgtggagctgtgcgtgcctcgctgggcttgcagggagatgcagtctcataactaccccagtcgtttggtcgcagggctgcagcagtacaatttcagcatatctctggctcagggagagtgcactagtcactgaaggaagaggtaggtctgtgcgcacctctctgggcttgctgggagaggtagtctcataaacactaccagccctttcatcacatcgctgtaggactacaattccagcatgcacggggcgccggggccgtccgcctcactggaggaagagaaaggcgtgtgagcgccttgctgggctttctgggagatgttgtctctttatttctcccagccctttggtcacagggcttcaagactacaatcccagcatgcatcctgctcagggacaacgcgcgtcactgtaggaagaggtggacctgtgctgttctcgctatgctttttgggatacgtattctcgtaaacactcccagccctttggtcactgggctgcatcactacaatcccagcatacatcgggatcagggagagtgcgctaatcagtggagaaaggggccaggctctgcacacctcgctggtcttgctgggagatgcagtctcataaacactcccagccctttggtcactgggctgcagcgctacaatcctagcatggaccgggcgcagggaatgtgcgcgtcactggaggaagaggcagggttgtgcaagcctctctgggcttggtgggagttgcagtctcataaacactcccagacctctcatcaccgggctgcaggactacaatcccagcatgcacccggctcagggagagtgcgcattactggaggaaaagtctaggctgtggatgcctccttctgcttgctgggagatgtagtttcataaagactcccagaacttgtgtcacagggctgcaggactaccatcccattatgcactggggttagggacacggcccgtcagtggagaaagaggcggggctgtgtgcgtctccttcggcttgctgggagatgtattcttataaacactcccagccctttggtcaaagggctacaggactacaatcccagcatgtgccagtctcgggggcgaggtacaggcctggaagaaggggcagagtggtacacgccccacctaatatgctgggagctgtagtctgttaactgctctcagcctgtttgtcggtaggcttcagaactataatcacagcatgtaccgggacccggggtgcatagccctggagggaggggcagagcggtgtggacttcccggtgtacaaagcactgctgagttcttatgctatgccgactctttgccaaggagaatgagtacataggtggacctagaggacaggtctgcgctgagcattgaggagggtattaccctacataggcaccttacctttgcccaaatcgggcgggttgtcctcaactgattggccctatccttctcaagttcctctttcagctgcacccagggttctttccagagcattgcgccttctgcagcccagggcgctgccttctttcctaaactgctgtggaaactgtcctgatgtctgagacactgtccattgtgccgcagccctctttttttctctagccaagcctcatgctcaacagcttttgagagaaatcttccacgtggcctgcttatgaacagcttcagaattctgtagggggtgacaaggtctgtggcttcctggaaatgtcactctcaatggcgcctttttcacgaatgtgaaagttgaggcatcaggaaggttaattattgggttgcacaaaatctgctaagagcaaaggagaaaacctcatttccgaggcatgagtcttgtgagccattttcatcaacccatttaagtggacaagctccaaaatgaaacctgaagctgctgactatttaggcattttacacttgaaatcatcggtctcatctcaagtcactcctgacttgccagtgtctcagaaacacaaatgggaccggatccctcaggagcagatagtgttccagctttgttggagcgacatttaagatgtggagcacttggggtcgtttgaaacccgctatcttcagtagggacttttacttctagagaacatgtgcattttgattttatctgtcctcaaactgaacttttgctcattttaatagtaaaaacacattcctaggtggagacttaagatgctaacgagacatgcaatgtatgcacaaatatgtacagttagtgcacatgtgcacccagaagaccactcaaaacatgcttacactaacacttctttccaccttcttatgaataatcgtgcaaaacccccagaaggagggtttctccagtaacaattaatggtgtctcactcttatgagcagcctgccctggaatctctttctcagaatgtaccgtctattctgcacttaattttcaaagtagtcttttctttttttgtgtgcaataaattactctatgctgt

SEQ ID NO: 16605 - protein, 133 aa, Homo sapiens
MLFGIRILVNTPSPLVTGLHHYNPSIHRDQGECANQWRKGPGSAHLAGLAGRCSLINTPSPLVTGLQRYNPSMDRAQGMCASLEEEAGLCKPLWAWWELQSHKHSQTSHHRAAGLQSQHAPGSGRVRITGGKV

SEQ ID NO: 16606 - DNA, 2432 bp, Homo sapiens
atgatcaaagtacagtaggtaagaagtaaattttcaaaaacgtgttgtggtccccctttaattaatgcttcacgcgcagagcaaagccataaaccatgtagcgggggcgctgtctgtgcgccctgcagtcacctccctcctgaaggtgccggagcgccctgatggcactcgcaggagaggctggtgcttctgggcaattctgaaacaggcctttctaaccatgcagtcctctgctccctttgtctcggaatgtcaggttgagacttgtggctgctccagtccctggagatcccttttggtgaatggaatgcaagtccattcttgaattattgtagtgtttgagctgtacctgcagaggccaggtctcagcacgtctgactcacctcagttggaacaccccgattcagagagggaacagattcaaagtgagagattgaccacgccgcctctaactctgtcgccgttgtttctttattaaaagtcagattgatggtaaattaggatactacccgactgaatactatccttgctgttaaaaatgattatggagatcatgcggctccatggaaaaatgctaatgattctgtgccaagtgtaaaaagccaaattcagcatggtactcttgctgtgcttacagttatataaaagtcatgcatctggactggaagggaatttggaaaaatcagatttatgggataagttgatttatggcattgtgggctaattttcagatttccttttttaaaaaacaataatgttcctgcagtaagttttaaaattgtgggtaaaagaatagtaaccccacaaggagtgacaattgagcttgcatttttacctcccctggctccagcatttgaaactttagacctggtcaccgtggcccgccaaggagaagctgcccgtagtgggagccaggccacagggtgggacgttggagtggaaacggccagttccaccctataaaactttaatgcggttgttttatttttctggaagaaatgaaacgctcagggatgggactgaggggaagcagccgtgggccacctggtgcttttgaactggtcaccggagggtgtcgacaagggctgtcaggccatcgggatttctcctggttcccctccagggcatcctgacctgcatctccccagtgtcccagcacacagaggagagcaagccttgggcaggcacagcaccgcagctctgcatggatctgtgaaggagcggaaggatgaaatgcccctgggctgcaagccttctttccagaagggctgaaggaaagaacggattattggcccatcctttttgccagcaaagtagggtttttttgtttgtttttcttccccctcttttgatgtggggctgctctccctgtaagccgactgaaagggaaaacggtgtgctagaaccaagccatctgttgccaacaggaagggtattagcaggtctgttatgagttgctcttccgttggtagtattgatgtgcctcgtaagttaacttgcaagaatccaggagaacaagccagaaaggctcacggagcccatgctgccagtcatctgagccctgctaaccctcaggtccagcaggggcagtccatccctctccaggtgttccaggaacattgcagaatggcctgatctctccaactctgtgtgggcccggtccagaccaggagggcgctatggaggcagatggggttttgggccctggaccaaaacactcatctgcttacctcgcctcgccccaagaatggggactttggagcagaccggaataaaggaaatgatcttctggagtgggatctctgagtgccagtgttggccggtttcctggacatcacctctgccagcagtgagctctgggcctcacaggtgtgtctgttcatccagtggtccttttcctctcgtaggaaaggatgcctgtgctgcacctggccagagccagacccttccccaccctgcgcagtttgaccagcgatgggctcagcatctgacacctgacgcctccatccgacaggtgttccctgagtgacacttggttagccagacagccctgccctcatctgccctcctgtagactcacccgtggacacaccatggtgtactcggtttgagagcttaatcatagtgggtagtgctggagaggggaatgggacaggatgtggtcctgccgcaggggctggccgcagcctgcctgagggagccctgggcagggggccaagggtagcccacctgagtatcggccccctggatgctccgcaggtctgcgggttggagtgagggcagaccagccagggcaccctcattctcctgggaggatgccttgctttcttggtctggtggtctcttagttacattacactccggtgtattcgtgtactgatttttcacaaaagctttttagtttggaatggtatgacttactgtaaaattgc

SEQ ID NO: 16607 - DNA, 2737 bp, Homo sapiens
gctcatgaaagtgtaggggccccccatgggatccccagaatattttctctctcaagctagtctacactcaagtcttcagtagttagctagttgtcttttaagttgctggcttcagtggcattttctgctcccagtaggttgtgattctctgttttcaacttgtctccaatttccaaggtaggtgtttgttctccttaaatagaggaagaactgttttatgagttaatgtgagattattttattgtgcatatattcactttgagatggctgttagactagagctatctagtagtcaattattcacatgagtatgtgaacctgagaatttgagacaggtctcagttaatttagaaagtttattgtgccaaggttcaggatgtgtacccgtgatacagccccaggaagtactggcaacatgtgcctaaggtggtcagggcatgtctttgttttatacattttagggaggcatgagacatcaatcaatatatgtaagaagtacattggttccatccagaaaggcagggacaacttgaagccccatccatccgcctgcagccgggagactcagagcctgggaggggcctgaggcccgggccgcccgcctccttcttccaggtcacaggtaggtgagagacaaatggttgcattcttttgagtttctgataagcctttccaaaggaagccatcagaatatgcatctatatcagtgagcagagggatgacatttaatagaatgggaggcaggtttgtcttgagcagttcccagcttgaattctcccttagcttagtaattttggggcccaaaatattttccttttacatttcccccatttctttttaaaaaaatcttttggagaaaacattttagaagaaaatgagtctctggtctcaggttttatctgatctctcatggctaggacagtttgttcctagatgggttaggtcccaaagctcatttttagcagattgtgaagtctcatgtcctatgaagaggaaacgggaggaagggagaaaaacaacaaaagaacaaccctggaaaaattgatataggctatattactctgaagtccatacatcagtaagtaggtatgaaagtggcttatgtatgtaaataggttgctgtttattttcttctgaagtttaagttgtctggcttcagttcacagggctttaagaaagcacagcttagttttcagtgactccaacttaggaaaaatggggcaaaaaagaaggaagaaaattgaaaacattattttgaagacttgtggccaagaaaaattagaatttggtccaaactgtagaaaataataaacattgagaaaacattaggaaagactagaatctaacaacaggtctactatagttttgaaacataatttttctctccagtttcccatttttactaaagacaaatcatggtatgactggtttgctttattatacttggcctaattatttctatacaatgcaacaagaaaatttttacataggcttttaaactggcttttttggactttcataggagaaatctcaaataagactcttttaaagccaagcccagccatggatttatgcaatcaaatacctatgagttgggtgaatttcctctcctcttgaggttccaagataaacctgaggcttctgggcctgtcagaaagtgacattcttcacttaacacaggtcagaaaccctgtacagggactatgtacacaaaatatgaggccagtttttccaagggctttattggttccataagtcacgtttgattccttaaaggaaagcacactatttcagtcaaagccttggtaaaataaccaatttctccaattgtatcctgttacgaattaaaacagattcttattgcacttgtgcaaatgactgtattaccataagttaagaatactcataaatatttccaaattctggagaaatcaggtagtgaaaaacaaatatgctcaaaattttgttcataggagtatactaaactcttaaaagctgtcaatagctcaaaagaaaagtttgaagactaaaaaacaaaggataagcaacatttaaagcaagagttaaaaagattgctttagtctcttgtcagttcagtttatggagttaactcctgttctgcttgatagtcatgaacacttcagctctccatgagaatcctgcaagttttttttccccctctattctaatgtcacaatctgcaaagttatcagaaacttgcatttaagaacacctgtttgagttccatagttgattatagaaccacctaaaaaggaccaaaacaagacaacaattgtccatggatgacaaaaattttagggcagccataatcaaagacacaattgacaaatgtgttacctctgtggcacacaataatttaacaacaattacaattactgataacgttcactaagttaaatcagaattacaggagtttcccatcattttggaacacataccaataacatttatacaaatatagcccaaagaaaaccaaacatcatttcatatttgacaatgctccctgtctaatttttataccaaataagccaaattatgtcatttttggactttaggggacctaatatcttaaaggattaattaggtcaggaaaagacaatttataaattgattttggaaagtttgtaaaatatcaaaggtttaaaagacttgataccatgaaataggatcataggtcattgtaaaataagtcattcatttaaccaaagtgataagg

SEQ ID NO: 16608 - DNA, 2331 bp, Homo sapiens
tccatgatccagactcagcagttgtcgcaccatgtctgacaaacgctgtattccttgacagagctttgataacgtaccatatgcagaaggagttattcctgataaggctaaggcttgtctctgttggcaccagctaatgcaatggcaggtcttctgcttggtgttgggctcctgcctactcctaacccacttactcagactggcgctgttccaccggctgctttgggggctcctactcttgttcctgcccttgctgcgcttgggcttcctggagcaaacttgaactcaatctgttgccacagatagttgctgaagcttatgagcactgttggtcccaagttgaagcatgtagctgctggtcttgtttcaccaagtctgaaatcggatacctctagtaaagaaatagagaaaggggccccacatggtggctcaggccagtaatcccagagctttgggaggctgaggagggtggatcacttgaggtcaggagttcgagaccaacctgaccaacatggtgaaaccttgtctctactaaaaattcaaaattagccgggcatggtggcgcatgcctgtaatcccaaatacttaggaggctgaggcaggagaatcgcctgaaccctggaggcggaggttgcagtgagccgagattgtgccattgcactccagcctgggcaacgagcacaaaactcttggctcaaaaaaaaaatagaggaagctatgaaaagagtacaagaagcacactgcctaatttcggctgctatagaaccagagaaagaaaaaagaaggcattcaagatcacattctaggaggaggaggactctcatcttctagacacagtcaaggagcagatcaagagagtgattacattgtcagtctaggagtcgttgatgattcaaaagcccaagacagagaagatctcattccagagagagaggcagaaggtcaaggagcacatcaaaaacgagagacagaaagaaagaagacaaaagaaacattcaaaaacacccccagaaagttacagcacggctagacattatagaagtacaaacagagagacaacaacgaagaagcaggagtggaacaagatctcctaaaaagtctcggtgtcctaaaagaaaattgtctctctcaccatcccctgggaaacataaaaagaagaagaaagataaagagagaaataggtatgaaagagaacgatcaacaagcaagaagaagagtaaagatagggaaaaggaccaggaaagaaaatcagagagtgatacagatgtaaaagttacacgggtttatgatgaagaggaacaagggtatgacagtgagagagaggaaaaaaagagaagaaagcaatagaagcagattcccctaaaacaaagaaacgttctgtggaaaagggaactggtgattcactaggagaacccatagtgaatgggaatgatcatcatgaagaagacatggatatgagtgactgaaaattgcctctatgggaatccagctgtatacatgcatcagtgtcattgctttgtgtaatttctgaatgttgtatttgttcatctcaaccctagatgtatatagctctgagttattaatggttataaagctcttgttattgatattacctatttacatcaaaaagcttttagaaaatggtatgatgtaagcaattcttgtcatggtgaaatctgatggtgtaacccgttttactattggcgctgcttcataacaaaaatgaaaagctatatacatctacagccagaatggattgtttatgtcatataatttcctttactaagttcacttacattacttacagagttttattcattgccataatagagccatgtaggaaatgcactgactgcatgttattgtggcaagaatatcctaaatgtcattaaaatcctccaacatgatggatctacttatggtcttgtttgttgacatgccaaattaacatagttccatctggaaatgagcatttgaaatgataatccggctgggcacagtggctcacccctgtaattttagcactttgggaggccgaaggggggcagatcacctgaggtaaggagttccagaccagcctggctaacatggcgaaaccttgtctctactaaaacacaaacgcgcgtgcgcgcgcgcgcacacacacacacacacacacacacacacacacacacacacaaaattagccaggcatggtggtacatgcctgtaatcccagctactccagattctgaggcaggagaatcacttgaacccaggaggcagagtttgcagtgagccgagattgcgctactgcactctagcctaggcgacagagcaagactccatctc

SEQ ID NO: 16609 - DNA, 1876 bp, Homo sapiens
  CDS (302)..(1243)
gaaggaagcccccagccccttccaggccctgttctcagatatcccgcccaggtacccgttccaagccctgccaccgcactacgggaggccctaccctttcctgctgcagcccacggccgccgccgacgcggacggcttggcccctgatgtgccgctcccggctgatgggcccgagcgcctggcactctcacccgaagacaagcccatccgcttgtccccctccaagatcacagagccgctgcgggagggcccggaggaagaaccgctggctgagcgggaggtgaaggcagaggtggaggacatggacgagggccccacagagctgccgcctctggagtcgccgctgccactgcccgccgcggaagccatggctacccccagccctgcagggggttgtggaggtggcctgttggaggcccaggcgctgagtgccaccgggcagagctgcgcagagccctctgagtgtccagactttgtggaggggcctgaaccacgggtggattccccgggccggacagaaccctgcaccgccgccctggacctgggggtgcagctgacacccgagacactggcggaggccaaggaggagccggtggaggtgcctgtggcggtgcccgtggtggaggcagtgcccgaggaaggcctggcgcaggtggcaccgagcgagtcccagcccaccctagaaatgtcagactgtgacgtgcccgccggggagggacagtgcccgagcctggagccccaagaggccgtgcctgtactcggcagcacctgcttcctggaagaggcaagctctgaccagttcctgcccagtctggaggacccactggctggcatgagcgccctggcggcagctgcggagctgccccaggccaggcctctgccctccccgggtgctgctggagcccaggccttggagaagctggaagcagccgagagccttgtcttggagcagagcttcctgcatggcatcaccctgctaagtgagatcgcagagctggagctggagaggaggagcccaccccaaggcctcccaccgtgcatgggacagggcagcccgatgccagctggcctacctgactgtgccaggggccctgcccccaccctctcaggatggcctagacttggggaacagagccgggtggggttgcagcccggagtgtctgtcaaaggcaccaggtggagagggcccggcacaggcccaccctggtccaaaccctcacactacagaaaaccccaatggtgctgaaactgtcgcccggccacgcctggcccctccccacccaggagggaggtggcacttcttaacctgtacagttttattgtaccaagagactcgccccgcccctgtatcataagcctttaaatggagtcaactttttaattatatatataaagataaatatatataaatatatatataaactttttaaaactgtgaaaaatagctatgaaattataaaaaaaaaacattctgacgtgcagaatattattttttatttcctgttagattatagtgtctagcaccggcttcaccggcctcccagtccccagcacaccccccgcccaccccgccaagtgtactgtactcaccccccaggatagagaagtgtttgttagggagagaagagggagaggcaggagccggcccaagcccagggtccctgcttgggccccagaaagcacttaaccaggccccaagccttcaagggaaaccaaggcctcaaccagacaatcttgagggaaggaaaagccagactttgggtttgttttttgggggaattattggttttttttttttatgtttcttttggaattttgtttgttggcaaattctgtgtgatcttttttcataaaaaaaaagaaaagatttaattgg

SEQ ID NO: 16610 - protein, 314 aa, Homo sapiens [sequence omitted]

SEQ ID NO: 16611 - DNA, 1650 bp, Homo sapiens
ttttttacttaaaaattttgaattaatatctcaacttataagagcagctttgtcagtatattttaaatgattcccacaatgctgatttaggcattttacattttgatatgcatttttagctggttttcaaagtcacaaggctctaaggaaaagaactaatccttagttggcaggaaagtccctccccaaatccttggattaaaatagaatctgccgccagggctttccttgtcttctgtgattgagatctgtctcaggtgggaaggcatccagtacctgtgcatggcaagttcattctttagagatagaatgtgcaactttaatatttattgataggcacactaattctcttgctgatggtaattaatgaggtgcttatatcttattttgcggtagtttaacgagcttcgggctataggagagatccggtgcttgctgtaaatgctgagaatcaaagatgctggaggaaaatgcagaaaatggagcagaaaaaataaggttttagcagataaaatatctcagattaaaaacactctcaaaacaaaccttggtaaggcagaagcatttaaaaatcagggagagcttgccagggaggaaagtcgcaggttccctattccttgttccctaagcatgctgttaattttgaccacccatttgtctttctacccctttggcttcgtctgtgttagcagtgtgaagtgaaaaattgataggaaaatgtattttttttcttaaggcttagatagttacagccaaaacattttgtcatattgggttttgaataattgtgtcaaatctacacttaattttgccttagacagctagccttatgaccctagttaacctgtattttctcttattctttcatcctttggaaatgaggttcacagaatacaaattcagaagagcataaattctaactccttagaagacaggaatagaagtcaaagtgacctcaataaatcaaaagcaagttgaagttcaatagggacaaatgtaaggtaggatacttatgcctaatagatggactcacaattttaaaatcatctgggcatgattgtgatggaaaagtgtctctctgtcaaggacatgaggaagccacatccgcagccttgtctaaggacctactatgtgccaggcattttgcataagtcagcttgcttacaaatacactgtaataatctcaacagtaactctcaaagctgtgtataatttgtgctctcattttatagatgtggaagctgaggccgagagagggtaaataatttgctcaaatgttcacagttagtgatttaactggttttggatcctgctgtatctacttgaccaagagtacttcattacagagctgttatttaaaaagccaacccggccgggtgcggtggctcacgcctgtgatcccagcactttgggaggccgaggcgggcagatcacaatgtcaggagatcgagaccatcctggctaatatgatgaagccctgtctctactaaaaatacaaaaaattagcctggcgtggtggcgggcgcctgtagacgcagctactcgggaggctgaggcaggataatggcgtgaacccgggaggcagagcttgcagtgagccgaaattgcgccactgcactccagcctgggcaaccgagcgagacaccctcc

SEQ ID NO: 16612 - DNA, 1861 bp, Homo sapiens
ggaaaagccatagcaggagttattaaccagccatattacaactatgaggcaggaccagatgctgtgttggggaggacaatctggggagttttaggtttaggcgcctttgggtttcagctgaaagaagtccctgctgggaaacacattatcacaactactcgatcccatagcaacaagttggttaccgactgtgttgctgctatgaaccccgatgctgtgctgcgagtaggaggagcaggaaataagattattcagctgattgaaggcaaagcctctgcttatgtatttgcaagtcctggttgtaagaagtgggatacttgtgctccagaagttattttacatgctgtgggaggcaagttaaccgatatccatgggaatgttcttcagtaccacaaggatgtgaagcatatgaactctgcaggagtcctggccacactgaggaattatgactactatgcaagccgagttccagaatctattaaaaatgcacttgttccttaaaggaaagtttcatttggccgggcgcggtggctcatgcctgtaatcccggcactttgggaggccgaggcaggtggatcacttgagctcaggagtttgagaccagcctgggcaatatcgtgagaccccatctctacaaaaatacaaattaactgggcatcctgtcatgcgcctgtcatcccagctacttgagaggctgaggcagaagaatctcttgagcccggagggcagaggttgcagtgagctgagatcgtgccactgcactccagcctgagtgacaggagttaagccctgtctcagaaaaaaaaaaaacaaaaacccaaaaagtacttaaagtttcatttacttagctaggagaaagacttggttctcaaaataatacattttaagattaattgggtagaattagagttccacctttattcattgttgagcagtgatttatatttagttattatatttaggaatagaaaatagaattaaataatttaacttgattaatcaaccagaccaattttgacgtctggagaacttataaactcaatatgttatatttgttttcctgtatttaggtggagaaatgagaaaaagctttagttccaattgacagttcaggtcaatgttcaatgaacattcctatcttctaaaccagatttctctttttttttcctgagacggagtctcgctctgtagcctaggctggagtgtagtggcgtgatctcggctcactgcaagctccgcctcccgggttcatgccattctcctgcctcagcctcccgagtagctgggactgcaggcaccgccaccacgcctggctaattttttgtatttttagtagagaaggtgtttcaccgtgttggccaggatggtcttgatctcctgacatcgtgatctgtctgcctcggactcccaaagtgctgggattacaggtgtgagccaccgcacctggcctaaaccagatttctttagggcacaattttttctggaatctcactcttgtttttcacagtaattttaaaaacgtttctactccaattaagaatatatatgatgttattatatatgcttatgaaacagatttatgagaaaagttttttttaaataaattatttaatcctagctctttgttattcaccagctttttaaaaaagtgtttgaaaattatacattctcgactttggggattagtttattcttgtggcatcattataaggcttaattgtggaaagctaagtacttgcttctattccttccaatgagagattataacataaactattaaaattattctgctaatatacctagatttttatttttaggtctctgtccattgcttttaattaaaattatctgttttcaaatc

SEQ ID NO: 16613 - DNA, 1592 bp, Homo sapiens
taatactgtgtgcttagccaacatgtgctccccacggggtttccaccgctgctctggaagttccttcctcagaaaagagagtcagaccctccttgtctccattccacggctctagagactaagcctggactggaaatcgcagccaagtggagttgtggggctagtcagagacgatgcttaggatcctgggactcgaccattgcccaggaacatctcagacagggagacatgtagccaggtttgcacaactctgcctgcgtgcgcaaccccagctgaaccccttccattgctacgtaaagaactcaagtggcttgaaggcttctaggacaggtttttaaatcccaactgtacgactccctagttgagtgaccttagccaagggaagtgggaaataaattattggatggctaaatgtgccaggcactgtgcttgcattggagcctgtctgaccccgaagcacaaatcctctctctgtgagcactcgtcctacactcagagccagaggccttaggctggaggcacagttatttgactctgggaagtcacttccatcctctctggacctcaatctctcttcaggcaaataggacagtcctgctgaccccatggggtgatggtgacattaaaatggaacagcgtggtgaaagctctctcatactcagcgtgtacgatctttgggaccaatcacaaggaagtttttagaaatatagattgctagatgatgggtgagggtcttgacccagtggccctgagaatctatgtctaaaaaaaaaaaaaaaaaaaaaaaaaaagcacactcaaggcaggtttgtgaagcagctcatgtttacagatgtaagggatgaatatcatttccccagacctccgggatgccaaaattttgcttcctcttccctgccccacctaaaacgttgccagtcccagccctgcccttggactctatctctgaaggtttttattttattccttcactgatagaatctggctgcctctcagcaccttccagccaaagacccagggaagggagagaagggtaggaaagagaaggctctgatccaatgcataaattgcccttagttacccaaattgggtaaattggcatggagggtatccaagccacaaggtggagaagcagccagggtctgagtaagcagacgaagcatccaggtggtggctcaccctctgcctttggctaggaaacaatgtgtgttggttgaatcccaagggacacatcttgtatttattttactgactttgcttgtatttttctaaccttgttgggtacttttttgggggtgaagaaagtctaggacaaccttttatgtttgaaattctcaaatatccctaccagaagaggcacaggctagcatggatgattccaaacaagggattgagaagtcacttccactggttttaaggtgaatggcatggaggtacccactcccccattaaatttaccttcaagcctggtgtggtggctcacgcctgtaatcccatgactcaggaggctcaggtgggaggattacatgaccccagaagtttgagacaagcctgggcaacagagcaagactctctaccctgtctcaaaaaac

SEQ ID NO: 16614 - DNA, 1860 bp, Homo sapiens
cactaaggattggagaactcatagaacaaggtgaaagacatgagtgccctcccaaagtctgagtgcacgaaaatttctctcttgccttgaggagcagaaaagcttctgatggacatgggcttctgtgagacttatcacacatagtgtatcgtggcatgaagcccggcacatagcaggccctgcatattgatggacaaatggatggcctgcctgccttccctgtccgttcacctgtgcaaaggcttcctcagacatgccactctgtggctcccaatatagggtgcagacaagagcaatccctgacatgacattatagcctgggaaagggctggctcactgatgagaatgtggaggcatcagcaaggatctcggtgggttgctcagagaggtgatgcactaagccttaatcctggacaccagtacccctgcagcatggcttgctcaacaacagtctttgagtggcatagaattccaaagaaaatggtgctgggtggagaatggagagagcatgatggagcagagtcccagtcactgaccaactaactggtcgtttgattaggaaacagtttggccaaagtaccacctttgagacctaagttcttttgatacctttgagaagagccactgagcctgagttgaaatatttttagcttagtcatctgtgtttgctataggagaaattgtaacacaagaaataactcctttttacatgatcatttatatctatatacatatatatacttgcatacactatcactgcattaaaaaatgagtttgggctgggcatggtggctcacacctataatcccaacactttcggaggccaaggagggacaaacgaacccttgaggccaggagttccagactaacttgggcaacacagggcgacccccatctctacaaaacataaaagatttttaaaaaattagccaggcatggtggcacatgcctgtggtctcagctacttgggaggctgaggcaggagaatcatttgagcccaggaggtcaaggctgcagtgagctttgatcacaccactgcactccagcctgggcaacagagcaagaccccatcctccacccccccaaaaaatagaaagaaaaaaaaagtttgcactaattgaggtacatctgcaagtgagactttttgtcaggaaaaggcaatatatcaggtctcctcaggacgatggaggccttatatggtgtgttaccttgaaaactgaatatcaacgttcaccttgattcaggaaagctgggtgctgtctccatgccatgaatcatgagagcaaaggatcactgcttaaaaatactgaatttaccttcacaaaagatttctaaagatttatgtaatgtgttttaaaagcgccagtaaaccatcggatcaattggaaagaaggcaactcttcagcctttgttatctagctgaaaacaaatgacaactttcaaaacattggcagtagttgttgaaaaagacgtctattgttcaaagtttctttctccttaaaggacggtgttccaatgaattcagtagagcccactttcctccactgtggaggaagaatccctaagagatactcaaatgattaaattaaaattggatcatcaaactcaagagaggcataaacttagacacagtcttgcatttttgtctttcctgaactcttctgccattttcctccttcactcgtcctgaaaatctgcaagttacataataaaactttagatatttgtctgacaaagtgtaattactcaactgaataaatgactgagaacaagttacaaaaggaatcatgaatcctggtaaacaataaagaagattcagacactgagggaaaaaaataaagctttttacttaaataatgc

SEQ ID NO: 16615 - DNA, 2303 bp, Homo sapiens
  CDS (438)..(1742)
gaccaaatccagttactagagcccaagcaaatgagaacaggtaagattccagtctccccctcttacaggcatctctgactatgagtgattctcttggagcccaaccatgacaagagacagaactccccaccacaaagactgcactgcatatctcataaaggagagcacactatggacagcctcctcctctccttcccagccccctccttatgtgggctgcagatgagcattgatagtagtaggactggctctgctacatcatcatagactctgaagggaggtgtgtgatattgattgctgaaaggtccctagaggctctcttcatactattcaacattctgttacagtcattaaaaaataatgtgtacagagatgtcctgatacacatgtccttcattttctgacagaccttggttgaatatggagcaaatgtcaccatgcagaaccacgctggggaaaagccctcccagagcgccgagcggcaggggcacaccctgtgctccaggtacctggtggtggtggagacctgcatgtcgctggcctctcaagtggtgaagttaaccaagcagctaaaggaacaaacagtagaacgtgtcacgctgcagaaccaactccaacaatttctagaagcccagaaatcagagggcaagtcactcccttcttcacccagttcaccatcctcacctgcctccagaaagtcccagtggaaatctccagatgcagatgatgattctgtagccaaaagcaagccaggagtccaagaggggattcaggttcttggaagcctgtcagcctccagccgggctagacccaaagcaaaagatgaacattctgataaaatcttacgccagttattgggaaaggaaatctcagaaaatgtctgcacccaggaaaaactgtccttggaattccaggatgctcaggcttcctctagaaattctaaaaagatcccactggagaagagggaactgaagttagccaggctgagacagctgatgcagaggtcactgagtgagtctgacacagactccaacaactctgaggaccccaagactaccccagtgaggaaggctgaccgaccaaggccgcagcccattgtagaaagcgtagagagtatggacagcgcagaaagcctgcacctgatgattaagaaacacaccttggcatcagggggacgcaggtttcctttcagcatcaaggcctccaaatccctggatggccacagcccatctcccacctcagagagcagcgaaccagacttagaatcccagtatccaggctcagggagtattcctccaaaccagccctctggtgaccctcagcagcccagccctgacagtactgctgcccagaaagttgccacaagtcccaagagtgccctcaagtctccatcttccaagcgtaggacatctcagaacttaaaactgagagttacctttgaggagcctgtggtgcagatggagcagcctagccttgaactgaatggagaaaaagacaaagataagggcaggactctccagcggacctccacaagtaacgaatcgggggatcaactgaaaaggccttttggagcctttcgatctatcatggagacactaagtggcaaccaaaacaataataataactaccaggcagccaaccagctgaaaacctctacattgcccttgacctcacttgggaggaagacagatgccaagggaaaccctgccagctccgctagcaaaggaaagaataaggcagcataatgacatcaatagaaaaatgaagaaatcctacagcataaagcacattgctgagccagagtcaaaagaactcttcttgtaaatcactttttaaattttctctcactgatgccctttggaaattattggaaatttctggactatcctctttggaaagagaaccatgaaaacaatgcctcaccagcagaagaacagaatatcaggatgccttaaatttatagtagtagactgtaaaagattcattttggggtgatatctgtatatataacttgtttttttaaaagatgccgtttaaaagcatgattgggaaaatgtatgttttttaagagtagattgattcaccctacccacaggacattcaccaagccactgataccattttatatttcatcaattgcatgagtatttgctaatgttgattgaacctccctttccccataatgtgggcagatttggctcagctccttcatgagatcaggtcagtggtattgtttctgtcaagagtgttttttctgtcatttctactttttgtataaaggaaataaaacaatgttaacagcc

SEQ ID NO: 16616 - protein, 435 aa, Homo sapiens [sequence omitted]

SEQ ID NO: 16617 - DNA, 1608 bp, Homo sapiens
attccgggctcgaaggctgtgcggtctgccaggagctgcggccccgtccggcccgggctggtatcacctgattttgatacagcagcaggaagcttgttcccagcctaccagaaacaccaaaaccgggcgagacactcaagtcgaaaacctaccacctccaagtttccacatctaacttttgagagtccgcaatcttccagttcagagacattggggatccccttaatccgagagtgccccagtgaatcagaaaaggatgtttccagaagacccttagttccagtgctcagtccccaaagctgtgggaacatgtcagtgcaggcacttcagagcttaccttatgtgttcattccacctgatatccagaccccagagtcatcgtctgtgaaggaagaactcattccccaagatcagaaggaaaacagccttctaagctgcactcttcacactggcactcctaatagcccagagcctggacctgttctggttaaagacacccccgaggacaagtatggaataaaggtcacatggaggagacgacagcacctgcttgcttacctcagggagagagggaagctgagcagaagccaattccttgtgaaaagctgactgccatcagtaatctcaatagaaaagagatatgttttctggagtcataaaggaattcaattcctagggtttttgtttttgtttttgagatgtaatattgctctgttgcccaggctggagtgcagtggtatgatctcaccttactgcaaccaccacttcctgggttcaagcgattctcctgcctcagcctccccagtagctgggattacaggcaccagccaccatgcctggctaatttttttgtatttttagtagagatgtggtttctccatgttggccaggctggtctcaaaatcctgacctcaagtcatctgctggccttgacctcacaaagtgctggcccagccgagatttgttttctaagatactttgtgtcatgaacagttcagtttagtgtcatgaactattcacttcatatttttcttgtattaactgtttaaatttttaaaatatcttgtagtaactctttaaaatgtatgtaagtaaatggctgcagaaagtttttttagagaatcctgcttccatcagtaatacagcaatattaccccatccactaatggtctttgtttccttaaccactactcattaatccttaatcacctcattcaaactaattcattctgcatttttgagtaccaactcttgtcaggctcagtggcagcttctacgacctgatggatggaagaaaatcaaactctgtgactctatggttgactgccacctctgcaaccttgactcatctgctgaaaaggcaagaagaagaaagggcagcaagccctgttttagggactacataagatgaggggagataagggggacatagatgagttctttaggattgcgtgtgttttgagtttttgtttctaactgaagaaatctgtcaatattaaatagggtgggaaaatggtttcttagaataactgttcaactgtgtgtaaataaggaaagttttcaatgagtattacttattgtaattaatgcagaaggacttccccagtc

SEQ ID NO: 16618 - DNA, 1811 bp, Homo sapiens
  CDS (323)..(1708)
gtaggcggggcgagccggctgggctcagggtccaccagctcacccgggtcgaggggcaatctgaggcgactggtgacgcgcttatccacttccctcctcccgcctccccccggggtggcgctcgctggtgacgtagtgagtgtgatggccgccgcgaggccgggaaggtgaagtcaggactggtggagtcaacacagtcaatcaatagccaacctcaacctgagacaggacagaagagaactcagaatctttttgtcttttggacttcagccatgtccatgatgcctaccctgtgaagatctctcaccatccaaaaaacgcaatgtccctgctcttctctcgatgcaactctatcgtcacagtcaagaaaaataagagacacatggctgaggtgaatgcatccccacttaagcactttgtcactgccaagaagaagatcaatggcatttttgagcagctgggcgctctcgcagaaggctttcaagtgaggatgtttgagtttcagaattttgagaggagatttgaggagtgcatctcccagtctgcagtgaagaccaagtttgagcagcacacggtccgggccaagcagattgcagaggcggttcgactcatcatggactccctgcacatggcggctcgggagcagcaggtttactgcgaggaaatgcgtgaagagcggcaagaccgactgaaatttattgacaaacagctggagctcttggctcaagactataagctgcgaattaagcagattacggaggaagtggagaggcaggtgtcgactgcaatggccgaggagatcaggcgcctctctgtactggtggacgattaccagatggacttccacccttctccagtagtcctcaaggtttataagaatgagctgcaccgccacatagaggaaggactgggtcgaaacatgtctgaccgctgctccacggccatcaccaactccctgcagaccatgcagcaggacatgatagatggcttgaaacccctccttcctgtgtctgtgcggagtcagatagacatgctggtcccacgccagtgcttctccctcaactatgacctaaactgtgacaagctgtgtgctgacttccaggaagacattgagttccatttctctctcggatggaccatgctggtgaataggttcctgggccccaagaacagccgtcgggccttgatgggctacaatgaccaggtccagcgtcccatccctctgacgccagccaaccccagcatgcccccactgccacagggctcgctcacccaggaggagttcatggtttccatggttaccggcctggcctccttgacatccaggacctccatgggcattcttgttgttggaggagtggtgtggaaggcagtgggctggcggctcattgccctctcctttgggctctatggcctcctctacgtctatgagcgtctgacctggaccaccaaggccaaggagagggccttcaagcgccagtttgtggagcatgccagcgagaagctgcagcttgtcatcagctacactggctccaactgcagccaccaagtccagcaggaactgtctgggacctttgctcatctgtgtcagcaagttgacgtcacccgggagaccctttctgaaagaagtatggccaaaagcactttaatgctgctgacattgttgtttttatgttcatttgctggagcgcaagacgtgctgacacagtgagttttctctgatgtatttaaggtgatgtatttgcttgagttactcctgtatcattgctcataatattggaaactaaaataaaacctagttggaaatcctt

SEQ ID NO: 16619 - protein, 462 aa, Homo sapiens
MSLLFSRCNSIVTVKKNKRHMAEVNASPLKHFVTAKKKINGIFEQLGALAEGFQVRMFEFQNFERRFEECISQSAVKTKFEQHTVRAKQIAEAVRLIMDSLHMAAREQQVYCEEMREERQDRLKFIDKQLELLAQDYKLRIKQITEEVERQVSTAMAEEIRRLSVLVDDYQMDFHPSPVVLKVYKNELHRHIEEGLGRNMSDRCSTAITNSLQTMQQDMIDGLKPLLPVSVRSQIDMLVPRQCFSLNYDLNCDKLCADFQEDIEFHFSLGWTMLVNRFLGPKNSRRALMGYNDQVQRPIPLTPANPSMPPLPQGSLTQEEFMVSMVTGLASLTSRTSMGILVVGGVVWKAVGWRLIALSFGLYGLLYVYERLTWTTKAKERAFKRQFVEHASEKLQLVISYTGSNCSHQVQQELSGTFAHLCQQVDVTRETLSERSMAKSTLMLLTLLFLCSFAGAQDVLTQ

SEQ ID NO: 16620 - DNA, 1590 bp, Homo sapiens
  CDS (370)..(1275)
gacttttatttgaaatacttggtgcttgaaaaactgaagaaggaagacgctgaccgaattcatatattcagttcttttttctataaacgccttaatcagagagagaggagaaatcatgaaacaactaatctgtcaatacagcaaaaacggcatgggagagtaaaaacatggacccggcacgtagatatttttgagaaggattttatttttgtaccccttaatgaagctgcacactggtttttggctgttgtttgtttccccggtttggaaaaaccaaagtatgaacctaatcctcattaccatgaaaatgctgtcatacagaaatgttcaactgtagaggacagttgtatttcttcttcagccagtgaaatggagagttgttcacaaaactcttctgccaagcctgtaattaagaagatgctaaacaaaaaacattgcatagctgtaattgattccaatcctgggcaggaagaaagtgaccctcgttataagagaaacatatgcagtgtaaaatacagtgtgaaaaaaataaatcatactgcgagtgaaaatgaagaattcaataaaggagaatctacatcccagaaagttgctgataggactaaaagtgagaatggcctacagaatgaaagtttaagttccacacatcatacagatggcttaagcaaaatcagactaaactatggcgatgaatcacctgaagctggtaaaatgcttgaagatgaactcgtcgacttctcagaagatcaggataaccaggatgatagcagtgacgatggattcctcgctgatgacaactgcagttcagaaataggacagtggcatttaaagcctactatctgtaaacaaccttgtatcctacttatggactcactccgaggcccttctcggtcaaatgttgtcaaaattttaagagagtatttagaagtggaatgggaagttaaaaaaggaagcaaaagaagtttttccaaagatgttatgaagggctctaatccaaaagtaccacagcaaaacaacttcagtgactgtggtgtatatgtattgcagtatgtagagagcttttttgagaatccaattctcagttttgaactacctatgaatttggcaaactggtttcctccaccaagaatgagaacaaaaagagaagaaatccgaaacataattctgaagctacaggaagatcagagcaaagagaaaagaaagcataaggacacttactcaacagaagcacctttaggcgaaggaacagaacaatatgtcaatagtatctcagattgaccatttctgttacttgtcatttctactttcagaaactaaatgactttcaaatttgggtatagacaataaagaactgaagtgctcactactcagtgatttggaaattttgatgcttgtataaatgtcagataattaatttccaaaggcgtatgtattaagtaaaagtctgtaaatatgttaatgaggccaatttttccagcatttataattatttttttcacttgttaggaagcttttgttatgtattttctgttaatagtacctaaaattgcaacttctaaacccaaataaaaagaaaatatttataggagg

SEQ ID NO: 16621 - protein, 302 aa, Homo sapiens [sequence omitted]

SEQ ID NO: 16622 - DNA, 1926 bp, Homo sapiens
  CDS (30)..(704)
cttcccttcccgcgttccccgggagaaacatggccgggagcagcgaggaggcgccagactacgggcgaggcgtcgtgattatggatgattggccagggtatgacttgaatttattcacgtacccacagcactattatggagacttggagtatgtcctcatccctcatggtatcattgtggacagaattgagcggctggccaaggatattatgaaagacataggatatagtgacatcatggtcctgtgtgtgcttaaaggaggttacaaattctgtgctgatctcgtagaacaccttaagaacatcagccgaaattcagatcgatttgtctcaatgaaggttgatttcatcagactaaaaagttacaggaatgaccagtccatgggtgagatgcagataatcggaggcgatgatctttcaacgctggctggaaagaatgttctcattgttgaggatgttgtcggaactgggaggaccatgaaagcactactcagcaatatagagaaatacaagcccaacatgattaaggtagccagtttgttggtgaagagaacatccagaagtgacggctttagacctgactatgctggatttgagattccaaacttatttgtggtgggatatgccttagattacaatgaatacttcagagatctgaatcacatatgcgtcatcaatgagcacggtaaagaaaaatatcgagtctaaagacatgaattctcaccactaaagtcccagatagcatcatatttacgcctgtacttgggaagccagctgtcaagtttgtccccccaggcatcttcactcagcaggatataaaagaaaaaaatgttcaaatgagagagctttcttttctgaggttaatataaagagtatcaaaggttcctaaggaaaagaaagcagtgcttttatttgacttgttccaaattaaacactccgccttgtgactcagcaatgctatctaccttcacactcctgagctccgccttcctttgttttgatacagtcattatatttgattagtattcccaggaatacccccacctagttactcaaatatttttcacttaactttttatactcttattttggtaataagcttacaatattaagaagctggggacttttttttaactgaagacttgagtcccctataccgggaatgcagctattaatagattcccatattttaaaaggagggaaaggacaatttaatataaatttctgtttgtgcatttctgacaggccattattatctgctttgacaaagcctttctgaaacgcagtgtacaatgaatcttaatgatgttatgaaacgagctttgctcggggctcttgattggagcttccggtatgtgatgacggtatgtcatgtatgcatggatgtactcaactgtgtttaatactctgaattttaattagaaaaaaatacaatagcagcaaggccctggtttctaagctgtatccttttattcatgtgggacatgagcaaatggcagaattaggggcgagtgctttcaatgctcgaaactaagcaagtataaatttttcctcttatttgcatgaaaggacaagacactgttatgccctgtcctaaatgtgaagacagaggttgaattttttaaaaaatatctttaaaagactgatcacaaaatccaaggtgctacaggaaacaagcacactcaagaaagtttttttctgaataacatttttttccaatttctccgttttataagacatttcctaatttatggggattttaattgaaaataaacttgagtcccaatagagctgtttttttctcacttcctacaaaatgcaaatgcaaaataaataactaagcagcttttgtttggttctgaaccgtatgtggcgtattgttattaggttctagcttcctttaaactaataaagaataagaagactt

SEQ ID NO: 16623 - protein, 225 aa, Homo sapiens
MAGSSEEAPDYGRGVVIMDDWPGYDLNLFTYPQHYYGDLEYVLIPHGIIVDRIERLAKDIMKDIGYSDIMVLCVLKGGYKFCADLVEHLKNISRNSDRFVSMKVDFIRLKSYRNDQSMGEMQIIGGDDLSTLAGKNVLIVEDVVGTGRTMKALLSNIEKYKPNMIKVASLLVKRTSRSDGFRPDYAGFEIPNLFVVGYALDYNEYFRDLNHICVINEHGKEKYRV

SEQ ID NO: 16624 - DNA, 3391 bp, Homo sapiens
  CDS (315)..(2459)
ggcagcggcttccggccgcggcggacacttccctgggcgggactgtctcgtggcacccggtggaaccgaggagaacgtggagcgccgggagcggcgaatatggacgactacagcctggatgagttccgtcggcgctggcaggaggagctggcgcaggcccaggcgccgaagaagcggcgacggcccgaggctgccgagaggcgggctcggcggccggagaatgaaatgaatgatgtgcctttctttgatatccaactgccttacgaattggcaatcaatatatttcagtatctggacaggaaagaactaggaagatgggcacagatgaacaaacagactttggattgggtgatgctcatcagagtgatggattaaacttggaaagagagatagtcagccagaccacagcaacacaggaaaagtcacaggaagaacttccaacaacaaataatagtgtttctaaagaaatatggttagattttgaagatttctgtgtatgctttcaaaatatatatattttccacaagccaagttcatattgccttaactttcaaaaatcagaatttaagttctcagaagaacgagtgtcctactatctatttgtggatagtctaaaacctattgaactactggtttgcttttctgcattggtacgctggggggagtatggagccttaacaaaagacagtcctcccatagagcctggacttctcacagctgaaacgttttcttggaaatccctgaaaccaggcagtcttgttctgaagattcacacatatgctaccaaggctacagtggttcgtctgcctgttgggagacacatgctactcttcaacgcatactccccagtaggacactccatacacatctgcagcatggtgtcatttgtcattggggatgaacacgttgtactgcccaactttgaaccagagagctgccgatttacggaacagtctctgttgattatgaaagctattggaaatgtgattgctaatttcaaagataagggtaaactctctgcagctttgaaggatctgcaaacagctcactaccctgtccccttccatgataaagaactaactgcacaacacttcagggtttttcatctttccttatggcgtttaatgaaaaaagttcaaataacaaaacctcctccaaacttcaaatttgcattccgggctatggttttggacttggagttactcaattcctccttggaagaggtttctttagtggaatggctggacgttaaatattgtatgcccacaagtgataaagagtattctgctgaggaagtagcagcagcaatcaaaattcaagccatgtggagaggaacttacgttagattgcttatgaaagccagaataccagacacaaaagaaaatatcagtgttgcagatactcttcaaaaagtttgggctgtattggaaatgaatttagaacagtatgcagtttctctcttaagactaatgtttaaaagcaagtgcaagtctttggaatcttatccatgctatcaagatgaagaaactaagattgcttttgcagattatactgtgacttatcaagaacagccaccaaattcttggtttatagtattcagagaaacatttttggttcatcaagacatgattttggttcccaaagtatatactacacttccaatctgtatcctacacattgttaataatgacacaatggagcaagtgccaaaggtgttccaaaaagtggtgccttatctttataccaagaataagaagggatacacttttgtggcggaagcatttacaggcgacacatatgtagcagcctcacgatggaaactgcgtctcatcggttcttctgctccactgccatgcctctctcgagactctccatgcaattcctttgccataaaggaaatccgagattactacatacccaatgataagaaaattttattcaggtattcggttaaagttctaacaccacaacctgctacaatacaggtacgcacatccaaaccagatgcattcatcaagctgcaggtcctagaaaatgaagaaactatggtgagctccactggaaaaggccaagctataatcccagcatttcacttcttgaagagtgagaaaggtttgagctcccagtcttatggtgaaagacacgaggagttaattaacttaggaagcccagactcccacactattagtgagggacaaaaatcttcagtaacttccaaaacaacaaggaaaggcaaagaaaagtcttctgagaaagaaaagacagccaaagaaaaacaagcacctcgctttgagcctcagatatccactgttcaccctcaacaagaagacccaaataaaccctactggattttgaggcttctcaggctcgtttgcattaccttagcgggttcattaagaaaacatctgatgctgagagtccgcctatatctgaaagccaaactaaaccaaaagaagaagtagaaacagctgcacgtggcgtaaaagaaccaaactcaaagaattctgcaggttcagagagcaaagagatgacacaaacaggatcagggagtgcggtgtggaagaagtggcaattgaccaaaggcttgagggatgtggcaaaatccacgagtagcgaaagtggaggagtgtcttcaccagggaaagaagagcgcgagcagagcacacggaaggaaaacattcaaacaggacctcgtacacgatctccaacaattttggaaacatctccacgacttattcgaaaagcactagaatttatggatttaagtcaatatgttcggaaaacagatacagatcctctgctgcaaacagatgaattgaatcagcagcaggcaatgcaaaaggcggaagaaattcatcagtttcgacagcataggaccagagtccttagcattcgaaacattgaccaagaagagcggttgaagttaaaggatgaagtcctggatatgtataaggaaatgcaggactccttagatgaagcccgacagaaaattttcgacatccgggaagagtacagaaacaaattgctggaagctgagcgcctaaagctggaaactctggctgctcaggaagcagccatgaagctggagacagaaaagatgaccccagctcctgacacacagaaaaaaaaagaaaggaaagaaaaagtaaccaggggatgtccaatactaccctgcttctggagagaaaaaatctatttgtaatgatctttaactgcctgctgttaagatattaggccaaatgaaaatagaaatttctctttcttagaaatattttaatgctaacttgttagttttcctcagaaagctagtatttgaagccatttgagtttaagatgctctaatttcaataaaatagcttccaaatatttaataaaatatgtttgacactct

SEQ ID NO: 16625 - protein, 715 aa, Homo sapiens
MGTDEQTDFGLGDAHQSDGLNLEREIVSQTTATQEKSQEELPTTNNSVSKEIWLDFEDFCVCFQNIYIFHKPSSYCLNFQKSEFKFSEERVSYYLFVDSLKPIELLVCFSALVRWGEYGALTKDSPPIEPGLLTAETFSWKSLKPGSLVLKIHTYATKATVVRLPVGRHMLLFNAYSPVGHSIHICSMVSFVIGDEHVVLPNFEPESCRFTEQSLLIMKAIGNVIANFKDKGKLSAALKDLQTAHYPVPFHDKELTAQHFRVFHLSLWRLMKKVQITKPPPNFKFAFRAMVLDLELLNSSLEEVSLVEWLDVKYCMPTSDKEYSAEEVAAAIKIQAMWRGTYVRLLMKARIPDTKENISVADTLQKVWAVLEMNLEQYAVSLLRLMFKSKCKSLESYPCYQDEETKIAFADYTVTYQEQPPNSWFIVFRETFLVHQDMILVPKVYTTLPICILHIVNNDTMEQVPKVFQKVVPYLYTKNKKGYTFVAEAFTGDTYVAASRWKLRLIGSSAPLPCLSRDSPCNSFAIKEIRDYYIPNDKKILFRYSVKVLTPQPATIQVRTSKPDAFIKLQVLENEETMVSSTGKGQAIIPAFHFLKSEKGLSSQSYGERHEELINLGSPDSHTISEGQKSSVTSKTTRKGKEKSSEKEKTAKEKQAPRFEPQISTVHPQQEDPNKPYWILRLLRLVCITLAGSLRKHLMLRVRLYLKAKLNQKKK

SEQ ID NO: 16626 - DNA, 1935 bp, Homo sapiens
aaaatacaattcctaaggcaatatctgctggtaagtcaagctgataaacactcagacatctagtaccagggattattaattggaggaagatttatggttatgggtctggctgggaagaagacaactataaatacatattcttgggtgtcataatcaagaaagaggtgacttctgttgtaaaataatccagaacacttcaaaattattcctaaatcattaagattttcaggtattcaccaatttccccatgtaaggtactgtgttgtacctttatttctgtatttctaaaagaagaaagttctttcctagcagggtttgaagtctgtggcttatcagcctgtgacacagagtacccagtgaaagtggctggtacgtagattgtcaagagacataagaccgaccagccaccctggctgttcttgtggtgtttgtttccatccccaaggcaaacaaggaaaggaaaggaaagaagaaaaggtgccttagtcctttgttgcacttccatttccatgccccacaattgtctgaacataaggtatagcatttggtttttaagaaaacaaaacattaagacgcaactcattttatatcaacacgcttggaggaaagggactcagggaagggagcagggagtgtggggtggggatggattatgatgaaatcattttcaatcttaaaatataatacaacaatcttgcaaaattatggtgtcagttacacaagctctagtctcaaaatgaaagtaatggagaaagacactgaaatttagaaaattttgtcgatttaaaatatttctcctatctaccaagtaaagttaccctatgtttgatgtctttgcattcagaccaatatttcaggtggatatttctaagtattactagaaaatacgtttgaaagctttatcttattatttacagtatttttatatttcttacattatcctaatgattgaaaactcctcaatcaagcttacttacacacattctacagagttatttaaggcatacattataatctcccagccccattcataatgaataagtcaccctttaaatataagacacaaattctacagtattgaaataaggatttaaaggggtatttgtaaactttgccctccttgagaaatatggaactaccttagaggttaagaggaaggcagtgttctgacttctttaggtgatctgaaaaaaacacccttatcatccagtgtaccatctagagatcaccacagaatccatttttttcccagttccacaaaacactctgtttgccttcagtttttactcactagacaataattcaagtttagaaacaggtaatcagctatttgatcttaaaaggcaatgaattgttgggatatcagtgaactatgttgtatacttttgaatttttacattttataaatggaattgaaagttggataactgctttttttaaattttccaacagaagtaacaccacagttgctttgtttctttttatagcttacctgaggttcagttcttctttgtgaacctgtgagtactccacagtttactgggggaaaaggcttcagtaaagcagaggctagaattacagtatttatacatagcaacttttcataaagtagaaaaattcaaaggaagctgtctcaatttgagaataccagctgggcacggtggctcacgcctgtaatcccagcacttactttgggaggccaaggtgggcagataacctgcggtcaggagtttgagaccaggctggacaacatggtgaaacctcgtctctactaaaaatacaaaaattagccaggtgtggtaggatgtacctgtaatcccagctacttaggaggccgagacaggagaatcgctcgaacccaggaggcggacgttgcagtgagccaagattgcaccattgcactccagactgggtgacaagagtgaaactccatct

SEQ ID NO: 16627 - DNA, 1815 bp, Homo sapiens
cttttgcaggaattagtactgaaattaatattaatcaatggcaaggaagaccagagcagaggatagtcctgtgacaaatggtcacaagcttctcccagctgtgaaatgtctttccttcataagtgactatttccattccctttcatgtatttgccttgtctggaagactttgattatgtgcttcttaggacacatataaagtccttactttgtatttggggcccagagaagtttagcaatttgcttaagctcacatagctagttagcagcagagctgggcctaaaatcttggaccatttccaaatccagtgtttgctttactgtatcacactgtgcaacgcttgtgttgatcactgtgagtacttaatatactagatttctaacagcagcctatttgcttctgattgccgactagttcacttcaattcatatttatcttaactgaaaaccactccttctgacggctcgtctgttgtctatagaaaatgagttggtgggctcattctagccctgttggacagccgaacccatcacaacaaatcaatgccaaaaatggcatttcaagaggaaaacatagcatttatttagtacccccaacagagtagctcaaagtgatttgaaaatgtctcattaatcctcataacacccctgtgggataataataatattattataacgtttaggcgtagaactgtggcaaagccaacagcttctctgagcatgtgcaggatttcctcatatttcagtctgcaatactagagcctgactaaaaccgtcaggtttgcaaacagcaagggtaaataaatcttggtgtttggcctttctgtgttgctctaggcatagtttgtgtttcctactgaccacatcaatcccagaaatagttcaccagttgtttgccagatggtaagcagcatttaggattagctcagaagtgtttgagagtgggacaaggcagggctagaggtcctgatccacaattacagataaatgaatggagaaatagcacctagtaacagtgtaaaagcgttcctatttctccacatcctctccagcatctgttgttttctgactttttaatgatcgccattctaactggcatgagatggtatctcattgtggttttgatttgcatttctctaatgaccagtgatggtgagctttttttcatgtttgttggctgcataaatgtcttcttttgagaggtgtctgttcatatccttcacccgctttttgatgggattgtttttttcttgtaaatttgtttaagttccttgcagattctggatattaaccctttgtcagatggatagatggcaaaaattttctcccattctgtaggttgtctgttcactctgatgatagtttcttttgctgtgcagaagctctttagtttaattaggccctatttgtcaattttggcttttgttcgcattgcttttactcatgcagtctttgcccatgcctatgtcctaaatggtattgcctaggttttcttctagggtttttatggttttaggttttacgtttaagtctttaatccatcttgagttaatttttgtatactgtataaggaaggggtccagtttcagttttctgcatatggctagccagttttcccattcgacaacgaaagtcataccgtagaaaagatggcgtgtttctttattttgaagataatgcaggagtcatagtgaacaataaaggcgagatgaaaggttctgccattacaggaccagtagcaaaggagtgtgcagacttgtggccccggattgcatccaatgctggcagcattgcatgattctccagtatatttgt

SEQ ID NO: 16628 - DNA, 1699 bp, Homo sapiens
ggttagattatgttgaaacacatctgtgtttcagatgtgttcagagctgaggtctcagctgaggctccactgaagcaggattcacttccaaaataacagagttgttgccaatattcagttcgtagcaaactactggaacaagaatctgttttcttgctgagtgaatttcttgccatgtggccctctccaaatgctggacataaaaaagtaggctgagcacagtggcgcacacctgtagtcccagcggtttgggaagccaaagtaggaggatcgcttgaggccaggagttcaaaactagcctgggcaatatagggagacccccatctctacaataaataaaaataaaagctttcatttacaatgatggtagaccaagaaatttgtcctagatcttcactgagaacatctagaaaagctggcagctgaacaaaattttaaaaacatctgggctgggcacggtggctcacacctttagtcccagcactttgggaggcaaggctaggggatcacttgagctcaggagtttgagaacagcctcagcaacatagggagaccccatctcttaaaaaaaaaaagataaactaaaaataaattaattaaaaacacctggttgaagacatcagcgagctggcaacaatgaagaattcctaaggaaacagaaactttgttaggggagctgttttcccttgtgttggccaattctgcgagtggtaagtgattgctgagctgttgaatggccattttgacaaccttatgggacaaggaagaaggggcctgcactggtaaaccctttcccttacttggagtgaggatcccaaatggctactcattaggagtaacagtggtccagaagtaagcaggccttcaaagggatggcagctcagcttcaaataccctcagtttctgaaattagattgaggttatctaaggtttttagagctctcagatgcatggcagaagcaaatctacatttgcttttcaggaagaaattaacatcctaggtgtggcagacagactctaaggtggccactatgatccctgtcccctggtattccttgtgtggagggagactcccatgacttgattctaatccatagactaccacgaagatgatgagatggacatgattacagcaaattctaatgttcatcttattaagagactcttgttgactttgaagaagcaagctgccatgatgtaaaccagcctttggagagggcctcatggcaagaaactaagggtggcctctagccagtagtcagcaagaaaacagatccttgttctagtagtgtgccaggaactgaagattgccaacaaccttgttattttggaagtgaatcctggttcagtggagccctagctgagaccttagctctggctaacaccttgattgcagtcttttgagaccaggaaacagaaagaagccagctaatctgtgcttggactcctgacccacagaacctgtgagataataaatgtgtcttgttcttaacacaccagatttgtggtaatattgttacacagtgtagaaaactaacaaactaggcctcaaaataaatctataaacagttttgcaggtacactgtagaacacacaataaaaagtagccacagaaagagacatgagtgaataccagcaggagcttctatttaaacatctgtagggacctccagatattggagttttcagagacaagctt

SEQ ID NO: 16629 - DNA, 3139 bp, Homo sapiens
  CDS (959)..(1351)
attcaaaactgtggattccattccagcagatgtagctaaaatgggggggcaggagaaaactgtggaatagggaaggttttttctaaggcttcattattgtgccagtctcaagttgaaaagaggctacatgattgtacattcaagtcttatgttttcctatatttgaaaaataaaaacatttataaaatatatgcaatgtttactgggtgcttttcctcgtattagtgttttaaagcaattgaagaaaataaatatttcagtataaaaaggagcaaatgtatatgaataagtacttaagagaaaaaaattttagtgacagctttaatggttgataattcggtacccttcagttcacccatttaaagtatacaattcattgatttttattatagtcacaaatgtgtacaactgttaccaaagtgaatttgataattttttttttatcacctcataaagaaccctgtacccttggccaggcacatttgctcatgcctgtaatcccagcactttgggaggcccaggtgggcggatcacttgaggtcaggagttcgagaccagcctggccaacatggtgaaccttgtctctactaaaaataaaaaaatgagccgagtgtggtggtgggcgcctgtaatcccagctacttgggaggctaagacaggagaatcgcttgaacccgggaggcggaggttgcagtgagctgagactgtgccattgcactccagcctgggcaacaagagtgaaactctgtctcaaaaaacaaaaaacaaacaaaccctgtaccctttagttatcatcttccatcccctcatcttctctagcactaagcggctgataatctactttctatccttatatagagttgccttttctgaatattttatgtaaattggatcatataatatgtggtctttttaaattggctttttccatgcagcaaaatgttttcagggtttattgatgttgaatgtatcagtagttgataacttcttcgggctgaacaacattccattttatggctgtgtactacattttgcttttccatcagttgatgtctatttgtttttgcattttggcagttgcaaaaatgttgcagtgagcattagcatacaaatatctattggtgtttctgctttgaattcctttggtaatatacctaggatggaattgttgagttacatggattacctgacttttaaaattacaataatcttactgggtgtgagatggtatctcattgtggttttaatttgcatttctttgatgactaagtatgttaagcatattttcatgtgttcattgactattcacctatcctttccagagaaatatcttttcaaattctctgccccatgagtgggggctggctagaagaggggattgaatgtcaacttcttagccatgtgtaccttctaacttagcagcaggaggttgctgtggtaggatgggaaatgctgacatcctgcccctcaccccgctaggaaggcaggctttcagctctgtactaaggcatagctttccaacttggacctctgggagagggaggcctgtgttcttggctgtagccagctagagtggtttttctttctcattgagctgagggtggggaagaaaggagcagcatcttgattcacataccacagactcttgcttttcttactgagttttagtacattttcttgaataaacgtttcttcatttgctgcatactgttaggaccacttccagagattttagatagttgtgttcttttaaagagtatgtaccagtttcactggggatctgatctgcagggatcttccctctcatgctagcaagaaaaattgagttctcataaaccaagtaaaatattcaagctttcctactaattaaatgttttagaaccttacagtggaatattttgtatccatcaagttcttgaaagtagaaaccatctatcttgatattgggtagaaagaggaagttagacactatggagtatctagtttttataaaattcaacacatacctaaatatacaatatcatgtacttctcccctataagacatattttattaattaaattacatcaggtttttcttaagtattctgttctccacattttaaaattcaaaagctttaaggtggtatctaataaatagctgttttcctgcctctgtcctaccaataacagctcattagggataaactatagttatccctatagtactaatctaactaatagtactaatagttacagatagtactaaccagtgctactaatttcttatatttctttataggaaatctatgtataacaagtaaatataaatacatattagttcattgtcacactgctataaagaactgcctgagactgggtgaattataaaggaaagaggtttaattgacttatagttctgcagggctggggaggcctcaggagacttacaatcatggcagaaggggaagcaaacatgtccttcttcacatggcagcagcaaggaaaagtgcagagcaacgcagtgagagccccttataaaaccatcatatctcgtgagaactcactattatgaggacagcatggaggtaaccacccccatgattcagttacctcccactgggttcctcccatgacacatgagggttatgagaactacaatgcatgatgagttttgggtggagacacagccaaaccatatcacatagtctccctctttttatgtttttgttatttgtgttttgttttatgtttacccaaataatcatttattttttattaacatttatgggttatgtttaccatataacccatttttataccttactgtcctatccccaccccaaaatgtcattatagtacttgcgaatttgctccagtacagcataaagcatattctaattttttatggctacataatgggcatttagtaattaaaacagttgcatattaataaacataaataggttcttttttgagataaggtctcactctatgtcccaggctagagtgcagtggtgtaatcatgactaactgcagcttcccatgcccggctaattttttaaattttatacagacaggatcttgcccaggcttggagtacagtgagccgtgatcataccactacactccagcctgggtgtcagagtagaccctatctc

SEQ ID NO: 16630 - protein, 131 aa, Homo sapiens [sequence omitted]

SEQ ID NO: 16631 - DNA, 2286 bp, Homo sapiens
  CDS (1296)..(1646)
attttgcccgttagttgatgcagattcttcataatgtcaatggcctttacaatttggtatgtttttgcagtggctggtactgctttttcctttttgtatttagtgcttccttcagaagatcttgtaaggcaggactggtggtgacaaaatctttcagcatttgcttttctgtgaaggattttatttctccttcacttatgaagcttagtttggctggctctgaaattctgggttgaaaattcttttctttaagaatgttgtgccaggcaccgtggctcatgtgtgtaatcccagcactttgggaggctgaggctggcagatcacctgaggtcaggagttcaagaccagcctgaccaacatgggaaaactccatctctactaaaaatacaaaattagccagctgtggtggcacatgcctgtaatcccaactacttgggaggctgaggcaggagaatcgcttgaacccaggaggtcaggttgcggtgagccgagatcttgccatcatactccagcctgggcaacaagagtgaaactccatctcacacaaaaaaaagaatgttgaatattggcccgcactctcttctggcttgtagtgtttccgcagagaaatccactgttagtctgatgggcttccctttgtggataacccgacctttctctctggctgcccttaacgtttttttcattcctttcaaccttggtgaatctgatgattacgtgtcttggggctgctcttctcgagaagtatctttgtggtggtctctgtctttcctgaacttgaatgttggtctgtcttgctaggttggggaagttctcctggataatatcctgaagagtgttttccaacttggttccattctccccatcattttcaggtacaccagtcaaacataggtttggtcttctcacatagtcccatatttcttggaggctttgttcattccttttcattcatttttctctaatcttgtcttcatgctttatttcattaagttgatcttcaatctctgatatccttttttccacttgatcgatttggctattgatacttgtgtatgcttcacaaagttcttgtgctgtgtttttcagctccatcaggtcattgatgattttctctagactggttattctagttagcaattcttctaaccttctttcaaggttcttagtttccttgcagtgggttagaatgtgctcctttagctcggaggagttacccaccttccgaagcctacttctgtcaattcgtcaaactcattttccatccagttttgtttccttgctggcgaggagttatgatcccttggaggagaagaggtgttctggtttttggaattttcagccttcttgtgctggtttttcctcatctccctggatttatctgcctttggtctttgatgttggtgacctttggatggggtttttgtgtggacatcgtttttgttgatgttgatgctattcctttctgttttttagtttttctcctaacaggcaggcttctctcctgcaggcctgctggagtttgctggaggtccactccagaccctgtttgcctgagtatcactagcagacactgcagaacagcaaagattgctgcctgctccttcctctggaagtttcgtcccagaggggcacccgccagatgctagtggagctctcctgtatgaggtgtctgttgacccctgctgggaggtgtctcccagtcaggaggcacaggggtcagggacccacttgaggaggcagtctgtcccttagcagagtttgagtgctgtgctgggagattcgctgctctcttcagagctggcaggcaggaacatttacgtctgctgaagctgcacccacagccgcctcttccgccaggtcctctgtcccagagaggtgggagttttatctgttagcccctgactggggctgctgcctttctttcagagatgccctgtccagagaggaggaatctagagaggcagtctggctatggcagctttgcagagctgtggtgggctctgcccaattcgaacttcccagaagctttgtttatactgtgaggggaaaaccacctactcaagcctcagtaatggtggacgcttctccccacaccaagcttgggagtcccaggtcgacttcagactgctgtgctggcagcaagaatttcaagccagtggattttagcttgctgggctctgtggcggtgggatccactgatccacttggctccctggcttcagttccctttccaggagagtgaacagttctgtcgctggccttccaggtgtcactggggtatgg

SEQ ID NO: 16632 - protein, 117 aa, Homo sapiens
MIPWRRRGVLVFGIFSLLVLVFPHLPGFICLWSLMLVTFGWGFCVDIVFVDVDAIPFCFLVFLLTGRLLSCRPAGVCWRSTPDPVCLSITSRHCRTAKIAACSFLWKFRPRGAPARC

SEQ ID NO: 16633 - DNA, 1533 bp, Homo sapiens
  CDS (1067)..(1483)
ggggggcccgggcacaagcagttgagggaaggagactgtgcccctcctggctcccaagtcttcaaggagaagattctcccaggaaatctgacctcagaagacacctccttggggcctctctgctgtcacagccatgccaccttagagctttgtaaagcctgcaaagggctctttaaaaacttcaagccaggcgcagtggctcacacctgtaatcccagcactttgggaggctgaggcaggcggacacttgagcccaggggttcacagctgcagtgagctgcggtcatgccactgcactccagcctgggtgacagagtaagaccctgtctcacagaaataagtctaactttaattgaaatgctgtagcaggctgagcgcagtggctcttgcctgtaatcccagcactttggggaggacaaagtgggcggatcacctgaggtcaggagttcgagaccagcctggccaacatggtgaaacccgtctctactaaaaatacaaaaattagccaggtgtggtggtgtgcacctatagccccagctattcaggagactgaggcaggagaatcgcttgaacctgggaggcggaggttgcggtgagctgagatcatgccactgcactccagcctgggcaacagagcgagactccgcctcaaaaaaaaaaaaataaataaataaataaatacatagccaggcgtggtggcaggtacctgtaatcccagctactcgggaggtgaggcaggagaatggcttgagcccaggaggcagaggctgcagtgagccgagatcgtgccactgcgttccagcttgggcgacagagcaagactgtctcaaaaaaaaaaaaaaaaaaaaaacaatagcagcgtccaactgctacaagctttgtttctaaacccaattcctgcactcacctagtgtcagaaaggtacaagatggactcgctacatggtgtgaccctcctagggaactgcttccaacttcaacttttaagcatgagccaaggactcctgacactagaggaacaagacaccaaaagaaacatgatgtggacagaagcctcctaatgacccatgctatggcttgggactcagagaaagcgctgtgactcagaactgaccctgaaggcccacagtggggagagtggaaaagagctcctgaagatgaaaagcatcagacaaaatcaaaagctcaaagataacaaaccgggaaaagaaaaaggttacgaggacactccaggtctgacatctgagtttgaaagtcacgagtttccaagacggaaagaggccaccaagcgcacagcacggtggataaaagaaaccctaggatgtggaagagaaaaggacaatctcacaagaaaaaaatacatcccaacagaaatggctaagaaaaatcatggaagaactgccctcagaattctgaagggactaggtgcagtggctcaggcctgtaatcattccattttgggaggccaaagtgggaggattgcttgagctcaagacaagtgtgggcaacacagcaagaccccatctcttaaaag

SEQ ID NO: 16634 - protein, 139 aa, Homo sapiens [sequence omitted]

SEQ ID NO: 16635 - DNA, 2061 bp, Homo sapiens
cactgagaatatggggtaaatacttggagacaagagagagacaaatgtcctagtttccaaaaaggaataaagtatattgcaaaaacccaagaccaattccctactttaaactgtggtaaaatttgaagagattgtaaaaaaatgaaatattgtgtttagaagagaatgggatgatcaccatgaatcaatatgaatttataagaataagacatgccaaaatgacctcattttttttttgctttatttttagttgtataattgctattggattagagaatagtaaagacatgttgtatcttgactttcgccaagtggttgacagtgtttccttaactatccttgtggaaacatgatgaaattagattgtaattagattgatttacagctgcttgcctggccattgccatgcccgcatgcccagcgtttagttaaataatagttactttatatactggttcctcacagagaactggtggtgaacattaatttgcatatattcagaaagtatggatttgtagttaacgagtttttttaaggatttgtatgttgaaacttgagttcctggatttattcatgattgaggtttctgttagggacttttttgcaaccaagctgtatttgtaagatatataaatctgtttttaatttacatatgtaaccttgacttataaattacttagaagccaaggcgtaatattagcatttagagcaaagtctggctatgttaagaatgctaacgttatgaagaatcttttctttgttcagtaacaactatagtaagctcacttggatgtttttcatacccttgaaatgtcattcctgtgaactatccctaaacaaaaggcagatgttcatatacaaattgataatacagatatattcagcagtgtctttctgagttaatgtgtctgttggccttctggtaatcccacagtcagctgcctgttcaagatatttacatattttttaaaaaaatacaaattccctggaatcatatcaaagagagaaccatatattttgttcacttaggaagttcttttggcagtccatgatggctgctacatccaatatattttttaattaattgttacttttagagaatgcgagtccatagttaacttattaaactttcataattgatatttctttgatgcttgtaatattttgtttctagcctcaaaaaagtgtgataacttttttgaatacttgcagacatatagcatatactataataaatataattaatatgtatataataatgataataattctaaaataacagccctagtcatcagtgtttccatttcttgttcttgtctcattcctatgcctcttccacagaaagaagtgtttttggcttttcctgctgtagacttgttatacccaatggtgccagaagataatcgattcaaatggttagcttagccttattttatatttcagtccagataccattttgtgaatatgttttaaaatgttaataaataaagaacaaaatttgatgaattgacatataaactataattaaaacctactttaaagactcatagagcttgctgctttaatgaagaattgaagaaattgatgaagaatttattttagtgttttgactgagccaaaataaaatcagtttcattgttgaagaaacacagtttaacataaacttgtagatagactattaaagagtgctgtatcagttaagtgagcactgtcttctaaaatttcatgtattcaaggatggagagggtcaaatgaatagttaaaaatacaaattaaggccaggcatggtggctcatgcctgtaatcccagccagcactttgggagtctgaggcaggcggatcacttgagctcaggagtttgacaccagtctgggcaacatgacaaaacactgtctctaccaaaaatacaaaaattaacctggcctggtggcgtgtgcctgtggtcccagctacttgggaggctgaggtgggaggattgctggagcccccgaggcggaggttgcagtgagccgagatcgcacctctgcattccagcctggttgacagagtgagaccccatct

SEQ ID NO: 16636 - DNA, 2057 bp, Homo sapiens
gtaaatttaaacagaaaattatttagcagtttccattttcaaatgtcctgcttagaaaaaaaagataattgagtccaggattattaaacatacaggacatcatttttgcaaaccagatgggatggtcatgataaataaatgcttactgctgtatttcactgcttgtctgtgcttctttggctataggctaaaaacatggaatgctctctcttgcctaaggacacaaaattgtgcagtaaacaagggttcaaataaacctttggtctgaacaatttgagcagatgcttatgtttggatttccaaacacctgccaattactttgaagtcaaatagacctcataacttccagtagggttaaatgtagtcaaggtagcattaaaaattaatgagtaagcctggataatatggtgaaactctgtatctacaaagagtacaaaacttagttgggcatggtggcatgcacccacagtaccagctacctgggatgctgaggtgggagggtcgcttgggcctgggaggtcgaggctgcagtaaaccacggtcacgctactgcactccagcctggcatgacagagtgggaccacgtctcaagcaaaacaaaacaaaacaaaacaaactaatgagttaataaatgaggtagagagaaacagattttggaaatgcagataaaaatctttggagtttattttaaagtaatcattctagatgaaagtagtggttcataaacaaagagcatgcaaaccaaaaatgattttaatcaggataaaaagtttttcttttctttttctttttttttaaaaaaaaaaaacctttgaaaatgtggctttcaattatcctcagaattcactataatacaaatactataataatcccatctcttaaagagagaaatctcaaaatgagctcagaaattatatgatcttccacctttaaaagaatcacaaagatataaaaatcctttacaaataaatgctgcttacttggacttgggggaaagaggaatagtgtatgtttctatgaactcagactttagtttcagcttttgcatcctatttaaagtgtaaattgtcacgcttccactattctgagaacatgaatatctctggaaaaatgggcaagtattctttgacaaagttttcaaatatgtgctgctaaaaaggagacactttttactttaacaatcttagcaaataaagattatatatttaccaacaaaacaaactcatttaaaatgcatgaattgcacatacttgatatacatgtatatacatataagtagacatgtgtatgtttgggcatatgcatgtataatatatgcatgtgtacttatgtgtctgttaatatgcacgtatatatttgttataatacatgcatgtttgtatttgttataggacgctataagtaactttttgttgcttttgatttggggagtggggcccaaagctgaggacaaaaagaagctaaatatattcatgttctgtagtgatccagcaacaactggatcaaatattacccaatttttgctaattgacacgatctttggccttgtggaatttgtagtgcttattctgcgaggcagttccttttcttccgtatgagtgtatgactgcacctaaacaggttcattcagagagatagggatgcctccaagagtggcattttattccttctcattggtagcctccttgttgggtatcttaatagaaattttcctgttcagcctgtgctttcctaaggagtgaggaagatagtagcagcaggacacagagagggaatgacagaggagcagtgtgtagtcccctgtttgacagggctgggacaggtgaaatttctttgagcctagtggttacttgggaagttaactaagcttgggtggttttgccagtttcttcctccccacacaggaagattgctccaaaggaaagaaggtcaagccagaacctctagagaattggaaggtgaaaaatgttgagtccagtttgtttcccaaatcagcggactgagaagttggaggcactaaagggaatttgaagaattatctctctcacacactccac

SEQ ID NO: 16637 - DNA, 2785 bp, Homo sapiens
  CDS (1165)..(1632)
gttctgtgctttgaaagcttttatctatttcagatcataattttttaatggcagccctttctaggatgctttcggcagaaaaatgtactggcaaaatcgtctcctgaaaagatttacgatgagacacataaagtacattgagtagtatagttattcttaaactagtcataagagtattaactagcaataaataataaaaaataaaccagaggtaggagaaggtatggtgatttcaatgtgagttgcttttggatttatgatttcttggtttctgtgcctaaggaggcatggatggtattattttcttttcttttttttttgagacggagtctcgctgtgtcgcccaggctggagtgcagtggcgccatcttggctcactgcaacctctgcctcccggattcaagccgatttcttctgcctcagcctcccgagtagctgggactacaggtgcctgccaccacacccggctaattttttgtatttttagtagagacggggtttcaccgtgttagccaggatggtctcaatctccttacctcgtgatccgcccgcctcggcctcccaaagtgctgggattacaggcatgagccactatgcccggcctggatggtattattctttttcttcagttgctgctgaaatctaaaaaaaccaggtttttcaagtccttatgtgttcgtgtgtgaaactttgcttgtacatacaaaatttttacattgtttaactttactgcatgcagtttagtttgccttttccttttaatataacttaaaggtattctcttacgaagtggagaactgttctgtggactgatcagcagtgggtttgagcctgtaaatcgccactgcactccagcctgggtaacataatgaggctttgttgctttaaaaaaaaaaaaaagtggaggattacaggcatgagccaccgcacccggccacctggggaatcttctaatagtcttagggcagcttagctggcctggacccacctcccttgccacctgccccctgcaccgactgatcatgttcagtcacccaggagatgatggagaggctgatcaggcctcctggaaagggaggaagagggccctagttggagagatccatcagcagaagccagggaggagatacagacccttgctccctgacgctcctcagggctagcatggggcaggagtttagctgggaggaggcggaggcagctggcgagatagatgtggcggagctccaggagtggtacaagaagtttgtgatggagtgccccagcggcacactctttatgcatgagtttaagcgcttcttcaaggtcacagacgatgaggaggcctcccagtacgtagagggcatgttccgagccttcgacaagaatggggtaaggcaccctgaagggaaggaccagtggccagtccacctggcgccttcctccacaagtgtcctcagggagagctcccagttccccactcctcggctctttctctgctcttctttccactccgtctctctttaccttttctgtctcactcaccaaacccttctgtctcttctcttccttttgtccctttccatcttctctgtctctccttccctccctccatctcttagctgtcggctgatgctccctgtgtcctcttcttgagagctgaagggcgactggcagacagtccaggtcctctctttgtgtatttttgaccaagactctgcagcccaatgaccgggttttcgcatctgccagagcccctgtcactctaaacactaggagcaaaagagatgttctaaatgagacaaggtatcttagcatgggctatgagctccctcttgttggggttcttctgagactggtcagatcctccctgtcaagaatgctggaagaggctcctgcatgtattgggagactgggcgaatgactgcaaaagcccctttcagctcttcaagtcctgaaaggtttcattaaatcattcagactagagtttctctaagcccacaatgtcactagcagctaagaagataacacatcttgtaaatgcaccaggggattgaattttaaatttcaattcagttaaaaaccccttgattatttaaggttatccagttcagtgccctggcaatcctcaaatacctcaaatacctcaaatgccctggtatttgcctcaaataccaatttaatccgaagaaagtgtcagttctccattcctcagtgcgtggagaacttagctttctaagctgaatcactgggaatgccacttcaggtctcatcctgtcgctggtaccagtcagtgcacgtccccacagtgcctgtcccgggacaggagggtgaggtcagcaccttcaattcaacagaacctccttagagatgaaccccatcgaccaccccacagggcacagagccagtttcggacttctcagcgctccgcctctcttaggtctcctctgagtcagcagcaaccctgggtgggaggggcagacttttgttattccaaattaaatgatgagaaagctgggcaaaagggaatgaatcgatttgcccaaggtcttaagtgctcctgcctagaaggcaggttttttaaagagagaagatgactttttaaaataattgatgatttttttaaaatgtaagaaaagtaaacaaatatatcaggtcataaataataagactcatttaagtccatcaatcttccccagattcatctaaaaatcaatacgatcatgattcaagatccaaagggctgattaagcccctaggcatatagttgtactccagtctgggcaacacagtgagactccatctc

SEQ ID NO: 16638 - protein, 156 aa, Homo sapiens [sequence omitted]

SEQ ID NO: 16639 - DNA, 2845 bp, Homo sapiens
tttttttttttttttttgtttttgagatggactctccctctgtcgtccaggctggagtgcagtggcgtgatctcagctcactgcaacctctgcttcctgggatcaagcgattctgccttagcctccccagtagctgggactacaggcatgcgccaccacactcggctaatttttgtatttttagtagagatggagtttcgccatgttgaccaggctggtctcaaactcctggcctcaagtgatctgcccacctcagcctcacaaagtggtaggattacaggcatgagcccaggagtttgacaccagcttgggcaacacggcaaaaccctgtctctacaaaaaatacaaaaattagtcgggtgtggtggtgtatgcctctggtcagctactcaggagactgaggtaggaggatcacttaagcccaggaggttgaggctacagtgagctatgattgcaccactgcactccagcctgggtgacataacaagaccctgtatgagaaaaaaaaaaaaaaagaatagaaaaaagttggcatgagaccccctcacatggcttctcgtgctttacagcagtgagctgcatggcctgcatggctggtggccactggctccccacttaaggcagcatcactggatcatgaggacagtgtgaacacccccacaaaggtcttaagcctgccattcacctcctttcccatctcttttctcaacctgccttcgcagtacctgtttgtcttgcttcccattgaaaatacaagcagctagtcacatagatttcataattaacacaaaataagatgactatggaaacacagggggaaaccctaaggaaagctagagctacaaatgtaaaaagattacagagaaacattgcattagtggctggtgcatgggagggagttcaaaaattagtgactattaccttaatggtgtgaataccaagtctggcagcttcttttagatttgttccaaggtcatcaagaaagatggactcagagggctgcaggccgagctgctccaagcacagcttgtagatcctagggtctggcttacagatcccttccatgcaggactccacaatcacatcaaactgtttccggttcaggggcaaaaagcttttctggttgggaagataaaaattattgctcaagactgcagtctgaagaccttttgcccgaatttgagttatggcctcagtcatcactgggaactgctttgccactcgctcactggtcaacagagagaaaaatgagtccacaggcacggaggtctttaactaagaacaggagagggcacaggagaacagcaatcattaagagtgacaaacactcatggccaacagaaaaaaaaaatgcttattcctggcgtccttctgctctctgctacaagagcccaggctcatagcttgctgcctgcaggaactgtgttcctcagcccctgtgctgaactctcatataaggtttttaaaagttatccaggactagagttataggctgggcacagtggctcacacctgtaatcccagcactgtgggaggctgaggtgggaagactgcttgagctcaggattttgacaccagcctgggcaacaaagtgagatctaaaaaaaatttttttttaacttagctaggcttggtggcacatacctgtggtcccagctactcaggaggctgaggtgggaggatggcttgagcctgggagattggagctgcagtgagctatgatcaagccattgcactctagcctgagcaacacagtagggaatggagctatttatatcaatattacaattaaatgagttctttattctgctcatggattgctagttgaaaaaaaaaacagcatatcataagaggatacagtgaaatctaaaagtatatgaagtatatgtaatttaatttttaatgattgagaagtcatttaatgctttttatattgcctcagtatcaccattatgaactttagtttctgatcaatttttttcttgtttttaaattcaatctgtgtgggttttgaaaactcttataaggctgggcgcagtggctcacacctgtaatcccagcactttgggaggctgaggcaggcagatcacgaggtcaggagatcgagaccatcctggctaacatggtgaaaccccttatctactaaaaatgcaaaaaattagccaggcgtggtggcacgcacctgtagtcccagctactggggaggctgaggcaggagaattgcttgaacccaggagacggaggttgcagtgagccaagatcatgccactgcactccagcctgggcaacagagcaagactccgtctcaaaaaaaaaaaaaaaaaaaagaaagaaagaaagaaagaaagaaaactcttatattatcacatttcaaaatctgcaaaggcaagtctgctgttttatatatacatatacacacacagattttagaacagctttactgaactctaattcacatgccatgcaagtcacctatttaaagagtacaattcaatggtttttaatatatttacaaagttgtgcaaccatcactgccatcaattttaggacattttcattactctaaagagcaaaccagccaggcgtggtggctcacgcctgtaatcccagcactttgggaagccaaggtgggtggatcacgaggccaggagatcgagatcatcctggctaacacagtgaaaccccgtctctactaaaaatacaaaaaattagccaggcgcctgtagtcccagctacttgggaggctgaggcaggagaatggtgcgaacccaggagatggagcttgcagtgagccaagataggaccactgcagtctggactggacgaaagagcaagactccatctc

SEQ ID NO: 16640 - DNA, 2934 bp, Homo sapiens
  CDS (1152)..(1493)
tatgcataagaagcagcctcaaaactaacaaaaaagattcgcacattcctcagttagaggaggagcagagatgaagaaaaggagaagaaaagcgctggaaagagaagaaaaggaacctccttctgtgcagcaggctcctggcccagggagtgcggtgtgcggcagagtgcgtgcagggaagcagcctctgaaatcgtgcagggaagcaccctgtgaaatcgtgcagggaagcaccctgtgaaatcgtgcagggaagcaccctgtgaagtcgtgcagggaagcaccctctgaaatcgtgcagggaagcaccctctgaaatcgtgcagggaagcaccctgtgaaatcgtgcagggaagcaccctgtgaagtcgtgcagggaagcaccttctgaaatcgtgcagggaagcaccctctgaaattgtgcagggaagcaccctctgaaatgcctagaaatagctgccgggctttcacttggttcccaaatttcttcaaaggtcaaaaccatcacagtgggcaactttacaccccagtgttcactgtcctcaggccactgcagagccatcctagtggggcagtgggcgcggggcgggggctcctgactccggtgaggtcaccctggaggggagtcccaggaatcagcctgatgttcagaatgccttcctggcatctcagaagtgtactgggggagacgtgaggacctttcagccaagtgtcagcgttcttattgcaggagaacattaaagccacaacccagaaacttctcaggagcatggcgcacccacaccagccccgggctccgcctggacagcacctcctgggccgccctgaccagcagacaccatccttccagcctctcttggccacccagaccagcgggcaccaccctcccagcctcacgcggccaccctgaccagcaggcaccatccttccagccttgctcagtcaccctgacccagagggctgccctgaccagcgggcaccatcctcccagccccactcagctgccctgaccagcgggcaccatcctcccagcctcactcggccagccgagctctgtaggcctcagagtgcagagaacctcaaatgttgtgactttgctctgctgcagggacctgccatggagtgtcccttgtgcgagcattttgagagctatgccagcatccatccccgcaggtcccatccctgagccatttctcaggagagcaggaagggagcagggagaggggtgctcccagccagccccggaaccagaggtctggggacgcagccgaccagccctccttgtctgggcctctgtttcctcttcgacacagggaagcagggaggggccgatcagcgacttaggcctgttggctgtggtggggtccacctgcgtttctggggagcccacggaccctggggtgtacctgggtttcattcccagtgacctctcctattggtccccatttggggcgctgagatgtgatcgtttctttcctgagaatgagctgaggtaaaaacatgctggggaggaagatgggccctgggggcagcgagctgcgcctctgcaccgggagaaaggccgtgtccccagagctgaggcggtggtgggcagggctcctgagaagccggggcagggcagggtgtctctgaggtcaatgaggaacagctgaggtccagggacgcaggaaggatggggtgaactccgggatggggccggcagggagcctcacgcttacagagcctggtgttggcactctcctggcttcctccgcaaacctagccacgtggtcagggagcccgggcctagcagacggcccccaccttgacagaatccccagggtcgtgcgtggcggtgggggcgacttcacagccgagaccgggactaacgctgctgtctcgcagtcacccctgcaggccgctcagggcagggctctggcctgacgggggttcctggacacgcctctgagccggcagcccctacccgcacccgtgcaccttccacgcccgtctccagcagcccctgcccgcacccgcacccctgcacctgccacgcctgtctccggcagcccctgcccgcacccgcacccctgcacctgccacgcccgtctccggcagcacctgccacgcccgtctccggcagcacctgccacgcccgtctccggcagcccctgcccgcacccgcacccctgcacctgccacgcccgtctccggcagcccctgcccgcacccgcacccctgcacctgccacgcccgtctccggcagcccctgcctgcacccgcacccctcacggctgtctccggcagcccctgcccgcgcccgcacctctgcacctcccacgcccctctccggcagcccctgcccacacccgcacccctgcacctcccacgcccgtcttgccctggggcccaggtgcaggtctgtgaggagggcagccccgtgctcccgtggccaccgctcagccaagtggattcagcgagggtttttagtgtttgtgcctgtgtccccgtgtgcctgtttcctggtgaggctggacgcctggcatgtctgaacactcacattccccaggcatgcatgtgcagccgccgccgccacccatgtactgtggcgctgacccctcctgtaacagctgtggtcttggcctctcgtgttggtggcagatgtcccatttcccagttactttctgttgtccaaaagtttaactgtcctgccagccaaagctgctgagcattactctgatagaccatcagtccttggtaagtgtcctgtgcatctgggataagcatccgtttgttttcagctgcgctttctgtgacttgctctgcgtgagtcctcggtccacgtgggccgttgcgctggttcccagcctgcccgacacactcactgcgacgcctcccttgcctactgcttgctggcttctgtgttctctgcagtaaacattgatttctgactcg

SEQ ID NO: 16641 - protein, 114 aa, Homo sapiens
MPASIPAGPIPEPFLRRAGREQGEGCSQPAPEPEVWGRSRPALLVWASVSSSTQGSREGPISDLGLLAVVGSTCVSGEPTDPGVYLGFIPSDLSYWSPFGALRCDRFFPENELR

SEQ ID NO: 16642 - DNA, 2581 bp, Homo sapiens
tcaaatgagaaaattgcaagtagtgtgacagagctgattgattttgttgctttcttgattttttttttcaaaatgggtttactaaaatgtagatgacttaactgcctcctccttcgtctgaaaaatgccaatattcaatcatcatgcagcattataacaagccttataagtcctaaagcattaagttgcacttttttgaggaggggtagtgcagtatttctctggccagtatgaatgaagtttatacttaccatatttgatagaaacatagatcaagctatggcacagcgactcatcagatagctagctttgacgtctgggcacaattgaaccaacttccatcgtgaatctttataatgattgactttggtgtatagtgcagtaaacaaatagtgctcctagttaagtatttgtcagcatccttttgtctctaacttgtttctatttttacagccacacaattcttggcatgtattaagaaaaaaaaaaatccctgttcaagtagtttttccacctatcagcactgagtaaatgccataaatccattgaaatggtctaaatgttccatctgttctcctgttttgccagttatatagtaatgaaatacatttgtaaattttatgcaacaaatggcaaacgtatcattattttgaaattgtgtatgtaaaagttatatttttacatgtagactcttgttattatgtgttttaatacattgtatcagtttttgtttttttttaaaaactgtggtttaaaaagaagtctcatttaaatgaaatagctacaagaatcagaattttatgttcatttctgaaaatgtaagaacaaataagatagttaccacgtggtcatcttttacaaacccataaacattttgattagctgtgtgtgtgttgaaaaactgtaaatatgttcagtagcgataaaactaaaataactttgatttgttgataagttcctaaaatgtggaggtggattaaaaccttaggagaatagcagaaatcaaacttcatgaaaagttattttggggctttcctgtgaaatgtatgaacaaagaggctcagagaaggacatggaagacaataatgtatactctctcctcctccctgaataatgaaaaccatgtgtatttgttccctccgtatgttaaagatttccttttagtggtacattctgcactcattttgtatagtctaccaaggcgggtatccctaggaacaatattatataggaagcaggtatactctgatcacattcaggataagtgtacagaagaaaatacggtgtttactctttagggaactggaaacactccctgcattgatgtacattttaagaatggcacttttgatacatgttatcataaaggtgcttaatagagctgaattaaagtttttcaaatctgtaaacaaagcaaaaaagtaaattgtagtcatttgattattttttaaattggtgctttatattttgttctcactcagagtaaaagctgcaatttattgttcaccagctttgatgtattcattactcagtaatgcaatacctctattgttgaattccctttggaaataagtgaaaattctaacggccactgaaagctgctcgctaggttttgcttggtggagaaacataatctgcacctatccatattaattgggttgtatccccattaaaaaagaaaaaaagggaatgtggcctttttagtgtgttttttattgttgttgttttgtaattatcaaacccaggtaagatattggtatcctgcactggatcttcaaatgaagttcagcagaagacagttaagattaaagtactatacaaaaatttcaaaagggtccttactacgctatctgtatgacgacacttaggctggggatctctttcagaaactcggactttaaaagcaacttggagcagttgatccacctccacattcaagtaatttatgaatatgcagaatagggatctgttcatctagaaatttttaccatttgtcttctgtgtagctgcaaggaacactaatgtttatacaactgtcagtccacccagtggtgcaactggttctgattcagtcttccgattcctttttatttttcactttttcctatttctgaatttttttttttatttgtgatcttgattttgatgaggggttggggagtggggagggagtcgaaccaagacttggagttaagaggattttcatcttttgcatccaacaggcagaatatgatctgtgtccaaaagtgaacttgagtcaggattgaatcaatttcagcataaacaagcacaaaaatttagtctgctggctgactggaagcaaaaaagtcaagatggaatatgatgaattccaacacaatggggcaccaaggcctttaggcctctctttttattttgctttggttttgtttgtttttctttagagacatgctctttctcatgggacttgaagtggactcatctttgtgcagtgctggttttgccatactcatttcaagtattatagacatatgtaatggtgaaaatatatgaactgtggcctttttcattcttgttacttgtgatgcaattaagtgaagat

SEQ ID NO: 16643 - DNA, 3414 bp, Homo sapiens
  CDS (120)..(2342)
aatgcgaagggagtgatgtccagagtgatttttgcaacagtgacccttgcccaacccatggtaactggagtccttggagtggctggagaacatgcagccggacgtgtaacggagggcagatgcggcggtaccgcacatgtgataaccctcctccctccaatgggggaagagcttgtgggggaccagactcccagatccagaggtgcaacactgacatgtgtcctgtggatggaagttggggaagctggcatagttggagccagtgctctgcctcctgtggaggaggtgaaaagactcggaagcggctgtgcgaccatcctgtgccagttaaaggtggccgtccctgtcccggagacactactcaggtgaccaggtgcaatgtacaagcatgtccaggtgggccccagcgagccagaggaagtgttattggaaatattaatgatgttgaatttggaattgctttccttaatgccacaataactgatagccctaactctgatactagaataatacgtgccaaaattaccaatgtacctcgtagtcttggttcagcaatgagaaagatagtttctattctaaatcccatttattggacaacagcaaaggaaataggagaagcagtcaatggctttaccctcaccaatgcagtcttcaaaagagaaactcaagtggaatttgcaactggagaaatcttgcagatgagtcatattgcccggggcttggattccgatggttctttgctgctagatatcgttgtgagtggctatgtcctacagcttcagtcacctgctgaagtcactgtaaaggattacacagaggactacattcaaacaggtcctgggcagctgtacgcctactcaacccggctgttcaccattgatggcatcagcatcccatacacatggaaccacaccgttttctatgatcaggcacagggaagaatgcctttcttggttgaaacacttcatgcatcctctgtggaatctgactataaccagatagaagagacactgggttttaaaattcatgcttcaatatccaaaggagatcgcagtaatcagtgcccctccgggtttaccttagactcagttggacctttttgtgctgatgaggatgaatgtgcagcagggaatccctgctcccatagctgccacaatgccatggggacttactactgctcctgccctaaaggcctcaccatagctgcagatggaagaacttgtcaagatattgatgagtgtgctttgggtaggcatacctgccacgctggtcaggactgtgacaatacgattggatcttatcgctgtgtggtccgttgtggaagtggctttcgaagaacctctgatgggctgagttgtcaagatattaatgaatgtcaagaatccagcccctgtcaccagcgctgtttcaatgccataggaagtttccattgtggatgtgaacctgggtatcagctcaaaggcagaaaatgcatggatgtgaacgagtgtagacaaaatgtatgcagaccagatcagcactgtaagaacacccgtggtggctataagtgcattgatctttgtccaaatggaatgaccaaggcagaaaatggaacctgtattgatattgatgaatgtaaagatgggacccatcagtgcagatataaccagatatgtgagaatacaagaggcagctatcgttgtgtatgcccaagaggttatcggtctcaaggagttggaagaccctgcatggatattgatgaatgtgaaaatacagatgcctgccagcatgagtgtaagaatacctttggaagttatcagtgcatctgcccacctggctatcaactcacacacaatggaaagacatgccaagatatcgatgaatgtctggagcagaatgtgcactgtggacccaatcgcatgtgcttcaacatgagaggaagctaccagtgcatcgatacaccctgtccacccaactaccaacgggatcctgtttcagggttctgcctcaagaactgtccacccaatgatttggaatgtgccttgagcccatatgccttggaatacaaactcgtctccctcccatttggaatagccaccaatcaagatttaatccggctggttgcatacacacaggatggagtgatgcatcccaggacaactttcctcatggtagatgaggaacagactgttccttttgccttgagggatgaaaacctgaaaggagtggtgtatacaacacgaccactacgagaagcagagacctaccgcatgagggtccgagcctcatcctacagtgccaatgggaccattgaatatcagaccacattcatagtttatatagctgtgtccgcctatccatactaaggaactctccaaagcctattccacatatttaaaccgcattaatcatggcaatcaagcccccttccagattactgtctcttgaacagttgcaatcttggcagcttgaaaatggtgctacactctgttttgtgtgccttccttggtacttctgaggtattttcatgatcccaccatggtcatatcttgaagtatggtctagaaaagtcccttattattttatttattacactggagcagttacttcccaaagattattctgaacatctaacaggacatatcagtgatggtttacagtagtgtagtacctaagatcattttcctgaaagccaaaccaaacaacgaaaaacaagaacaactaattcagaatcaaatagagtttttgagcatttgactatttttagaatcataaaattagttactaagtattttgatcaaagcttataaaataacttacggagatttttgtaagtattgatacattataataggacttgcctattttcatttttaagaagaaaaacaccactcattttacaaaatatagtacagctactataaggcttgtttgatcccaaatggtgcttatcttgattgaacattcagaacaaggatattattttcagtgattttgtgagatcagctgaaccacttatgataataataataaaaaagactgctttgccctcacgtcagttgtacatggcatggaactttaaaaattttaatataaactttcatccagttagcttcataacttttacgttccagaattttgtttattttcctgtcaatgaaagcaatttttaaagataccagtgggacaggtttggttttttaaaaatctcatgtgttcaaattaacataaatattacacgtcaatacactgtacatggtggtaatagactctaagcaattgccaagatgtattctatttttatgaagtgtatatatattaccttagtgtgcattttctatataatatcttgatggactcttttataaaattattttataaaaaacaatgttacactaaaatcagcctaaataaattttcacaactttttttcat

SEQ ID NO: 16644 - protein, 741 aa, Homo sapiens
MRRYRTCDNPPPSNGGRACGGPDSQIQRCNTDMCPVDGSWGSWHSWSQCSASCGGGEKTRKRLCDHPVPVKGGRPCPGDTTQVTRCNVQACPGGPQRARGSVIGNINDVEFGIAFLNATITDSPNSDTRIIRAKITNVPRSLGSAMRKIVSILNPIYWTTAKEIGEAVNGFTLTNAVFKRETQVEFATGEILQMSHIARGLDSDGSLLLDIVVSGYVLQLQSPAEVTVKDYTEDYIQTGPGQLYAYSTRLFTIDGISIPYTWNHTVFYDQAQGRMPFLVETLHASSVESDYNQIEETLGFKIHASISKGDRSNQCPSGFTLDSVGPFCADEDECAAGNPCSHSCHNAMGTYYCSCPKGLTIAADGRTCQDIDECALGRHTCHAGQDCDNTIGSYRCVVRCGSGFRRTSDGLSCQDINECQESSPCHQRCFNAIGSFHCGCEPGYQLKGRKCMDVNECRQNVCRPDQHCKNTRGGYKCIDLCPNGMTKAENGTCIDIDECKDGTHQCRYNQICENTRGSYRCVCPRGYRSQGVGRPCMDIDECENTDACQHECKNTFGSYQCICPPGYQLTHNGKTCQDIDECLEQNVHCGPNRMCFNMRGSYQCIDTPCPPNYQRDPVSGFCLKNCPPNDLECALSPYALEYKLVSLPFGIATNQDLIRLVAYTQDGVMHPRTTFLMVDEEQTVPFALRDENLKGVVYTTRPLREAETYRMRVRASSYSANGTIEYQTTFIVYIAVSAYPY

SEQ ID NO: 16645 - DNA, 2405 bp, Homo sapiens
ggcctttttttttttttttttgacatatgttggttcaacttgtatatactattttgtaaactgtttttcccaattaacaatatacacagatgtcttcattttacacacccctctcctacacaccctcagacaaaaggcaaacctattcaagtttttgatttttgaaaatgtttcaatcagggaagctctgggtacatttcatgaagagaagtgatgaagatatccctctgacataacagaaagtggctgtttagctaggaaaatcatcaaataagtaagtagaaatgcatgcagaaacagaatgagtcaatcccaattaatgtttctgtgtttcctaaaagaaaataaacaccgcacatttgtctttagacagcttagtgtgcaccatggttccagtgtttttgctggaagtgtaaagttgttagcacaggcatatttctcagttagcagaaaacagctgctactggaattagtacccagaaatgaagttatttcctcccatcatcttactgaattgctctgctttacaaacaagaagtgaacattaattacttggaaaataggcctgacccagccaggatgaggctgacgcgtggaaagaggtaaaaataaaatgacaaagctctcttcacttcctatgctagtgtctgaaaacagagctgctcagaccattatggtcatttcaaagttttcattcaataaatagttttttagacacctactgtgccctacagggacatatatttttggcatacaatcaataactacaaccgtggtaagaaattaaggtacatgctgaacacttaccactgcagagagatcttatcgccagaattttagcaatcaagactattggcttttggccttccaaacagataaaaggtaacaattttttgaaaaactgagtacctaaactgccagatacattatatgaattctattatttaatttttgcaatgactctatgagttaggtactgttcccaaacccatttcataaatgaggtaaccaaggatcaggaaggtgaagtaaactaacctatgttttacaaaaaataaaaggcaaagctgaattctgaacaaatctcttctcacttatcacactgtttccctgtcaagccaagccctaggaaaacttacaaagtcagtcaaaatatagctttactgttttgccttttctggttcttactgcccttaaatggccagttccctcatcttccctccagatgcacgttccaaattccaaacttattactctgtggccacaactaaagctctcacatcccctgtgtgatccttcagacagggaaaaagataagtagtgattatctaactgaagtaattcattctagggtagatggctgaattcccttaaccctcccaaccattttactaatttttttgtcaaacatttatcactgtatctcccaatcattttaataaagggactcatttccagttggcagaatgtatgtatatgtgagaaagaaatatttgaaaatggagatctccaagaaaatgttttttattgcagcaaggaatcggttaccttacttttgagaggatgttccactcaaatcaacattaaacaatcaatgctacaatgcaaatagtaaaaaaagcttactggggctcctgctaagacgtggcgctgaggttactgcacccaatgaatgtgctagatagtcatccacgcaggcatttctgcaaatatgtattaagtacctactatttgatagtatatagagtttgggccaatacaggaagaatttttaaattcacatttcctattaatttcagtagccactttacgtcatgctatccaacaagggtacataaaactaaaaccttcagacttggaatatttgtataaaatgcattaatttgatagtaaaacatctgagctatggcatatgtttttttcttttttttagacggagtctcgctctgttgcccagactggagtacagtggtgtgatcttggcttactgcaacctccacctcctgggttcagacgattcttgtgcctcagccttccgagtagctgagattacaggcatgagccatcacatctggctaattttttgtattattagtagaggtaggttttcaccatgttggccaggctgatcttgaactccttacctcaggtgatccacccacctcggcctcccaaagtgctggggttacaggcatgagccacacacccaggcaaaagattcttgatgtatctaaaatggtatactgcatgacaacattttggccaaagataagaccacatgtattttgggagtcccataatattataacagaactcagggtgatgggtgtagcaaactaccatgacacatgtatacctgtgtaacaaacctgcacattgtgcacatgtatcccataacttaaagc

SEQ ID NO: 16646 - DNA, 1866 bp, Homo sapiens
agtttcccgtgggtgtgttcacagaacactgggcccctttccatagttcacagacgtggacaatgagcagatgaggctttctccctctggtcctgaagtagcatcatttcatctgaaatggccacaagcaattttggtttatttttcataacagaatcaaagacatcaccaaaaactccatcccacttcttgcaggggaggaatttgttattttcccttggatcctgttgaacacatgtggcatcctgcctgaacccctcccgcagctgccatgcgatccagagctccatccacttgcccacctaagtggaaagggccttcgagggccatcagtttgcagacgacactgtgcattcctttttctctttcggacgctggctccacaatccgggctccaggaggtggaatcgctgttcacttactgccccctagtggtccgcatttctgaaagttctttatccctgtttcctttgagatttttctccgtagatttataggtgtttaggatggggttagtaatgtggccaaggaggtggttgttttctcaagggtgagacctcgtctccgatctccgtctcttggagctagcattcccctctatccacagacaccacgtctgtcgtcatttttattttctgcaatcatttcttctcttggtagcttggagaagagttcatccttgttgatgagacaatcagtataaaccagaggttctcatttaggggcaattttgctcccccttccccagggacattggacaatgtctgggtctggagacattctggtttgtcacaagctggggtaggcaaggtttctactggcatccagtagatgaaggccaggggcgctgctaaacatcgtaccgtgcagtttccccacaccacagcgaagaattacacagcccaaaatgtcaaatgctgaagttgaaaagcctgatattaaccactgtgggcttcttgttttactgcaccgcaggtcggtctccctctctctctctttctctctttctccctctctctcctaccccaccctcccacctatccctccttctgtccctctgttggcatcagcaccactgaataaaaagactcggtcctctgttagccaggcacaatcgtccctttggccaatgtagaacattccctggaaaaccctccttgtacctgcctcacaccactgcaaaatgttcccagccactgttaaaagatgagcgacccccctccaccaccaccacacgaaaggcaggggggaggagctggggctctacacaaaatcagaggctgagacgggcactcggcccctcctcttcctctgtgaggcctcgtgttcagctctatgtgctggtgtccttgctcccgcagcgagttggaagactttgttgaagacttgaagaaggactccacggcagccagccgattggttactctgaaagacgtggaagacggggctttcctcctgcgtcaagtgggagaggctgtagctaccctgaaaggtaaactttctgctgggtcgggggaggagtctgagctgtctttcctgcggtgtttaaaaatctgccacatagaggattcattcatgtatgcaagtatttattaaacgtctacatgtgccaggcattgttctggacacttgggataccccacagcacaaagtaggtgcacatccccctcttcttggagctggtattagagtgggtgctgtaagatttcacactaaatgattccagtaacactttctatttgctaggctcttacagtgcaccgggatgcatgtgccaaacccgttaaaaacacaaggtgggaggatcacttgatcccaggagttcaagaccagcctgggcaatatagagagactcacatctctacc

SEQ ID NO: 16647 - DNA, 1444 bp, Homo sapiens
catgatcttaatttaaaatgaactgttggatctctctttcataaattaagtgcaaaactctactttctgcctttcttcttgtgaccagagtaccagttgactcatctcagttataatttgtttaacaggtttcatttgcttttcccccttaatacatgaatccttttatgtgtttaacagttatttgtttcagagggtctgcattgcataatgccatgagcagccaaggttttcacgtaatgattttttatgaaccatgcaaagacagctcaagttatgtaaatctcagtgaactctctagcgacaagagtcccaatccttaggcttcatcatggagctgcttctctctcaatgtatttgaattattggtctagccaacctcttcttttccccttgctgcagtattttaggaggaaggaacaggctaaatcctagctagacgtgcgcatgcattctggtatttaagagccaataaaatatagccaggaatcaccttgtctcctgtaccatacttggatttgtagttcagatcttcaatgtagtgcttaaaagaaacacacactggggttttcatggtgaagtccagggcaagggcatagaaagaccacttgaccctggatggaacaacatgtggaaaccctccttgccctcctttttatcttctttactttttttactatggccagggttggaaatgtgggtggatgatgggttttacttctttgaaatgttaagtgtggaactttgaaccatgctcggtcttccctggatttagcaagaattgaaggctgtgctcagagaggttaaaggaagcatctgcttctctcagtacaaggttgatggagatgattagtgtggtcaaggaagaggagattgtttctgccgtgcagctaatggaaagtgctttgggaacattggaaaaaagcatctcttgctagaagaccttgatcatctgtctcttggctgtagaggtggctccttggggttcatgtgaggccatgtcaaacaaaaacagggagaaattgtgtccaaattcgtgcttagatgtgtgtctgactcagtgttttcctcctttataaagccaagataaatgatttttgaattaaacattgttttggcacttcgtactttcattcattaagagggatgatgaacctgtcaggccataatagctagcctggaattttccttgccaagtctgtcctccttgaatagtttgctatttatgctgatgatttggagcaaggaggtggaaaatagtcatattatttgtccctacaagggaaaatacagcagcaatgttaaaatgataatgacgccaggcgcagtggcccacgcctgtggtcccagcactttgggaggccgaggtgggcggatcacctggggtcgggcattcaagaccagcctggccaacatggagaggccccgtctctactaaaaatcc

SEQ ID NO: 16648 - DNA, 1914 bp, Homo sapiens
ccagtcagggacagccagacttgtaaactgcacctgcttccacagtcttagtgccccgtctaaaaggaacaggcgctgaagcactcatcttgccgattttatttcaaacgtccaggagatggcagcaaactctccttccctctcagtgcttcacaggcagccattctaatgctcgttgcattacaatttgctttgaatattctttttttaaaaaagacaaaagactaaagggggtcttgagacgtgatttttatctgaccccctgcttctaatcaagaatgagtataaatatttctagggatagaatagaatgatacaattttattatctagaaaagagattggatttccttggctattttttcttatctctggggaaaaagattgtatgacttcccttggctgttgggccctagactctgttatctccaaatccaaaatattcttactaataactagcttaaatctatctggcagtaatctaaacattcttattttgggatctaggctaatggaaaattttgaagcactttgaatgcttattagctttttaaaatgaaaataaatacgattataaaattttcaaaagaaaaaggaagttcatgcactttgtgcatcatagggaaagagcccaatatttttgtttaactttaacattaatcttggcaaatagagtagtatgtcaacaaaatgcaaaatcagtcagaggctgcttatatgttacaagagtgtacggaacaaagaaacaggcagacccacttggtgacggctttgatcctaacaagcacattgttttcaaaactttgaggcactaaagtttatttctaaaacagaaaagatggtgacgtgttggaagttctgtgatgtgaaatatatgtttgtacatttaccagtgggaggagaaaagactaatgggagagctggatattataaatgatgggttaatgctggagcctaggtcactgcacaggtttgatgccatgtggtcaatgaatgactgatctgttcattgtattttgtttgtttggttggttggttgttttttttcttttgtttttgttttgttttgttttgtttttagacagagtctcgctctgtcgcccaggctagagtgcagtggcaccatctcggcttactgccatgtttttttttgttttgttttttgtttttgttttggataattgcttaagaatttagacacacatactactaaaggatctctcttttcctctctttctctcaaatgtgtattgatgagggcctatccattttagtctccccagaagttactttttatcttaggctaagattacatatccatagcagttaagagggctgatgtagtattttagctaattcataatgtttttgtaaattcatcaatgcatttgcgtgaattaatactaaaagtgaaaaaattgtttaacaattgtaatagtcaataaatacctaacatcaaatcaaaatgaaggcaaactttgggatggggagaagtcaggagaatactaaagaatgagatccttttaataaatgtgtggtctacatggcaaaatttgctgtagtattaacatacaatgttatctcaagacaattatacattgcagcttcatgaatgcattaagaaagctatgctggccaggcgcagtggctcaagcctgtaatcccagcactttgggaagctgaggtgggtggatcacttgaggtcaggagtttaagaccagcctggtcgacatggtgaaaccccacctctattaaaaacacaaaaattagctgggcgtggtggcacatgcctgtaatcccaggtacccggcagggtgaggcaggagaattacttgaacctggggagcagaggttgcagtgagcccatatcgtactgctgcagtccagcctgggtgacagagacagactccgtctc

SEQ ID NO: 16649 - DNA, 1862 bp, Homo sapiens
ggcctttttttttttttttttaaggcatggacaagctgaatctaaaatgtttatgacaaataatctataacagccaaataactttgaaagaacaaagttgaaagatttaaatcatatgacttcaacatttattataaagttatagtaatcaagacatgtagtaatgccaactaagatagacaaatcagagagtccagaaatagaaccacacatctatgataaatggtcaactgatttttcataaagtgaaaatgcagctcaggagaaaaagaatagttttttaaacagtgctggaccactggatacccataaacaaaaccaaaaattttaaaaactcattttggctgagtgcaatgccttatgccctgtaatcccagcactctggggaggcagaggtgggaggactgcttgaggccaggagtttgagacctgcctggtcaacatagtgaaaccccatctctacaaaagaaaaaaattagtcaggcacggttgcatgtgcctgtagtcccagctacttgggagcctgaggccaaccatcacttaagcccagcagtttggggctgcagtgagctatgatcccatcactgcactccagccttggtgacagagtgagaccccgtgtcaaaaaaaaaaaaaaaaattttgagcattctccaagtcttcgccttttctggttttaatttaaaacaaacaaacaaaaaaaacaaaacaaaacatagtgcatatgtagtttttgtctgcccagaatccctcttttctgcagaaaactgccttactcccactccacgtgttcctagtaagataacaatcacagtgccctttcagctacctggctctgggagtgggttcagtatcaacctattctttcagttcttctaaagtaaactgctgatggaatatttctttagtctttcaagagggcagagccatgcttcttccttaatatgtgtgttcatgacataaaacccttcaaacctctcctaatcttaaaagtattaaatgtttacatcttcctcaaacataatacttgattgacagtcaaggagttccaacacaaaactattaatatggcgagacagcaaacaccaacccttcttatccactcaattatactatgaaatgagttatggttgaatcatcagaatgttctggaatggctgggtacagtggcttacacctgtaatcccagcactgtaggcaggtggatcacttgagtctaggaggctggtcttgaaccctggaggcagagtttgccatttgccattgcattccagcctgggcaacaagggcgaaactccatctcaaaaaaaaaaaaaaaagactacagaccaggcatggtggttcatgcctgtaattccagcactatgggaggctgaggtgggaggaccacctgagcccaggagtttgagaccagcgtgggcaacaaagtgagataccatctccacaaataacaaacaaaaaacaagaaaacaagattgagaaagaggttgccataatctctagtagtctgtacagtcttcctcttcttctttttttttttttttttttttttttttttttttagacagagtgtcgctctgttacgcaggctggagtgcagtagggcaatcttggctcactgcaagctccgcctcctgggttcacgccattctcctgcctcagcctccaagtagctgggactacaggtgcccgccaccacgcccggctaatttttgtcagctggtggaatgtgcctgtggtctcagctactcggcagactgagatagatcactggatcactggagctctgggggtcaaggctgtagtgagccatgattacatcactgcactccagcctgtcagcagagggaagaccctgcctc

SEQ ID NO: 16650 - DNA, 1579 bp, Homo sapiens
ctgtctctggatttgccttctctgaacattttttttttaacttttttttctgggggcagggcaggttgggttaggatggctgccctctggacctgcccctgaacatttataaatgaaataatatagtatgtgttgcctttcgtggtggcctctctcacttggcataatatttttaatgtccatccatgtggtaacatgtatcagtacttcattctgctttatggctaaataatattccattttgtgggtacaaatttaatctatttttttttttttgagatggagtctcactctgttgcccaggctggagtgcggtggcatgatctcggcttactgcaagctccgcctcctgggttcatgccattctcctggctcagcctcctgagtagctgggactacaggcgcccgccaccatgcttggctaattttttgtatttttagtagagacggggtttcaccatgttagccaggatggtcttgatctcttgaccttgtgatccgcctgcctctgcctcccaaagtgctgggattacaggtgtgagccaccgtgcccggcccaaatttaatctatttatcaattgatggacatttgggtttccactcttttggctattatagataatgctgcaatgaactgttgtatgaaaatttttgtgtggtcacatgttttcctttttctttggtatattgctgagttataaactgatttccattttatattccaaccagcagtacatgaagattcaaatttctccacatctttgtcagtatttgtcattgtcttttttttctatttaaagtcaccttatttaattttattgttaattttgttaacattgaactcacaaccaacagcattataattcatgtctgaatgaaacttacctaacacagtattttctctgtaagacacattaaatcgttcttgcacttaggagcactagaccgcacttcagcactacacttggggggcatttttttttttttttttttttgagacggagtcttactctgtcgccaggctggagtgcagtggcgcaatctcagctcattgcaacttctgactccctggttcgagcgattctcctgcctcagcctcccgagtagctgggattacaggcacgtgccaccgcgcccagctaatttttgcatttttagtagagatggggtttcgccatgttggccagaatggtctcaatctcctgaccttgtgagccaccgcgcccggtctgggggggcatttctaaacaacaacatctaggccgggtgcggtggcttacgcctgtaattccagcactttgggaggctgaggcgggtggattactggaggttggaagttcatgaccagcctggccaacctggtgaaaccttgtctctactaaaaatacaaaaagattagccagatgcggtggcgtgcacctgtcattgcagctgctcaggaggctgagacaggatgatcacccgaatccgggaggtggaggatgcagtgagctgatatcatgcccctgcagtccagcctgggcaacagctacactctgtctcaaaaataaaataaaataaaataaaacaacaaaatccc

SEQ ID NO: 16651 - DNA, 1925 bp, Homo sapiens
tgtttcacggcagcctgaccaacatggtgaaacttcgtctctactaaaaaatacaaaaaaacgaccaggcgcagtggctcatgcctgtaatcccagcactttgggaggccgaggtgagcggatcacgaggtcaggagatggagaccatcctggctaatatggtgaaaccccatctctactaaaaatacaaaaaattacctggcgtggtggcgggcgcctgtagtcccagctactcaggaggctgaggcaggagaattgttgaacccgggaggcggaggttgcagtgagccgagatcgtgccactgcactccagcctggtgacagagcgagactacgtctcaaacaacaacaaaaacaacaacaaaatacaaaaaaattagccggacgtggtggcggatgcctgtaatcccagctactcaggaggctgagacaggaaaatcacttgagtctgggaggcggaggttgaagtgagccaagatcatgccattgcactatagcctcggtgacaagagcaaaactctgtctcagaaaaaaaaaaaaagaaaagcaaagaaaaaaaaggcacaatatgtaatgctatttgctaaagtcagcctctttatgggtcttttgttgacttcttctttagtggctccacttcttagaagttaatgagcaattcctgctatagcagcagagcctctaccaaagcagggggacttcagggaaccactggttgtcagatgtgctgggcgtgaacatgagcgtgaacagaggaaaagtgtctgatttaactggtctcgggtgaggcctgcatgttgggatgtttagaggttccccaatgataactaataagaagccaaggttgaaaaccacatctaggccaaactgcgattaatttttgccttccacctccttatcaatgtcctctttcccttatgaccctgctgcctacctgactcagttgcgtccactttctctgtgaatcttcccttacctccacgttggctgccagcttcaagattgcatgcccctctgagcagtttatctctaaccaagagaggtattcctttccaagagttccattaaaagtccaaaggagaagttaattggcctgactttggaccatgtgtgcccacctctcaaccaatcactgttatcagggcagtcatccctttgtccagccatgctcctgtatcagagaagcactgccatgacagatattgggcaaactgatatatgacccccaatactgggtttggtgctcattctcgttaatgcatgtgttaagggtttcattctaatcatctgcaaaaaagtgattgttgtctttaaaatgttaccaaaactagtcttttagcaagaatcttactagaataaaatggctcttgctacctgtatttttaatcagcctatgtatattgatcccattcctgatattatcaccttaatatataacagccccaattcctcttattgagcattggttgctagggaaagcaaaaagttaagagaaaactactgagattttctctctaatttgcctctgtctgcctctaactagcttagagatcttggacaagtcctttaacagttctctgtcagctgcttggactgtgaaatagagataaaagtacctgtctatttcaggccgggcacggtggctcacgcctgtaatcccagcactttgggaggcccaggagggtggatcacgaggtcaggagattgagaccatcctggctaatgcagtgaaaccccgtttctactaaaaatacaaaaaattagccgggggtggtggtgggcacctgtagtcccagctacctgggaggctgaggcaggagaatggcatgaaacccggaggcggagcttgcagtgagccgagatcacgccacggcattgcagcctgagtgacagagtgagactccgtctcaaaaaaataaaacatt

SEQ ID NO: 16652 - DNA, 1949 bp, Homo sapiens
ggcctttttttttttttttttttttagctgagagcagtagctcacacctgtaatcagccctttaggaggctgaggcaggtggattgcttgatcccaggagtttgagactagcctgggctacatggcaaaaccccatctccactaaaaatacaaaaattagccaagcttgatggtggtctatagtcccatcctctttggaggctgcagtgggaggattgcttgagcccaggaggtgaaggctgcagtgagctgagatcacaccactgcactccagcctgggtgacagagcgagaatctgtctcaaaaaaaaaaaaaaaaagtaattttttaatattaggaattagagtgtggtggtcatcagttcatggctgacagaaacagcacttcctgctctttgcaatttagttcttataatggacaagtcttgtttcaaatgctgcctccttggtattctgtgtacaatggaaatgggggttggattagatgctctctaaagatggtctgagctctaaaagttttcttcctggacagcagcagtttccctggataaaggacctttttcctgagcatgtggctctgtctcagaagcagcccctctccctggttccccagtagagcttccaggctcagatgagtagggccagctggctttgctctacatagaggccctaaataattttagtggcttaaaagcagaagaatggttctccagctcctgtaagaggcagaattaacagagaataacttaaagggaacagcatgaaagaggccaatggaaagatagaaataaaatgaagaatgggggcaaccaactttcagggtctctcaaaaaaaatcctgggtcaggatcccacctgtctactgcaagctcccttcttcctgctcacagtgccttcttgccttaatagtacaaagaaaaatgctttaccatgatttaggtactatgctaagctcttgaccatacatgcatcatttaaccctcagttacaatgttggctccatgagggcagggggattttgtctgatttgtttacagttgcatcccattttctagaacaataccaggaccccggtatgtgttcactgagtatttggtgaaatgatgaatgatgacttgctgaggtcactacgattactaactccattttacagatgaatacactgaagctcctagaggttaagttacctgctcaagacaacgtagctagtaggagcaaagccaggattcaagtctagctgatcttaaagcctgctttattttagactatgtcctcacaggaaatatccatctgttttagtctattctcacactgttacaatgaaatacctgagactgagtaatgtataaagaaaagaggttgaactagctcaccgttctacaggctttataggaagtatggccacatctgcttctggggaggcctcagggagtttctactcatggtggaagcaaagtgggagcatacatctgacatggtaggagcaggaccatgagagagatgggggaggtaccacacacttttagacaacaagatctcacaagaattcactatcatgatgacagtatcaagggggatgctcttaaaccatgagaaacagccaccatgatccaatcaccttccaccagacctgcatgagcctgttctcacactgctataaagaactacctggctgggcgtggtggctcacgcctgtaattccagcactttgggaggctgaggcgggcggatcacatggtcaggagattgagacaatactgactaacacggtgaaactctgtctgtactaaaaatacaaaaaattagccaggtgtggtggaggtcgcctgtagtcccagctgctccggaggctgaggcaggagaatggtgtgaacctgggaagcggagcttgcagtgagccgagattggaccactgtactccagcctgggcgaccgagcgagactccgtct

SEQ ID NO: 16653 - DNA, 2128 bp, Homo sapiens
aaaaaaaaaaaaagtgatcaggcaaagaactgaaaggagagagaatgaggaaaacaaaaactattataagtttcaaggtatgaaaagactttataatcaaggtcttctaaccagatattcctaattagatttttttaattttccatatctttaagaaatatttttcagtttgtgacaggaaatagaccctttagcttggaccaaggctactaggcactggccaagcataaaaggcatagctctactctgctccatttagcttgtttctttatccttggctctgtcatttatcacaatttggaattgtcaacatgagcctgaacactaaaaaaaattctgctaacaaaggcactgtgttttccatgcctgagtcaacccactgccctttcctaaatgccaaagatggggaaatgggatggaatttcctggattactacttgtacttaaacctgagtaagttttgaatttggaagacacattccagccagagagggtggattttggacccatgttcgagtgtatcagccacccagattggttttatttaagaaacagataaacaaaatatcttaaagtatctgttatttctagccagaagtaacttccgtatggtttaattaatagacctgccttggctcatcttgacttacagagctggggttctatattctagccctgttctccccagttaacagtcctcagaggaagaaacgagtccataaggcagaatttaaaagctgtgtacaaatttaacatttttacccatggcaagacatctagagtaactgaattattgactgtctttgcttttggcaaggcaagacagcaatagaggatggaaattcaacaaaagtatcaggtgtgtatgtacatatgacattctaaaagggaaaaatgaattattccttaatcatctattaaataagctaagtttattttttaaaaacgtttaagcccaagaggagaaaatatgaaaggaaatgttagttatgcgaaaggttctaggtagtcaagaattcctttttcttttctgaaacccacttaaattcatttgcagcagccctagggggttgtcagaatcacattctggttaagtagtgtcagtgtgtcagatcaaagaagaaataaatcatcctcctcctcctcctgttgtgtgcaataaagtagcccattcaaaactggattcacagtaaccaactgtgtcatgtaaacaaagcaatcttcagattcaccttgtaggatggtgacaggtaaattaacaaggaagttgagaacaagaaggaaagctacctgggataaattcacggttttttttttttgtttttttgttttgttttgtttccttcagtgactttcaaaacgtcagcaatcagccctgaagtgtttggaatgcatactgaattgctacagggataaatataccattgccagaatcttctgtaggacaatcttactagaaatcagtaatcctgaggctgagcacagtggctgtcacctgtaatcccagcactttgggaggctgaggcaggcagatcacttgaggccaggagtttgagaccagcctggccaacatggtgatacctgtttctactaaaagtacaaaaattagctgggcacaatggtgggcacctgtaatccagctactcaggaggctgaggcaggagaagcgcctgaacccaggaggcggagattgcagtaagccaagatcacaccattgcattctagcctgggtgacagagcaagactctatcttaaaaaaaaaaaaaaaaaaaaattgagcaaataaaaagttgtttatctcatggaaaccacgaggaaaatacacaagaaaaagtatagtaggctgggtgcagcagttcacacctgtaatcccagcactttaggaggctaagggaggaggactgcttgagctcagaagtttcagaccagcctgggcaacataatgaggccctgtttctactaaaaaaaaaaaaaaaaaattagctaggtgtggtggcatgcacctgtagtcccagctacttgggaggctgagccagggggatcacttgagcctgggaggttgaggctgcagtgagctatgattactacacccttgcactccagcctgggtgacagtgagatgctgtct

SEQ ID NO: 16654 - DNA, 2433 bp, Homo sapiens
taaaaaaaaaaaccttgtggcaaatcactttgcaaagcagacttactttataaatatgttgcccttttgttttaaagccagattttaaagtacggcttgaaaataggttatatttcagaagttagtttagatgaggtatttggaacttggaaagaattttacaggtaagtatcagtaattcgtcttatgggtaaactgtgcatccatctagaattagtatgttttaaaagaagaatcatgaaaataaaaattaaagttttcagtgaagtagaaaaggtaattcagacgattagaattatccttaagatttcaagtaatatataggtaatgagaaatgaaactgtttgaaaaataaatagaaatgataggaattttgaattatcagaagttgggagtacttttacatttcctgcttaataaaatgggcctgagttacacaaaatatttcagcttagtcaaatttttgctaggttgggaattataatctctgtaaatggggcctttgtgtcagcaagagcttaagacgtaaaagctcctctgttccttgtaataaccgagcggggcaggttctggccttacctccattttacacctgaggaaactgaggcacagaggtccagaccttggcaaggtcatgctgttcctgagctcgggtttgaagccagctgttggagtcccaggtgtgtgctcccacgctcttactgtcacctccactcttagtgggtgagggatggaaaatagggctccaagtgctgtatgattaagcctgattagtggcgaatgaaacccgcacttcccagataaactgcaggagtcccaggaagtgccctaccagccccttgactggctgggaacattccccttccagtgaccttggcaggaccgacgcccttggatgagcggctccaggtgtagctcaggcatttattgcagccccattgccagggcactgccatctcgaggggttctgaaatgctgcttggagaggagagaaaagtgttgaagtcggattgtttagatcagtgctggccaatagacaaagcaagccccatgtgaaatcttcacttttctagggaccatgttaaaagagtaaagagaaacaggggaaaactgattctaataatatgtcctaaatacaattttgaaatgtaatgaatatttaaaaattgagatattttacattcttttttcataccaaatctttgaaatcaagtgtgccttttacactgacggcacctctcaattcacacgagccctgttttgtgtgctcagtaattgcatgtgactcgtggctcccacactgatcagtgtgggtttagatagtagctaaatggtgacataacagccccactaatgctgaccatccccttcccctagatggcaagagacttctggggccccagtggctggactatgactgtgaccgagctgtgatcgaggactgggtgttcagggtcccccatgtggccatattcctgagtgtggtcatttgcaagggctttctcgtcctgtgctcgtctcttgatctgactaccctggtccctgagcgtcaagtggaccagggcaggggttttgagagcatcctggatgtcctctctgtcatgtacatcaacgcccagctgcctcgggagcagcggcaccgctggcgcctgctcttttcgtctgagctccatggacacagcttctcccagctctgtggccacatcactcaccgggggccctgtgtggctgtcctcgaggaccatgacaaacatgtgttcggtgggtttgcctcttgctcttgggaggtgaagcctcagtttcaaggtaagacttggtgacctgaaccttgacgagtggcacagcacgggcaaagagctctggagaaagggagagggtgggggtgctaaatagggctctcccatcttctccaagtgtttctctagacgcagtcggggcgataggaaaatgtgatgctgctctgtggtgtttatcacatcagggttcttcaggacaggccgtgtgacccccagttttcaggtgagggcacgggcccagttattacacggtgccgggtctatggggcgtgggagaagtcaagccacagatgcctccgaggggaccaggagatggtaattggttcagatcggacattttccttccctgggccttcctgcccctgcccccaccgccacgcgtttgcttgttggaatttggaagctttgtgcatgaccttgaatgcactggatgaaaggttctaagtaaattcttttccttccctcaaggaagaatactctgatgaaaagagtcctttaaaaatatttaaaacacaggccaggtgcagtggctcacacctggaatcccagcattttgggaggctgaggcaggaggatcacttgaacccaggagtttgagaccagcatgggcaacatagtgagaccttgcctctatctt

SEQ ID NO: 16655 - DNA, 2599 bp, Homo sapiens
taagtatatgaaaagatgctcatatgtcatcagggaattacaaatttaaaacaatgacataccactacacacctattagatgggcccaaacccaaaagattgacaacattaaatactggcataaatatggagcaacaggaactctcattcattgatggtgggaatgcaaaatagtatagccactttggaagacagtttggcagtttcctaccaaagcaaacatacttttaccatgtgatccagccatcatgctccttggcatttacgtaaatgaaatgaaatcttatgtctacacaaaaacctgtacatagatatttacagcagatttattcataactgccaaaatttggaagcaaccaagatgctcttcagtaggtgaatggataaactgtgggtcatccagacaatggatattattcatcactaaaaagaaatgagctatcaaggcataaaaagacctaccagaaacttaaattgcatattattaagtgcaagaagcctatatgaaaagataacatactatatgatttcaactagataacattttagaaaaggcaaaactatggagacagtaaaaagatcactggttgccaggggtcagtgtggagggaaggatgaataggtagagcacaggggatattttgggcagtgaaactattccttatgatactacaatcatagatgcatgtcattatacatttgcccaaacccacagaatgcacaacacaaagaatgaaccataatgtgaactatggaatttgggttctaataatgtgtcagtgtaggttcttcgattgtaacaaaggtaacactctggtgggggatgttgacaatgggggaggctgtgcatgtgcggggacaggggtatatggaaactgtatactttctgctcaatttcattgtgaatctaaaactgctttgaaaaacaaagtctattaagtcagtcagttaatccttcactatttcaccatctccttcaccttacggtgaaatcaaagtaacaaacagggctgcaaggccctatgcaatctggcctccttccccattcctgcctccctccctcctgcttactttgctccagccatgctggcctccttgccagccagaatgccaggcacactgcacctctgggcctttgcacttgctgtgctctctcccaggaacattcttccctgagagagcctccctggttccctgccatcttccttcaggtctttattcaaatgtcaccttcttcgtgaggtcttccccatcactctaattaaaaatgcagctttagctgtgcacagtggctcacacctgtaatcccaaagtgctgggattacaggcgtgagccaccgtgcccagcccaaaagcccatttctaatcgtccaccttcccagatgcttcccaggtgcaccgtgacccctgtgtgctgtgtggtcttttgtagggagaaaggatcaatcaagaaagggaaacccctgctcccatggagcttgccttctggtggaataagaaaattagtaaacattaattaataaataggtacttctctatgcaagtttacagaaaaataaacaaatatgtacataagaaagaagatggttttggatagcgataagtgctggatgaaaatgaaaccaggtgataagccagcgatgactccactgagggaggttgtgagcgttacacaacatggtcagaaaagaccccgttggacccaagtcccagctggtaagaaagtgccagcttcatgacggtggggagaagcattccagtatcaccgttttaaaatatgagcatcctaaatattacacaaaccatacttacgctaaatatttgggatctacactaaaaatgtagtgtagtgtaaaaatggggtttcaccatgtgggccaggctggtctcgagctcccaacctcaagctatccacccacctcagcctcccaaagtgctgggattataggcgtgagccactgcactcagccaatctgatgggttttttttttttttgagacggagtcttgctctgtcacccaggctggagtgcagtggcgcgatctccgctcactgcaagctccacctcccgggttcacgccattctcctgccacaggctcctgagtaaccccttttgcttggttctcattctctctcttggctgccaccatgcaagacctgcctttcgccttctgccatgattgggaggcctccccagccacatggaactgtgagtccattcaacttctttttctttgtaaattacccagtctcgggtatggctttatcagcagcatgaaaacagacaaatatactgttgtttcttattaaatgttattggcttattttgaaaacaaaagcttaccaaatacatgtgattatgggaaggggccagaaagttacactgcaagtaaaaatatcagtaactatgtttactgggtggcgatggcaaaaacaatagtttttcctttttttttttttggagacaggatcttgctctgtcgcccaggctacagtgcagtggtgcaatcacagcccactgcagcctcgacctccggagctcaattgatcctcccacctcagcctcctgagtagctgcatctacagatgtgagccacc

SEQ ID NO: 16656 - DNA, 2440 bp, Homo sapiens
ggccttttttttttttttttttgagatggagtttcactcttgttgcccaggctggagtgcaatggcacaatctcggctcaccacaacctccgcctcccaggttcaagcgattctcctgcctcagcctcccgagtagctgggattacaggcaggcgccactacgcccggctcattttgtatttttagtagagacggggtttctccatgttggtcagggtggtctcgaactcccgacctcaggtgatccggccacctcgatctcccaaagtgttgggattataggcgtaagccaccgcacccggtccaagaaccagtgttaataaacgtacagtagaagtggggtgggggcagggggaagctactgatcacaaacgagaaactaccacacacaaattaattttacagctttgatttagtctctcgggaccccacatctgaagaggggttaggcagcgaagtgtttcggtatggggcttgaggatagtgattttgggattctgagctactgagctcctctgagactctggggcactgctcacttgtaagcacaagggggctttgcttgacggtaatttaggtcaagcttccttgaatttcgatgaggcagctggagtttcttgaaaatattctcagctagattcagaataattctttctcctcttcgcttttgtggggactttatctcaagtgtctgtttctgtctcactggaagacttaatttaggggtccttcagacccctaaattcagttgaggaaatgacttctgctgcaaatagagacctctgctttatttgtcatggagaacaaggaactcaaatgagagatccaaggcatccttgttttcatgcaaatggttctatcagctcaacagaaggaaatgaaaaaaaacataggggccaaaaaaacagagaagaattatctctgcacacagagtatcagctgatctttaacaatgtcttctaagagctccattctaaacattatcagttttccaaatgtaagcgcatgtgagctgagctagctatgggatatcgcacacttcaaatcccttataaaagtcatgagaaggctgtactccctatgtctcaccagcagacaggccaaatctctgaatttgatgtcctgctgtgaacagccatgaagaacactcttggtttttgtagggaggatttctattttcaattatgggctttttttgggggaagtggggaaagtactgtatccttagatgaccacggttgctgtggccaagtctcaaacacttgtttcagcagctggaacactaaataaatttagtctttgtcttctgggtctttggtaaagagctagttagaatttattcaagacatgagagatatgcctggcacaaagtcagacagtatatattatgggtttctgttgtcccccttgagataaaattacagaagggggtggagggaaatgagggggtctcttggcccccaggactctggtgtcattttctcctataaaccattttcaggactctcaatgacctagaggctctctgaacaggcataggctgtgcctgtctagataggtccccactgctatattggtaaccacactcaggagatgtgaaatctttcagtcactttttccattattgtattcagtctggaggcttctcacagtcctctgtagggtgcagaaagagaatctctgctctctgtcagactgctaccctgatggggaatgccattacccacagggaagcagcaacacagcattcttacactacagacctgcagcttgatatgtgagtgatttaaaaacatacattttagtacaatgtatggaatggtaagaaaacactggtgggttagacctttggcttacatgcactattactgtgtggccactggttatctttgaggatagctgttcatgccaaagcgttattttaacttttctctattactttatgatctatgaggccatttggggtctctctaagaacacagctcccatttataacactatttcaatagagaataagctctgaaaaaacactgttttgaataaagctcacatttcccagaaaatagccctagtgtgattcaaataggcatggcattgtgtagcgagaagccatgaaacctgtgggagcacgagctgagcacacagggagaaccctgcatttggattcactggcaaagaccaaacttgaagctatagctctgggtacctctcaattatccctactggctgaggcaacactttaatggtagcctgaggcgccagccctgtgagacatttgacaactcacagcacaacaaccctcctatgagcgggattcctcgtctgggcgcagtggctcaagcctgtagtcccagcaccttgaggggtcaaggtgggaggatcagttgagtacaggaattcaagaccagcctgggcaacatagcaagacctcatctctacc

SEQ ID NO: 16657 - DNA, 2164 bp, Homo sapiens
aacagaaaaatccattagtattaaccattatctttcatttgtggattcttacactgtttcaatggaagtgccttctccccagaaggaaatagaaaatgtgaaatatgaaaagaaaaaatacagggttaacaatattttctaaattactggtaacctgataagaattcatattaatttttgacactaaactaacttaagtataaagccatttttgttaaataaatgagtagatgatacttagattcccatctttactgtttgtttaaatataatttgcttgttacagtataaaaccaactagtttgtatcaaagcttggatactttatcctagtaaacattctgtctaccttgagtaaaaattctggtaaacagtttttttttaatcagaagaacacttttttcattaaaaagaagagctccatttaaaaaacaaacttcatttctagctctaaaatataacaagggttaattaaatctagactaaacaaaattaaacagttatcctgtaatagttaatagcctgttgtttgagtagctaaatgatttaaaaaacagatcaagtacattgatacctttgtatatttatttttgcaggtgaaaaaagccaagatgcaggaatcaggagagcaaactataaggtatgtaaagtttgctttctttttaatgaactactcataagttttgtttttttttttcacatgctgattagcgtatgggcatgctttgccctctttttggttcttaccatcagctgttacattttgaaattatttggtttaagattaaaatttcctttccaaatagttttttcctgaaacttgtgcactgatttgttcttatgcattcattatttattcaacaatatgtaccaaactcatgttgtatatcaggcactgtgctacatagaggagacttaatggtaaagatgaaaagcaccatattcttcagtcagacgtacaatatacagaataggaagcataagcgaaataaataaaatccaagagatttggtattaattaccaaatggttatgaaatgacttagtcattaaccccactcctcttatagaaaagaggaagcttgcgcctggcacggtcgctcacgcctgtaatcccagcactttgggaggctgaggcgggcagatcacgaggtcaggagatcgagaccatcctggctaacacggtgaaaccccgtctctactaaaaatacaaaattattaaccgggcgtgttggcgggcgcctgtggtcccagctactcaggaggctgaggcaggagaatggtgtgaacctgggaggtggagcttgcggtgagctgagatcgcgccactgcactccagcctgggcgacagagcgagactctgtctcaaaaaaaaaaaaaaaaagagaaaagaggcagcttgtttgcacctcacagtttggcttcttcataccatggttttcagttttccacagttcttaccttctgtcgtttgtgcaccaaccatatgagccagtaactgcatcacctctaccacattaatttcaagaatcctacacttttacctccacacactatcatcccggctcatttattctagaactgccatgctagccatatgatgtcttaaactatcaattaaatcatctgtcatcttttcaccatcaccccttaaaaagaactttagtttcttccttataagagaccaacatggcggaaccttgtttctactaaaaacacaaaaattagctcggcgtggtgacttgagcctataatcccagctacttgggagactgaggcaggagaatggcttgaacccacgaggcggaggttacagtgagccaagaatgcgccactgcactccagcctgggcgacaaagactctgtctcaaaaaaaaaaaggaacttaactggccaggtgtggtggctccacttttggaggtctaggtgggcagatcgcttgagttcagtagtttgagaccagcctgggcgacatagcaagatgctgtctctataaaaaacacaaaaacaattatccaggaatggtggtgcacacctttagtcccagctactcggggctgaggcaggaggattgcttgagcccaggggccagaagttgtggtgagccaagattgcgccactgaactccatcctgggttggtggcagagcaagatgctgtctcattt

SEQ ID NO: 16658 - DNA, 1624 bp, Homo sapiens
atttaacattcaaggaaatacaccaccaggagcaaaagatcaacagtcagaaaagtcagacccataaagacttcagaatacatgatattgcatgtttaatatatttaatccaataaaagaagtgggtgataagatgagggccttcaaaaaataggtgtatttgagagcttttttggaggttctagcaggggagtgcagctactcatataccctggaccaaagaccgctcctcctctattggaggtggtcgtcctcttcgaccaagcgcacagcttcaggagggacgcacatggagcggtgagggaagaaggggacaccacctagccatccagatcagctaaccaaccctggtgattgatggagtgacagatggtgcagccacatcaccctcacatccaaaaaaataggtgtatttgaaaaagaaccaaaaagaggccgggtgcagtggctcacacctataatcccagcactttgggaggccaaggcaggcggattatttgaggtcaggagttcaagcccagcttggccaacatggtgaaaccctgtctttactaaaaatacaaaagtcaattgggtgtggtggcacatgcctgtaatcccagctactcaggaggctgaggcataagaatcgcttgagcctgggaggcagaggttgcagttagccaacctccgcctcccaggctcaagtgaggcctgcaccagagtgagactctgtctttaaaaaataaaagagattgtagaacttaaaagtataatcattgaaattaaaaattcatttcaggccgggtgcagtggctcatgcctgtaatcctagcaatttgggaggccaaggcaggcagatcacttgaggtcaggagttcatgaccagcctggccaacatagtgaaaccccatctctactaaaaatacaaaaattagctggaaatcacttgaacccaggaggcggaggttgcagtgagccaagattgtgccactgcacaccagcctgggtgacagagtgagactccatctcaaaaaaaaaaagaagaaattaaaaattcagtggacacgttaaacagattaaatgcagctgaagagagaattagtgaaatggaagataaatctagaaaattattcacagtgcaacacagaaaaatggaaaagtagaaaatataagggaaagttgagaggcgtggaggttacagaggagagttctagcaaaagataattaagagaatggggcaaaagcaataactgaagagataagagcacagcattttccagaatcaaagacataacatttttagattaaggaaacacagtaaatcccaaactggataaaagcattattttatttgcaaatagcatgattgtgtatgtagaaaatcctaatgaatctacaaaaaagctactagaactaataatttagcaagatcacaagaatacaaggtcaacatacaaaattaaattgtatttctatatatatgcagtggacaattggaaaaatgatttttaaaatcaaataccagctggatgcgtacttcacgcttgtaatcccagcactttgggaggccgaggtgggtagatcacttgagcccaggaatttgagactagcctgggcaagatggcaaaaccgtctctacaat

SEQ ID NO: 16659 - DNA, 3241 bp, Homo sapiens
ttagctcctttgacttgggccctaagtctgttttacctgatgttcctgaaagatgttcctgatgtccttcactgttctttcatgctggatgttcttgcctatgctgcctcctcagctatcaccctctcttcccctttttaatgtagaactcattcttaatgatttgtcaaaggcaccctatttcactgaaatgccttctatattccctaccctccaagtggattgtagaccttctaaggtcttttgacatctgcatatctctagcacagcacttatcacggtgattatttatctgttcatctttccaagtagacactctcattttaactccctaccctagtcgccagcatccccagcatagtgcctgtcataaaatggtgccacaatgaaaatttgaaaaatgaatgaacgtgataaacatagatgagaatcctatattctacaattttttaaatgtactgaaattattctttttgaatcctcctatttatttctgtgacttctttgatgacaaagttagaaaaaagtggaggtcagtagggagatatgaagggatgcaggtggaagcagtgagcctgggcgggtgatggagtgggagatacgtggcacaggggtcagtgagttaatctgggctcattcagagaatggaaggtgtgtgccaagaaaactggttggatagggataggtcagggattccctcttgcattctcacacttgggggcatgtgtcattttcttttcttttcttttttttttttttttttttgagacggagcatcgctctttctcccaggctggagtgcaatggtgctatctcggctcactgcaacctccacctcccgggttcaagctattctcatgtctcagccttccaagtagctgggactacaggtgcctgccaccatgctcagctaatttttgtatttttagtagagatggggtttcaccatgttggtcaggttggcctcgaactcctgatctcaggtgatccacctgcctcggcttctcaaagtgctgggattccaggcatgagccaccatgcctggccgcatgtgtcattttcttgggtgttatactgatcgtatatttgcaggtttgcttttgtgacagacttcttctgggggaaaaaaagtatccttctatctttttacttttgtccagttccaggtatccctgtttttttcttcactcttccttccttgttcatgggagtttttcttgaggacttcaagcccagcttcggagaatcctggttgtgtcatctcatctcctttctgctctcttctctacctagcctttccaccctcacacctcctggggtctgaaaatggaaagataagggtgtttccctgaaagttgctcttctgtgtggggatgacaggttctaaagactcttttctggtccctgccctcattgccatgattaatcagttaagtggcccgaggttttataacagcacagtcttaaaatgcttctcccaagtttaatttctctccatttgaccttttaaggatgtgaattggctttaagcagtagactccctttagtacggcgctgtgagcctctcagtgaatctgctacatccattccacccacgggtctggaaacttgtctgtttacctttccctaaaaacctaagatatatttttaagaagtgccttgtaacttttcatatagcctttcccctactttgggtagactgtttcttacaggaatttggtagatctttccaaagagaattctgtatctgtatttttaaagcataaatcctgtcaactttggaggagaactgatttggcttgagttttctcagacatgggaacttttgacctaagtttgtattttacattgttgaaagggaactccgggatcccagaaaacatatggactgcaattgggtaaagtttctgttccagaaatgcctcttctggacatttcatacaaatggaaacatgcagcatgtagtaatttatgacagcttctttcacttagcatgaggttttcaaagttcattgatgtggtagcatttgtcagtactctgtgcctttttatggctgaataatattttatcatatggatttaccacattttatcattttatttatccatcatcagttgattgacatttgagttgcttctactttttgagtattatcaataattctgttatgaacattcttgtataattttttggtagacatttatcttcatatttcttggatatatacctaggagcagaattgctgcgtcagatggtaatgctgtttaaccttttcaggaactgtcagactgttctgaagtgggtacattattttacattccaaccagcagtgtatgagaattccagtttctccacatcctcatcaacagttgttattgtctgtcttttttattatattcatctgtaatgtgaagtgtttatctcattgtggttttgatttacatttccctgatggttgatgattttcaacatcttttcatatacttattagtcattatgtatcttctttggagaatgtctgttcagatcctttacctactttataattggtttatctttttaatattgaactgtaatagtttttaaaaaatatatcctaaatacaagtctcttatcagataatatgatttgcagatattttctgtcattctatgtactgtcttttcacattcttgatgatatacttttcagcccaaatgtttttaacttgatggaatacaatttattttttcttttgttgcttgtgctttcagtcatatttgtgaaaactttgcttatcccacattacaaagatttactatttctaagtgatttataattttaccacctacctttaggtctctgatccattttgagttaatttttatgtgcgaggagggagtctaacttgattcttttacatgtggatatttagttgtcccaggaccatttgttgaattaagtgcccagaacaagtacatctatatatagagaaagtagattagtggttgtcagagactgtaagaagtggggaattggagagtgactgcccataggtacaggcatgctttttggcattatgaaaatattctggaattaggtagtggtgatggttgcagaacttttggaatatggtaaaagacactgaaatatatgcttaaaaatggtgatttttgtgatatatgaattatactatagaactaataataacagtaataaagcaaggtgtctttccacatctccatgccttgtattttcatt

SEQ ID NO: 16660 - DNA, 1655 bp, Homo sapiens
tataaataaataaatagataaataaaaggtaatcattagcattttttcagttctgttggtatttgatttctatctcaaagatgatatgaggaatcttattaaagggttattataaatgtatggttttatgtattttgaattattctgtaaccaggtatttgtagatgcatagtgtatgtctttttccattggtaaaaattgatctatactgtggaaagatgaaactttattacttttctacaagctttttttcccttcttctcattgccttcccacattttaaagtcatagatctttagcatagaaaagatatagcagtagatgagtttgttttttaaaaaaagttatagtctgcttggtttaaccaaaagtaatttaaaaattaataccacattaaaaagctatttcaaaagcaatatgaaaaggaggattattttttattttaacatattatttgggctgggtgtggtggctcatgcctgtaatcccagctgaggcgggcagatcacttgaggccagtagttcgagaccagcctggccaacatggcaaaaacctttctctactaaaaatacaaaaattagccaggcatggtggtgtacgccagtattcccagctacttgggaggctgaggcatgagaattggttgagcctgggaggcggaggttgcagtgagcccagatcgtgccactgcactccagcctgggtgacagagtgagattctgtctcaacaacaacaacaaaaaagtattgtttgttaaaatggtaccttaattcactaactactgaaccattagtatgttctctccaaagctccctgagtttttctgagtatcagatttacttgagtatcaagtggcctggctttagtttataaatttacattaatcagctttgttactttaattaaagtattttgttacattttccctcataaacatggtaaaataaaatagcctgacatactaacttagttagtaacatatttactaacatagttttgtaaaaaactatgttagttttggaggccacacactgatctttatatgagattctatggccatattgttttcctggtagttatggaacctatttcctaaagtaaaatgtatttttgatcagtgattgtgcttttgaattgagcaggttacaattacagatgtgtgcttacttcatacaggtctagaattaaacataatactgtttatttctacctgatatatcaggatcaatcagatgaaatatgtaaggctttcttctgctaagggatagctttagaaataaggttgtgataaaccgcaagaggagcaatacattttgaggatgtcatagaactcatgctcttttgtttatgtattttagaaataattaaaattggccgggcacagtggctcatgcctgtaatcccagcactttgggaggccgaggcaggcggatcactaggtcaggagatcgagaccatcctggctaacacggtgaaaccctgtctctactaaaaatataaaaaattagctgggcgtggtggcaggcacctatagtcccacctactcgggaggctgaggcaggagaatggcaagaacccgagaggcagagtttgcagtgagccgagattgagccactgcactccagcttgggcgacagagcaagactccatctc

SEQ ID NO: 16661 - DNA, 1615 bp, Homo sapiens
gtatattctgcagagataaccaagtaaatgacatacagatagtcaatggctctgagtggctctactagctacatctttttatgttaataggttttttacttttttcagagaaaattatatccagcatttttaatctttagactaataacaccaggtagacacaaagctattcctggaacattgctttattatagataggaattccataaccaattacctcctatttgctagaacacactaacacaaatacataaaaaatacagactaaactataatagaaggcagttttctctggtgtttgtagcacctctcttctactaatttaaaatatcttcatcactgaggatgcctcctattaaaatgttatatctgagttatactaataactatgaaattaccaggtgtctctgcttgagtagttggaattaatttttttgcctcataactctggagacttctcagaaagtgtagctaaaggtttattcatcaaaatccccttctaatgaatcgactctgatgattctgctgttgtcagaatggatgttctaggaagttgtcatcacacttgaccgtaatgaaaatgctgccctggaccatctccccaaactatgtgtcctcagtattgtgggaagaacccacttcatgatttctaaccagggtagcctctggaagtacaaatgattgctgtaaaattatgaacagagcagcatcaggctttgctctgatgtatcttatgaagcctttctacttccaaatgaagactatgaagagaaccttgaaacaatgcccttctgggagctcattcagcaagcatattctgagggcatattctgttccactctctacgcatggaggattcttgtggtgaggaagacattcttcattggttttaaagagctcaccatttagcacagtcagccgctgagacaggactgctagataactacagaggttatgcattgcaccatttgtacacctcgtacaaccctatgaggtagccctcagggttcaaatggaatgcatctatattttgaatacagagtgatatataataacaagaaatcctggatgtctaattgactgtcttcccaaacagcatagcagattacctttttagtctcatcatttatgtgcagattatgaaacacatttattagtcaatagagtcccttcctgcatttatacattctcctcataactcagttgttctacttcacttccataaggctgacttgcaagtctgaatttatagttgtgttctctttcctaaatttagttcagttatctccctccataatttacatttaaatatcccactgtaacctaaaacatagcttcctttgttaatttccccgttgttacgaagaaaagtattattcctcagtaatttgggctcaaaatattaccctaatctttgactccttctgtcttcctcagtcccaagacacatcaaaggctgatcaaagttagccgggcatggtggtgggcacctgtaaccccagctactcaggaggctgaggcaggagactcacttgaacccgggaggcggaggttgcagtgagctgagatcacaccactacactccagcctgggtgacagagtgagactctgtctc

SEQ ID NO: 16662 - DNA, 1381 bp, Homo sapiens
  CDS (560)..(901)
ctttaccactctaatttttttttgtttgagtaaatgagagcaggccttctcagaggcagctgacatcagacagagacttcctttgcggcctctctggttctgttcctctcttccccgtagctggtatttgtagtgacacctgggagccacagatttgcttagcaacctttctccagggtgaacagggtattcacaactcctgaaccaaggcgtgtggctggtatcattttgtggggccagaacgcattgcgtggagaaattcagtgatgacctggtccccacgcctgctgctcagggccccatcaccctcgtgactgtcagtggtgctgcttcccacgtctcctaagagggcttcaggagaacgtagaacgaggtatctgtctcttcctttcggacctggcctttccatttggccatatgtcagaatttccagctgccctaggggcccaggaatctgtattttagttgctttccaaataattctgctgcccagctgtatttggagactatagccttaaatcagtgattccccgtcagtggtgactcatgaagagcttagatgtgggcctggtgtgtggttggtggcaaggggagtctttcagatcccttctgcttgttgctgttggtggcaggagcgtgcatgttatggtggctcaggcctaatcccatctgtttgggcatctcgcctgtctggaaaacaggtcccggagccatgcacaccaagctcctagggaaggcagagagcactccccgactcttaacaaagacatgtggaggtggacgtctgcccttaagcactcagggttcaagaaatgctgcaaagaacaagagctgcagccaccaggagatgcaggtgactcccatggaccagaaaaaggacagaaacatgacagaaaactggtagaagaaccaaagaggtttggcatttcacagggcacctgactctggagcccacagtcaccctcctcggggccctctccatcaacgtcatggatcaagttcctcctgatgaccaagccaccaaagagagctgatggttatgttcagttgactctgctgaggcagtcagggcagtgtgatctcctcctgggaattgctgtatttgaaatgattgaaataggctgggcgcagtggcttatgcctgtagtcccagcacttgggaggctgaggcgggcggatcacgaggtcaggagatcaagaccatcctggctaacgcggtgaaaccccgcctctactaaaaatacagaaaaattggccaggcgtggtggcaggtgcctgtggtcccagctactctggaggctgaggcagaagagtggcgtgagcctgggaggcggagcttgcagtgagccgagatcgcgccactagagtgagactccgtctc

SEQ ID NO: 16663 - protein, 114 aa, Homo sapiens
MWAWCVVGGKGSLSDPFCLLLLVAGACMLWWLRPNPICLGISPVWKTGPGAMHTKLLGKAESTPRLLTKTCGGGRLPLSTQGSRNAAKNKSCSHQEMQVTPMDQKKDRNMTENW

SEQ ID NO: 16664 - DNA, 1734 bp, Homo sapiens
  CDS (96)..(473)
gaaaaacaaaaagaatctttgttttaccccgaaagagaggcagaggcagaaagtcttcttctgctttttgcatctctaagaggctgaaaaagagaatggaagtgctggggcattttggccagggcagtaatggatatttggagttggcacttccctcagctagaggagtctcagtgtgtctgagaaaatggcagtcagccatccaggattttaggagcaacgccactgctctgtgccacatcagaaatcaggcatggccccaacctgaaggaacttgtagcttaatggggaagcacaccaagaataaaagagcctccagaacatgtggtgcctgtggtcctgagacagcaggaaatggctctcaggccagagttgctggaagaacccatgtggcaggatcggtgggaggcagttacagagggaaacgcccatcccagcaactaggggaggccgccactcctctcgtggatggatgatattcttgcttggggatgttgagacagctgcactctgcatagttcctgatttgcctctctactgctgatgaaaaacctctctttctctatagctgctgcttatattggaaggcttttggttattcagcacactcactcctgagcttatttcagtgatattccttggttatttcgaaacatggatgcttgtggcagatggagagcctgggtgtacacagatctgcctgtgttttgaaatgcataccatgttgccgtttgtttgattgattgatcttggaccacgaaagaaaattatactgacagcttccagggtagggggcagttgtagctttctgcagatgttgccaaatatattgggggtggggagcagcaaatgccatgtgttgctttttatgacataaggagggattccacccccatcccaataaaatcggtgctttgacaaaggagggttcccaggcagctaagagaacccagagtagatgatcctctttatctctggtttaacctgtgactaggattcttggtgtaagctcggcttttccacttatcctctaaccggaacaggcttctataatctctttgccttaaaataattatctgcatccctgtgtagagcaatcttaagcagctctccttgtttcttcagggaatgggaattcttttctaagtcgccccatcaaaggtactattggttttttacaacgccggcgtttgtgtatgtagtaaaagtattaacagcattaaaggcgatatttttaacatgtttatagatactacttgggggagggcagctaatgaaaccttcaagctctatgcagtccacagacgtgagctctgtagagttcgcagaggtgggtaagtacccagccagcacacccagttgaattcagccaggatttattgagttggcatcacagacgctgacagcctccaagtgaaaacccttctcttgaatatgtacaggtttcccatccacataccaagctgatgaggatcccatcgttcttccccagtcctgaggagcccccctcgccatctgcaccttccatagccaaatcagggtcattggactcagaactttcagtgtccccaaaaaggaacagcatctctcggacacacaaagataaggggccttttcacatactgagttcaaccagccagacaaacaaaggaccagaagggcagagccaggcccctgcgtccacctctgcctctacccgcctgtttgggttaacaaagccaaaggaaaagaagg

SEQ ID NO: 16665 - protein, 126 aa, Homo sapiens
MEVLGHFGQGSNGYLELALPSARGVSVCLRKWQSAIQDFRSNATALCHIRNQAWPQPEGTCSLMGKHTKNKRASRTCGACGPETAGNGSQARVAGRTHVAGSVGGSYRGKRPSQQLGEAATPLVDG

SEQ ID NO: 16666 - DNA, 1772 bp, Homo sapiens
cagttgctaacatatctggttgtttccccattaataatgctaagattgacacctggatttagggggccatcatatttatttaaaattccttcaataattcaagcttattcaagctgcgagacttgcttaaagataagtgaaatatctaatcacaagggaagtctgttttcaaactatataaacaataacaggagtcataacagttgttttcttagaactgaatacctaacaattctgcagctctttcctcggtattttattataagcagattatatcttaattgttcccctttgttttcaaaggtttttctcttctttgcgtgaatcagtttatataaaaacatatatattcttattttcagaggtattctgctctgaagaacggttttactttataaggcatcagttccctctaatattagaaccttacaaagccacagcactttatatgttgcaaagcaccctctccatgaaaattggttctagttgatgcaacagacaaaacccgcaaatcacagtggcttaacactacagagagttatttcttgctcatgctagatttgatgtagctctcctgttggcatcactcttttctgagtagtgactcctggtcatgggctgtttctattatgtagctacactgattgctacacggggcttccatgccatgatgaagtgagaaaagagagcctcaggattcattagggtgttttcaggcttacatccctgacagccataccccaggcatgtgattctacggagaggctggaaaacgtagagtagctcatgatttcagtgagcactccagtctctgccacacctgcctttgtcatgttagcttatactttcctatcatcaaggatgatccatagaaggcaaagggttgaaaaggttgaacttcaccaatgcattatttcttccatttttgtgtttttatttttagaaaatcatgtgtgctctaacattgtagagcagcctttttcccttgacctcttcagcttgaccccttgctcctcctttttatatctgagatagtttatcttggtaattcatatcttgtctgttttcatagtgtattcctttctgcatatatagagaaatatgctgatgtacctatagcgggagttgtcttcataatggctgttcataaagataaagtcatgtttacatgtattcagctttgtctttctagttagtattaaattgtcctcaagctaaactttttgtcttgtttaaagttacatttggctgggcgtggtggctcatgccttggcctccctaaatgctgggattacaggcttgaggcaccatgcctggcctaaagtgtcagtaattctgatttcggttttctcttttagaagttttgatttccacagacttacaaagctaaggaagttttatgtccttgctctggctacactgcagtgttactgaatatcacctgcacaacctttactgcttgcagttttttttttcctgttgctttgtacatgatccgttattcaaatggccttataggcattcaataaaggtgaaatgttaaatacaaaatcacttgtctattaaattttattcaaggttctatataagatctgataaatggaactttgtgatggaaatgttttatatggtagccactagtcacatatagctattgaacctttgaatcatggctagttttagagttttatattttaatttaaattaaatagacgtgtctagtggcaccatattgtacaatgcagttctcattcaataaatcttaagtactt

SEQ ID NO: 16667 - DNA, 2603 bp, Homo sapiens
tcacttttggcctaaatcagctcttgcaccttaggctgtttaaaaaatatgatgtcaattggaaagcatcccatttggtgctgtttctactttttttatttgaagtatcctgacgcagttgttttctggtgagtagaccatctgtcctaaatatatccaataccagtttgcaaagtctttgtcaggtgcatcctgcatagaagctaaataaatacttttttaaataataaatagaggcgagagatattttgaaggtacatcagtgggatttgctgactgattgagtaagagagttttcatagaggaaaaggagatagtagtcatcactggagctaagatttctgacccgtgtgcttcaacatatattttagatttgaaatatgtaatttttgcagtagtaaagataaaagggaaaaattcccagtgccgctcatatttggctcgtgggtctctcgtgctctttgctgtggcaccatcaggtgtctccggattctcaagctatcttcctgcctttgatgtatttcaggaaccttttattattagcatggggacgcttttcagggctctcctgagttgctgtgggtccacccaatttcttgtttatcccagcagcaccggcctttgacctcgccatccccctggcctggctttgggaggccctgtcagcccatacctctgactatgacggggttgcatggggctgccgctggctgtaaatctgaagagcaagggcctagattgaccctgttccccaagctttctgcaaatcttacattctagtctggttgctaaaattcctttatcatcagccaaggagtgctattcaggagggctgcctaattaatatattacccataaacataacagcaactctttttcgagtacttgctttgcatccttttaattgtatcatttttcatctttacgtcagcctagcaaactaggtattgctgtcccctacttttgcagatcaagaaactgagtctcaaagaggtaatgaaactgttaaaatcttgcatttgaaatgtgacaaagttgtgctcccagccagagctgcccgcctccgatacagcagtctttatacttttctctgctgctttgagccagcaggtgttaggttaactggttaataatccattaccactttcagtcatgaggtgcagtggaaagacctctggggtgagtcatagggtagactctattctctctgtctaaggcgtgtgacccctgcaagcctcagttacttcatctataaattgggaatttataccttaaaggaatataaagaaagtgtaatgaggaaatatacatggaaaacattttttaactcttaaagagtaatgtaaaagatctgctagtaacattcaaaggaatttcagagctgggaagtagctgggctgggactcaaacttggtcttcatactcaacattgggttcctctgactgcatcaggctgggccaagatgagcattgccatggggccatccatattcttggcagagtaggtgaaaattttgtttgcttgacaacaccaattaactagatatttgtctggggttgggaagaaataacagctgttggtcttattcacactttcctcaatctgttaaggaatgaatttgtcttatttaaccagtggtttcagcatggctgtttgtttttgtcttttataccattagccatggcatgtatttgagaattagttttttagtgtaattctaaagtccgatggaggacccctctctccatgaccctggaacctcccagatgtgcttcacctccgacttgtttctgttccagatctagtagggctgccaggaagcggagtctgtgaattgagccattggagaagactgtccaggaccttctttgatgtggtttctcattctcgcagaattattttgtcttatgatcacagtgatgtaggctatttattatttgttagttccaactctgcgtgaggtaataaatgttgttggcagaaggcttgcttaaatgggtgtgtatcagtaaggactcaggagtagctaaaagtttgctgatactatgaactgtgctgttcatggggttcctttgtgaaaccttgttgatttttattgactagtcaacccatatgagggtcttaaaggtttaccgtcctctgagcagtagagctcttgcccctgacacagactctctcacctccttttctagctcttccactcactagctaagtggccttcagcaagtttcttaccttttctcacttcaaataatggagattataaaagcacctaccacacaggactcttatgtggaccaagtgattgacacatgtaaagcacttataacagtctctgacatgcatgatacacacaatgaacacatcgtacctccaattatcatagccacaatatttcagtgtgttcctttcaagcctcctttggaattgatgttatttctcatcgtctagactatgttttaatagatgaacaactgcgttcatcttttataactctagaattacaaaaattggtttttaaaaactatcactatatttttaatccttgggttataccttttgaaataagagttgtgttcaatactatatctctctatatttg

SEQ ID NO: 16668 - DNA, 2187 bp, Homo sapiens
ttcagattgcaaagttatataagaaatttcacaaaggggaaaacacaaaactggtacaactaagtgactgggaaagatataaaatcatgtagactcacttcacccacaaaatggtaactcctgaattaaacttcatgtgttttatttaggctttgtcaagttagctatggttgtattaaagcagattgtttgattttgataaatagttttccttaatacatgggaaaatcgagttgtgtgaataaagaaatataaaatagcttttactcagttgtcccatttgtcagcattgatgggtaataaagattagtgttactttttcttctctagtgtagatattttctcaaaattgtgtgtttgctattgttttatttttgaaggggaaaaaggtatacattttatagctactaggagttcaaatacagtaattagaaaggacacacgaattttgaaatagtattttatgcctcttgatctcaggtacaatacacgagatgaagcagttaaatagcaaagcaagacagaagggtcagagaattaaagtaagtgttttctatatattgcatctgtgttcccattaatctctgttttgttatgtaactgctccttctgaatgttctgaatgtgaagaaaactatgagtaagaaaaagggtgtgttttaaagttaggtttaaataaagccagaagagtaaaatgtttttactcttagttctgtttgaaacagcacctgcctataaattataacctaaatgtttttggataagaaaaaattgggttgtgatgatgtaagcacctttaaatctcttgctagcagatatttaaagtgaaagaaagcacatactgatcagattgcccatgtttccattttaagacaattaaagcttctgtttttttcagactagcctttcttcctggggacaacacttactgagaggctttgctgtggatctttttggaaataaccttcatgtcaatttctcaccttactgtgattaactttctaggcccatgaaataacatcttgatcaggactgatctaatctttatagttttcttttttaatcttctaactgttcagattttaaagttaacaagtaaaaatcaaagcatattaatctttgaatctttatgtccctttttgtaattgttgaggtctttcttgacagcctgtttaatattttttccctaagtttagagattgcttatttgtgggaataaaaagtagggtgacacttttttgtacccacttgggtttttaaattaataacaatgaaatcataaccagcacttgtcacaatttagtttacacactttcatgttacctgctttgatcttcacacgagctcaccaagaagccatttttaaaatcttctccattttagaggtgacagaattgaagctcagaaaaggtagataacttatcagatattaaatgcttaggactttatccaggctgtctctaaattactttccctttttactgtgttgcatttgccaaattataaaagagacccccagaacagttatttctacttgtgcaggacttgaaggacagagtcactagaagtttttttgtttgtttgtttgttttttgagacggagtctcgctgtgtcgcccaggctggagtacggtggcgcaatcttggctcactgcaagctctgcctcctgggttcatgccattctcctgcctcagcctcccgagtagctgggactacaggcgcccaccaccactcctggctaatttttttgtatttttagtagagacagggtttcaccgtgttagccaggatggtctcgatctcctgacctcatgatccgcctgtctcgtcctcccaaagtgctgggattacaggcatgagccaccacgcccggccttagaagtttcaggataacggtactgccatcttacttcttataaaagcagtaattcgtattttatgtattaaaataaatgagccataggatgaatcagacaggtttgcttctagttttcaccactctatttgaccttggacaagagagttaattcccgagcctcagatttctcatctccaaagagctttttctcataggaagtgtgcaagaattaatagaggaagttttatacagtatttagctcatatagaaatctatacattgttcttctttttacattcccatgagaaatttcatgcccattttgatt

SEQ ID NO: 16669 - DNA, 2407 bp, Homo sapiens
tcggactctgtgtcctcaaacagccctttccactttgtaccttgttgtgccagatcatacctctagggaattgttgagaaagcctgattgctgtttaaaggtacaatggaagtcttgagtttgagaagtaatgttgactttgcccttccttctccctagtgctgtgatgggctgtttcctgatttggtttcatatgctcctcacaacaaccctgtgaggtggtccgttggcagaagctggtatgactggcagttgtctcgctagaggaaccttctacttcataccataattaaacggcttctaaaataatatgatgtctttaaattttaagtctggcattatttgtattagctgtttttttaactttattattaaagaatttctaaccataatatttagagaaagagtggtagagttaacctcgttacccaatactttcttccctttccttttataaaaacactgcatacggttttttgtttttttgtttttttgttttttttttaagagacagggttgccctgtcacccaggctggcctcaaggaatcttcctgcctcagcctcctgagctgggactgtaggtacaagccaccatgcctggctcacaatacagtttttttatctgaagcactcagtttacttttttgctcttttatgtacaaatgaatataaagttgatatcatcctctgaccaattaaaacattcttttcagatattgttaacccgtggcctggcaagaccccgtccttgtctatccaaaggcactttaacagcagctttttctctagcgttacggtgagtaagaaaccatagctgaggtgttggcatgttcttgaatgcttcctcctcttggtttttctttctctcgttactggtattaggtatagacttgcccattttgtcagaatttatgggaagcattgttcttaatgaaagtgagcacatttgtgactgctcaaactttttcttaatcttcagtcttgaatatttcttaatcttcagccctgaatattattgcagtgtgatctttggaaactattcaaaatgaatttcttttatctaaaagaggccaagatgcaatcatttttccttttgaagttttaattgacaaaacaaaaaacctaggagccaggagaagcccagcaaagggcagggtgagaggattaaggaaataatgtgaatacgcatgtaaaatgttagaatttggaggaccagagaagaggtgatatttgccttcacttagtttggagatgtcaggtactgaagaagctaagttaattccttatggaaattacacctgcaattctgagaattgccaaatgtaaaacactatgcttgttcataggtccagaacatgtttaaactgtcaaggggaacactagcttggggagatgttaataaaagatcctggaaggaagagtgtcatggtggaaccagcttggtgaaagctgcctgctctgcccccatctgtggatctacagtacaccttcatgctgagagctctgagaagtgctgctatgctagcaggaccccatgggcttatttaacccggggttggcccaaacgtatctgagcatggaatacccctgccttgttttttggatgccgttgatatcccatgaaatcattttccatggaaaacctatttggaaaatgatgggctagagcatgggttggccaaattttctggaaagagccggataaatatttcaactctatgggccatacagcctctgtcacaaccactctgccattgcatcttgaaagcagtcgtagattgtacatacacaaatgagcatgactgtgttccagtaaaactttatttacaaaaataggccatagtttataaacacctggtctagactgtgctttccactaaccactagccacagggggctgtttaaatgaaaattcatttaagttaaataaaatgaagaattcacttcctcagttgcattagccacatttcaaatgctcagcggccacatgtaactagtagcaattgtgtgggacagcacagatatagaaaacttccagcatcacagaaagttctgttggacaaggctgacctagagcaggtctgtccgatggaaacacagttagagccacatttaaaaagccaaaagaggccaggcacggcggcccatgcctgtaatcccggcactttgggagactgaggtgggcagatcattttgagctcaggagttcaagaccagtctgggcaacatggccaaaccttgtctctacaaaaaatacaaacattagctgggcatggtgccatgtgcctgtggttccagctactcaggagtctgaggtgggaggatcactggagccagggaagtcaaggctgcagcgagccgtgattgagcttctccagcctggatgacagggtgatacctggtctc

SEQ ID NO: 16670 - DNA, 2139 bp, Homo sapiens
aaatatttgcatacagacatttgaggctgctctgtatattacaggcaagaactggaaactgttcggctgcagggtgacagctaactagattgtggtttattaggggaatgagcctttctttgtgtatgacaactatgaaaactattgagaagaaatagttacgtgatacagtcataatcctcaaaaacggagaatcaggaattatgatcaaatagtgatagtaacaaggaaaacatctgtctaaataattactgagtagaaataggttcggaatttgtaaatagtcattaatttgggagattggggtttttttgttttgttttttgtttgtttttcattattttgtgctattattcatacgtgtacatttctacttcagtttttattatccattacataacatacatgcttgattatttgcttcaaggaaatacacctttataagtaatactcaataactactgggtttgagaatgaaggtgtcagaacgaatgagattgtcctatgaaagaagaggcaggagccagggaggaggatcccacccggccggggctcagccaggaggcagggccattggggcagggtggcagtccaaggaaccgctctgggaaggtttgcaaaggtcggggtcccccctgccaggtgatcgaattatcgtggagtgtctggaaggcgggggaagttttgttgagttcaccaaataactcagaccaactggaaaccaagtggagtttctacaggaccaactagaatagggatcagctacatgggggcggggggaggggggcagggaacggtgtctgtcttcattgcagctctgtctgcagagccagcactgtgatacctcatagtaggtgctcagtgaatgtctgtgaagtgaattactatctagacaaggatgagactggtatgactctccaaagctttcccacctccaaaacctcggcttgtggggaatctccagtagggggcactgtggacacggttcgcatctgcctcccaaggctgggctccgcgtcaaaaaaaaaaaaaaaatgagactgagccaggtgcagtggtcactcctgttatctcagcactttgcgtggccaaggcgggaggatgtcttgaggccaggagttcaagactaggctgggcaacatagcaagaccccatctctacaaaaaaatttttaaattagccagaggtggtggcatgcacccgtagtcccagctgctcgggaggctgaggcagaagattgctcgagcccaggagttcaaggctgcagtgagctctgattgtgccactgcactccagcctgagtgacagagcaaaacctggtttcctaagggggggataaaagagggagagatgagatcggggtgtcccgcttctgtgcatgtggagggggtaactgggaaccgtgtactgtaggggatcgcacaccttggggtggaaacagcagctctccggagttgcatgggagccatgggcagtggtcctggctggtgaaatgattctagccacgtggcccacccagggggcaaaacaatagaaaccttcagaaatgaaacgtcacctggctgcaagaagatagtcccacaggcgccctagagatggggatgccaagtggcttctcgggaagctgtaagaatccacagggcattgtaagatggagggaaatattaagttttcttcgtaaagaggtgaggggggcgagagcagcaaaggacactggaaaatgagaagcatggatgggaagtgttgcattgagcataatttggaggtaaaatctccaacaccgtaactgagtggcctggggacctgatagaaagccttgctcaggactaaggcagagttcccagttatatcgcagatacaaagagaccaggaacacgcttgtaatcacagcacttagggaggctgaggcgggtggatgacctgaggtcaggagttcgagaccagcctagccaacatggtgaaacccccatctctactaaaaatacaaaaattagccaggcgtggtggcacatgcctgtaatcccagctactcaggaggctgaggtgggagaatcgcttgagcccgggaggcaggggttgcagcgagctgagatcgtaccactgcactccagcctgggcaacagagtgagaccctgtctc

SEQ ID NO: 16671 - DNA, 2288 bp, Homo sapiens
atcgagacctttaatttttcggggagagcagctgaggccgtgtggaaaattagtggagagctgacaagtgtctgggctcctggcccaggggtccgtggtccagcacgttgtgcgttcagtgggaagcaaagggcttgcccgggattacctgccccagcccctaggtgggttgtgctccctgcagctgccatcggcccgctttgcttcgtcctggcagatgcccagtgattgtccccgagcaagtgccagggttgggctgagctgctatgacagggaggcccagggagttctgctcagggagccaaagggaacagccagatcctgaatgttctatgttcacctgccccagccccacccaccctggcccactccacaggcccctgaccatggtcactcacggagagggatggaggagaaggtggttgaactgagtactgagaacccagaggacagagcccacagcttccaagcaggaaaagggacctctctgaaaaatctggataaccagaattatcacagcaccctctcattcccagcgcgtccttctgagctcggaccttgagcatttactgggtttctttttgaggaagagggaaagtgacaaaggacaaaacaatgcaaatcttcatgactgaagacgatcaaagactccctggagcgagaaaacagttactgccagaagcagaatggaagagccaaaaagtacacaaaatggacgccataaattctgaaataaaagtgtatgatgtgttctgagtcactgtagaagtcatgcatttattatcaagatagaaaagagcagagaatgacgtggacattggtcctcggagaggctgcgtaggtggtgcggtccccgggggattctggatgctggtcttttgaccgtggcggcagcctcgcgcctgcccggatggctccatccagacatttggcaaggctgtcatctgctcttgggtcctttttcaagctgatttcctgcctccccaagaggaggtttgagccccattctgccttggaaataaatcctgacagatgtgcacagcatatttgcagggaatttgcaggcctcgattattgggggaatcagagcccattccacaccgagccccatccacgtggctgagcaacacccctgtgtcccctgtatctgtctcactggctgtctttctgccagtttcttaaagaaccacaccattactgcgtttgccgttcgaagcgttgtcccaacaatgcagatggttctgacaagggctctatatgctggcagaagggagcttccaaccttttaacttgaggaaaatgaatctctgagaggcttgagagtgttgccaggtggagcttttcaggagacaggggtcttgagcccaggacacctaactatcgagttttcactaggagacttagtggtggctttcatgaggccagtcgttctcaaggaagggctgggggccatcagcaatgtctggagacatttttgattctcacagcttggtggggactgctattggtatcccatgggtggaggccagggatgccaccgaacatcctacaatgcacagggcagccccccacaaataagaattatccagccccaaaatgccaatagtgccgaggtcaggggaccctgtgctggccatcctatctctgattctgaaactatgcatgctttccacttttccccatttgtgagtcattgagtaaattaaagctcttctgagcagcagcagtgatcatggtcactgccctgcgttcaaataatgcgagctgaggacagtgatctgcaactcccagcatgtcatgtggtctcttagaaatccatgtgactgtttccaccatcttgggcatttgtggggacccccagactggagggagaaagccctacaaagtggatgggagtgtggggctgaacttttccctacccttaactttgtgtctctgggacctccagggacctggcccctcaccaatgcatatgaagagtatgcttggggaagagcttaggaatggggtgagcatgggagtgctgggtagcagcctttgagcaaatctgcatcttctcttatttctgacctttttccatgtgcccagtcctatttctgccagttgaaggcatactaatattctttatactatttaatcttttgcagaaaccttactattataacttgctactctccagataccaattcttcatgccgagagcatcggaaatgtttttgtgtcttactgatgttttcatgatcaacttgtaaatgtaagcagttgacttcataaaaggtattttaact

SEQ ID NO: 16672 - DNA, 2515 bp, Homo sapiens
ctggagagagtgtagatggaggagaaaagagtggtctcgaaaccaagctctgggagtggttggaggagaatggaccagtgaagaaggctgggtgagaagaaatcaaggagcctgtgctatcgtggaaatcaagaaaggaaagtgtgtcaaggaggagtattcacttttgttaaatacttccgagacattcaataagaaatgctaacactgttttgttataaacaactgaaattaattttagctgtgaaaaaattaggtcctaaagtaaataaaaagatagtaatggggacataaaataggctgtgaaatgaatttaaaatgccaaaagttacaaatcccaaagacataacccttgctctggatgtgctacagatcttggctgtggacattctaaaagccattagaaagccttcagtcacttccagtattcacaatgaccataaagtaaaaggggtccccaagaccaccccaggctagatgatttgctgggaggactcacaggactcaatatgttagtcatactcacaagtaagatttactagagtgagaggaactagagcaaagtcagcaaaaggaaaagacatgtggggtgaagtctgcaggaaaccaggcacaagcttccaagacctctcctgtgtgtgtctgccacaggacagtccattcctgtggcagtgagttatgacagcatgtgtgaaatgtgttctgccagggaagctcgtaagagactccgtgggcaggtttttactggggctggtcatggaggcaccctctgcccggcatgtaccaaaatcccaggctcacagaaggaaagcggattcagcataaactgcactgtgtgcataaacagtttaaacatggtgagctgctctcattagtctgagaatggtgggaaccttccggaaatctgggttcccagacaccagccacggctagccttgcaagcaggccttttaaagccgtctcgggactgctatgtgaactctgttttttgtaaacaggccaaagcccaaggaaaatacaagcatagttggcactatgactacatcagaatttctctggaatgggcatttgtttaataaactgtttctaacatattctaaatcatttggatagctagtaagctaaaatttttgtctgtatgtattgggaggcagtctagcatataataaaataatcatagactgtgaaatttgacaaatatggcttctctagtcatggctcagctgcatactctctctgtacctccatttctggtaataaaacctaccattttgaagattcagtgatatatgcatatagtacctagaatagtgactgacacgtggtggccattcagaaatactggtggcattgatgttaataattgcaacaagagttgttttattattgtctttcttgtgttagacatgccattacttttcctggattaatcgattgtaatatccactctcctgtattttcactaaatggctttcagtttttcaattaaactttcagttgaacagtatcagaggcattttaataaaaaattttactgagcttgattagttgatgagaagtaaattgctcgtttttgattaccacattaactctttctggccattagggtaccatttagtaaattacttctctttttgtacagtactcaaaatgttacccaagtgaccagaaagagttaataatgcaccaacaggctgaacacttgactacctccttactattagatcagtctcattatattaaatgtttcccttcctataattgtcattttctttaaaaaatgaaatattggatacagttatttatttttaatagaccttataagctcaatgaaaagtatgctgagttcactcatataccttctaaggggatttaaagtatcggtactcactatataatatgcaaaatcaatccgatgtggataataaatgcacctttcacagtgcgcaagaagggcattatttcccaagggtacaagtgattccccgattatgatctgagtactaaggagtcatattattatgcctccctaagtgcttgagcactaaagagagttgtgcctcatggcattgtagcaggtaaactttcatgtgggcaggaatcctgccttttaaatgtatacattatcagtactcctgtggatgtgtttttatggctaattctaatacagcttttaattattcaggagtactctttactttcttatgaataggggtctgcaatctattcttaaaattacatcttttgctgggcacggtggctcatgcctgtagtcccaagcactttgagaggctgaggtgggaggattgctttagcccaggagtttaagactagccagagcaatattgagacccctgtctctacagaaaatttaaaaatcagccaggcatggtggtgcatgcctgtagtcccaactaatgtggaaggatcacttgagcccaggaagtcgaggctgcagtgagccgtgatcacaccactgcactcctgcctgggcaatagaggaagaccctatctc

SEQ ID NO: 16673 - DNA, 2460 bp, Homo sapiens
  CDS (935)..(1378)
agcaataaaacaagtcatatgaatgttttggtttcccagtgcatataaagttttgtttacactatactgtagtctatttgggtgcaatggcattatgtctaaaaacaatgtaaataccttaattaaaaaatactatattgctaaaagatgctaccaatcatcgctgagccttcagtgagtagtaatctttatgctggcagagggccttgccttgatgttgatagctgctgactgatcagaatgtgtttggtgaagcttgggctggctgcagcaattttgtaagacaacaatgaagtttgcctccttgatggattcttcctttcacgaaagatttctccatagcatgccatgctgtttgatagggttttacccacagtaaatcttctttcaaaattggagttgatcctctcgaatcctgctgctgccttatcaacaaagtttatagaattttctaaaccctttgttgtcatttcaacaaattttcacaacatcttcgccaggagtagattccaggtcaagaaaccactttctttatttaaccataagaagcaactgctcattcattgaagttttatcatgagactgcagcaagtcaggcacatcttgaggctccacttattctaattctcttgctgttgctaccatatctgcagttacttcttcctctgaagtcttgaacccctcaaagttattcatgagggttaaaatcaacttcttccaaacttctgttaatgttgctatttttacttcctcccatgaatcatactattattattattatttttcttttttttgagacagagtcttgctctgtttcccctggctggagtgcactgtcatgcttatggcttactgcagcctcaactgggcccaagtgatccttgcaagtagctgggtctacacctgagtttttttttaaaaactttttatagagatggagtctccctatattgcccaggctggtctcaaacttctgggctcaagggatccacctgccttggcctcccaaagaactgagattacagacatgagccactgttcctggccacaaatgttcctaatgacatctagcatggtgaattatttccagaaggtttttaatttactttgccaaggtccatcagaagaatcactatccatggcagctatagccttaccaaatatatttcttatgaaacttgaaagtcaaaattacttattgatccatgggctgctgaatggtggctgtgtcagcaggcatgaaaacaacattcatctccttgtacatccccatcagagttctgaggtaacattgtcaatgaggagtaatatttcaaaggatttttttttctgggcagtaggtctcaagagtggacttaaaatactcaccaaaccatgctgaaaacagatatgctatcatttaagctttcttgtttcatttctagatgaagggcagtaggattttggaaatggtcagtgaccattggcttcaacttgaagttaccagtggcattagctcctaacaagggagtcagcctgccctttgaagctttaaagccgggcattgacttttgctctctagctatcaaatccctgtatggcttcttccaacagaaagctgatttgtatacactgaaaatccatacactgtttagtgacttccttaatgatctcagctagatcctttgaatatcttgctgtaacttctgcttgcgtttttatgctatagagatggcttttttccccttaaacctcatgaaccaacctctgctaatttcccacttttcttttgcagctccctcacctctctcagctcgcaaagaattgaagagagttagggccttgctctgggttaggctttggctcaagagcatgttatggctggtttaatcactcaaacttactccatatcaacagtaagacttttgttttcttaccattcatgtgttcactggaggagcaattttaattttctttgaaaacttttcttttgcatttacaacttggctgtttggtgcaagaggcccagtttttggcccattttggctttctacatgccttcctcactaggcttaatcatttctggcttttgatttaatgtaagagacatgcaactctttctttcaaacttgaacacttaaagcccattgtagagttattaattggcctaatttcagtagtattatgtctcagggaatagggagtccccgagagagatggaagaatggctggttggtggaacagttcacaacatttatggatgcagtttgccatctgatatgggccccaatataattataatagtaacatcaaagatcccggtcacaagtcactataacaaatataataatagtgaaaaagcttgaagtattttgagcattatcaatatgtgacacagataaatgaagtgtgtacatactattggaaaaattgtgccgatagacttgctggatgcagggttaccacaaaccttcaatttgc

SEQ ID NO: 16674 - protein, 148 aa, Homo sapiens [sequence omitted]

SEQ ID NO: 16675 - DNA, 2485 bp, Homo sapiens
acttaagaggagctccataaatcatctaattccaccattcatgttaccaagaagcccaagaaaaggaggcagtttaccagaagacgtataggaagtgaataacccagtggtcttttatctttgtctgtactttctctttaggtgactgtcttcctttccttggctttagctacagatgaaattttatctctatcctagaactctttcctgagttccttacatatattgccaactgactacctgacatttccacttagatttgtagtagacatctcaaacccaacatatgtgaatcagaattattgctatcccactgccactctcattctgcttctttagtctttcgcttctaagtaaaagacacctgcttcccttaccaacccccttttgtgtggctctccccagatcactgggacccagctccactggctgaattttccaccctttttgctcctgtgatctggaatggtcttcaattggctagctcattcattcttttgatcttagcttaaatgttacttccaaaaaaggaatgcttattacctattttaaagtaggttccccctctctttattttcacatggtaccctgatttttccttcatagcatttaccataatttttatgtttgtccatttgtttaaaacatgcctctctcttccgctagaccgtaagcttcaagaatgcaggcaccatgccagttttgttcacgactataaagccaggacctacacatagtaggtactcagtaatttcttgttgaatgaaaaacaggttagtgccagggcctacacatagcaggtactctgtaatttgttgctgaatgaaaaacaggttagttgtagagctagagctcatgactccctcagctcctagagcactgtactttcattaacaagtgctattaaccttcccctctttgttctttgctgacatagtacatgaaaaggctctaggaggatgtcctggcttgaaaccttaacagtcctgcctgcctcatgagaaagacatagggttagtttctagcacatcatgaaccaatcaatactttggctattcaggggtcccttggtctagttcagagcaatattccttttgcttaaaaattttttctaaattctcaaccattgctagtgaaagtataaattagtaaaaccactttggaaaataactggtcattgtctggtaagattgcacatgtacctaatccatggtccaacagtttctctcctaccatagagaaattaagttttgctcatgtgtaccaagaaacatgtgcaagattatttataggggcattgttcataatatttgaagaagaaacttaattcaaatgtccactttgcaattattatataggctgagtgcagtggctcatacctgtagtcctagcactttgggaggctgaggccagaagatcatgtgagcccaggagttacagactgcagtgagctatgattgcactgatgcactccagcatgggcaagagcaagaccttgtttctaaaaaatagctagtggtatattcatattctggaatagtgtaaaaaatgaaaaactgaagataaatatatgaagacaagtcctcaaaatacttctgaatgaaaaaaattgcaaacatgaatctcaaaaacatgctgagtgggccgggcatggtagctcatgccggtaatcccagcacttagggaggccgagttgggcagataacacttgaggtcaggagttcgagaccagaccagccaacatggtgaaacccaatctctactaaaaatacaagaaaaaaatcctaactactcgggacgctgaggtaggagaatcccttgaacccaggtggcagaggttgtagtaagctgagatcaaaccactgcactccagcctgggtgacagagcgagactctgtctcaccaaaaacaaaaaaaccatgctgagtgaagaaagccaaaatgccgttcacaagagaatatgtaccatgtgcttccaccccatttatatgaaattctagaacaggcagaactgtaaaagagtacatcatgttgcctgggctgggagaggggagatttccaggtgatgaaaatattctttactttgattggcgtggtggtgaagggggtatgttcatttgtcaaactcatcaatttatatacataaaatgaatgcatttattgtatgtaaattcaacctcaataaagtatatttgaaaaattttgctgggtgcggtggctaacgcctgtaatcccagcactttgggaggctgaggcaggtggatcacctgaggtcaggagttcaagaccagcctggccaacacggtgaaaccccgactgtactaaaaatgcaaaaaaaattagctgggcgtggcggtgtgtgcctgtaatcccagctactcaggaggctgaggcaggagaatcacttgagccccggcggaggttgcagtgagcagagatcacaccattgcactccagcctgggtgacagagtgagtctctgtatc

SEQ ID NO: 16676 - DNA, 2288 bp, Homo sapiens
atgctatataaaattttcttgaaatataattggtgatgacactggcattttcctttgttgtcataatcaggaacaaggggacaagaaattacagtgcgtggatcagaaaccagtcactgcttcactggcctttcaccagacactgattatggcgtcactgtttttgtgcagacaccaaatctcgagggaccaggagtctctgttaaagaacataccagtaagtttttgaggaatctggaaagctttcataaggctttagaatagaatgctctaggtaaggaagacttaagtgaatcctgtgcaggtacctctccgtaggggtagcaataatgatgggatgatggcagattcctgaatgtggagtctaaagctggttcaggacctttttctgtagcaatttgcaagttgtccctgttattgagttggtgctactttgaggaagggctaaaggagggagagatggctctcgctgagaaggtgaattcatattagtgacttttactcatttgaccctatctgaaggccttacattttccctttagatctttattttctgtagctgtagtggatgttgaatgactaccagtgacatcaatttggatggaataaaatccccagcatgtcagtaccgatgacaatggtgtctcattttgtacaacttgatttggtatccaggatttaaattgctcttaaaatttactttctgggatatcaaatgtgcacatggtgtgtttttataattattatttttaaattttagctgtgaaaccaacagaagcccctacagagccacccacacctcctccccctcccaccattccaccagcccgggatggtaagtacagctaaataggcaatacgttcagctgatagggagttacagacttcttatttacgctgcatgtgcatcatttacaattaatatagaacatttctgatctattattgctgctgaagagtttttagattgaaagaaaaggtaaccagtaatttgtttctctccatctctgggcacattttggtgtgaataaaatcagtcataaattattccagatcttcagctggaagtctgtttcctcagttttacagatttaggtcttccatggtccatagttacatggtgggcatttctttctgctagctgctggcatcagtaagcgctgtgaacccttttggctatatttgcgaccgaagccctgaggctgttggctttaaaattcctggtgtccaacctgagaagttccctggattatacaatgctaaaaaattttccattcaccaaaatttgaaagataattgtaacttgcagtgaactggtgaaacgacatactgatttattaaggttgatctctcagcatttgagggcaattctctagcactttgtcaaattaaatttagttaaataactactgtattattcttttctcatatgctgtttccagcatttaatagaaagcatttcagatatttttattttatcttagaaggatgtcgaacgttacaacttcgttaaacctattatataagtaaaattaaaaattaaaagtgtattattgtggggtaaaataataatggattcctttaaattagatacagaaagaaattcagtaaataatcttggtttaaaaacaagttttttctttttaaataggctttattttctagagtagttttaggttcatagcaacattgcagggatgatgcagagatttttcatctcccagacagactgcccttccccacacatgcccagcctcctccactattaacatcccacatctgagtggtacgtttgttacaaccgatgaacctacattgacacatcatcaccacccaaagtccacagtttgcgttagggttcactcttggtgttatacttctatatgctaagtttttataaactaaaattttgttaattgtttttggaattttttcttagcctctaagtctagatattccaataaaaatcttctcctttcctgcatatgattctagtggcttaatttaaattttacaaaggacttggccaggtgcggtggctcacgcctgtaatcccagcactttgggaggccgggacaggtggatcgagaccatcatggccaacatggttaaacccgtctctgctaaaaatagagaaattagctgggcgtggtggcacatgcctgtagtcccagctactcaggaggctgaggcaggagaatcacttgaacctgggaggtggagtttgcagtgagccaagatcatcacaccactgcactccagcctgaagacagagcaagaccctgtct

SEQ ID NO: 16677 - DNA, 2527 bp, Homo sapiens
aattaactgattactctttcagaaaatagcaggtgtctcaatgctttttttccataattataaagaccattgtcaaaatctttggtttactaaatatttcactgagcatatatagagatacgttgcttgtggcataaaaagtcttgtagataacttactcacatttggcttttttttaattggtgcattttttaatttgcttttttgaaaattatgaagttaaaatttaattctaaggtagtatttttcatgtataaaactaataatgtagttaagcatactgtttgaataaaattataataaatggcacaattccttaaaccctgaaaataccaagttatattggaaaatagtggaaagaaaaaactagtggagaacatcttagaaaattctattgtggaaattacgatgattattttcagtgagaatgaatttatatatacaacaaaaatatacaaaagctaaccttctcatcctaaaaagatttttccctttgcttctgttttatttagccctgccatgcaccacattaattttatgaacataaatgatatttaacttttctttttttttttttgagacagagtctcactccgtcaccaggctggagtgcggtggcgcgatctcagctcactgcaacctccatttcccaggttcaagcaattctcctgcctcagcctcccaagtagctgggattacaggcacgcgccaccacgcccacctaatttttgtatttttagtagagacggggtttcaccatgttggtcaggctggcctcgatctcgtgacctcgtgatctgtccgcctcggccttccaaagtgctaggattacaggcgtgagccaccgcacctggccaacttttcatcttaagttgtttaaatttatgcacttttagatatcagaatatatgcttgaacaaaggaaatagtaaattagctatatgtctgctggtttcacttcgatgtggatatggatatgtggataaagacagtaaatgaaattaaaaccctgctgttttaaatatcattaccagatataattgagggaatattatatcaacaaacatattgaaacttggctttatttgtaacgtaaactatatataatccatacgtagccaaattagatttaaaatatacaattaatgaatagtactcaaagtgtttttgttgcactgttactctgaatatggactctctatatctggtatggcgtgactgggcataacttctgtaatgtatttcagttatatgtttctccttttattgccagcttctgataatgaaattttccaaagggatgagatataagaatcatcttttataaaaaccagtggggagtggggtattataatctagttctaaactgtccatttgctttatataaaggctttgatttcaataactgaccatttgatgaatatttaaattacacagaataatgtctacatagaataaacttaagtattcaagagccttaaagtgaaaaaatgaaccttttgactgccttaaaatactacttgctctgtaattcaggcatactagttactttccttggggtctgtttaaataatgccttaatagtgttctaatgtttctgaaatacagaactcaaagggtcttttagagcttttaattttacatagtgaatggaaatttaagtattacattttaaaacctgattgtacattggtaatttaaacatccaataacaggaaaatctagatacagtgatgtgttatacatacatgactgttaacatcagtaatattttatgatagtttaaggttttttattgttttctataacaagttatccaacaggttggactttgtaacatgatatccaaggaccaagttgcatatttaacatcgaatgaaaatgtagttgtacagttccaaaaataattaattttttaagggaatttttcaagacaaaaggcaaatattttgtttcaaacctacaagcaaattcattccaagaagtgaatatagtagtaaaacataaagactattgcaataaaaagtttccaggccagtgacttgtttaattacattcacatttttacattcactttgcctttcaaagcaggagtattttataaaactgaaataaaactttaaattgtcaagctggtgcttaaagttatgtaaaatctgatttaagtttatttcatttccaaggaaaggaccctgaaaggaggggacagggagcttcctaggtctgttgataaactaactgatgctttgtcaagtcttccaagttttcactgtaaataatacaactaacaatgtaattttgctgttttctaatagagaatgaatgaatatattaatgtattacatttgtttcatgataaaacagttttcactgatactgtgaaatcctttctctcctttctagccttgcaaaataccctactaaataaatcattttagacatggagtgcaggtggacactgtgtgaactgtttttggtcagttattgtagaaattgatagatgtaccaaataaactctatgcacatt

SEQ ID NO: 16678 - DNA, 2177 bp, Homo sapiens
aacaattcatttaaaaaaatacacatacacacacacacacacacacacacacacacacacacgtcatctaatttagcaatgtatgagaatagtggatgccattttaaaattatattaatgcctagatttgtttctagggggaaaatatggccgtgtttgcttctgatgtatataaaatctcagacatttatagtgctctaagccatagtaagagaaatatgagtgctatcaatacatgaatatttccaaactcagttctcccaactgcctcaaaactaaacactaattcaggaaatgcaagcaataacatttaaaatgtgttcaaatgcttttagcttttaattcttttatgtttttgcttcactaaagacactctcatttgttttgtcatccattgatgtaatttacactttggtaaaacatatctcaaaggactttgcagatattgataaatactcttaacctatagtctctaagataggcatatgttttagataaatgcaatataagtaataactaaccattgctgtaaataattcagctaatgtgtttttttctgagagttatcctttttttaagattttttaaaaaaattttaaaaattcaaagcaaactgtcaagaattgcaccctgaaactacatccatttgacaccactttttttaaaaaagcaagaaagacggccgggcacggcggatcatgcctgtaatcccagcactttgggaggccgaggcgggcggatcacgaggtcaggagatcgagaccatcctggctaacatggtgaaaccccgtctctactaaaaatacaaaaaattagccgagcgttgtggcaggcgactgtagtccccgctactccggaggctgagtcaggagaatggcgtgagcccgggagacggagcttgcagtgagtggggagatctcgccgctgcactccagcctggatgacagagcaagactccgtctcaaaaaaaaaaaaaaaaaaagaacaaaaaagcagaaagacaatgaaatttggtatttattacaataattaaaagtaaagacaaaatccgcaaatacttttgcaccaaccgaataatacatctgggcagttttctatattctaatttaagttagagagctcatttcttcttccactgacattaaatgtgaaaaacaataaataaatagaagctcaaaaccaaaaattattcttcattaaaaacttaccactattggccatttagcaatgagtagatttttcaatagtgtctaccttcacttgacctaataagcattcttactcatctccaactcagttagcaaggtttaccatggctttaaattgtgcaatacacatgctaccttacttcagtttgaataattttcttttgccattatgctgtatctagaatcaatgtacaattgctttttcattggccacaaatcatattaaggaagcattgaaaagtcaaatgacgtcattgaaaaactgcacagcttctataatctgcattcccgatttctgcattgctatgaccttcctgccattaagataaatttgttccatatatgtgtattttatatctagtgatgttgtgtgtgtgtatatatgtatgtatatatagtgtatgtgtatattatacagatagacacacacctccatacacatacaaaaaatatatacagaaatatatgtgtgtatagtgaaaagcaacaatatagtagagagttgaaccggtccactgatttgacattttaactgattttaacagggatctcaggttgatttttctacaactgaaattgaaatcccaagtcaaaaattttgtggaaaaatacacctttttatcctatatttctatatacatatactgcattaggccattactgcattgctataaagaaatacctgagattggccgggggcagtggctcatgcctgtaatcccagcactttgggaggccaaggcgggcggctcatgagatcaggagattgagaccatcctggctaacactgtgaaaccctgtctctactaaaattacaaaaaattagcctggcgtggtggcaggcacctgtagtcccagctacttgggaggctgagacaggagaatggcgtgaacccaggaggcagagcttgcagtgtgccgagatcgtgccactgcactccagcctgggtgatagagtgagactctgtc

SEQ ID NO: 16679 - DNA, 1654 bp, Homo sapiens
  CDS (44)..(451)
cattattagtgcatcctctgatggcactgtaaagatctggaatatgaagaccacagaatgttcaaatacctttaaatccctgggcagcaccgcagggacagatattaccgtcaacagtgtgattctacttcctaaaaaccctgagcactttgtggtgtgcaacagatcaaacacggtggtcgtcatgaacatgcagaggcagattgtcagaagcttcagttctggtaaaagagaaggtggggactttgtttgctgtgccctctctccccgtggtgaatggatctactgtgtaggggaggactttgtgctctactgtttcagtacagtcactggcaaactggagagaactttgacagtgcacgagaaggatgtgattggtattgcacatcaccctcatcagaacctgattgctacctacagtgaagatggactcctaaagctctggaaaccataattcaacttttctttttaaatcagctcgaaagcatgtacttaaatgaagcatattcatgtaatgtgcttttttttttttttgccagcttttctaagcaaatagattgtctgaattagtcacagaataattttgtgaaaattcatgtttaagtagcaactaccctttctttttttatatatttttaaggtattagtttatcttcttctaactggtgcagtcacttaatgttttcattaatcttcgacctggagagtgaaatactgatatttctagaaaaaaattctactcctctgattatttgaaatgctgaggaaaatgtccctcccatagtaaaacttgtaaataaggaactatatcatattcagtagctgtgttctgttccgtcttttttttttttttgagatggagttttgcttgttgcccaggctggagtgcagcggcacgatcttggttcactgcaacctccgcctcccaggttcaagcgattctcttgcctcagcctcccgagtagctggggactacaggtgtgcgacaccatgcctggctaatttttttgtatttttagtagagatggggtttcaccatgttggccaggctggtctcaaactcctgacctcaaaggatccacccgccttggcctcccaaagtgctgggatcacaggcgtgagccaccatgcccggcccatctttttttttttttttttaaagatgttaataaactttatacctttctggagactttgttctaaaatgtacataaatgctcatctagttaacatatttacttagaatgtgggaggaggagtcacattattatccctgaatctcaagtacagcagaagtgaattcctgggatagtaggatagactaacatgtaaaaaggccaggtgatgcataggttctcatttcactgccctcagccttcctctccttctgagctgtgccttctcacatgttcagtcaactccagggaatattgtctccatcttctggatagaactagttgcaggatccgttacaagaattcagagttttggcatctcccctttgtatgttgtaggagaaggtttggcattgaaaatgtgctgttgttccaaagaaaaattagcaaaggacttgagatttagaaaagtctcctttgtaatgtgcgtcattaccagttatctaaagaaaaacatgtaaaagccaacaaaacccttg

SEQ ID NO: 16680 - protein, 136 aa, Homo sapiens
MKTTECSNTFKSLGSTAGTDITVNSVILLPKNPEHFVVCNRSNTVVVMNMQRQIVRSFSSGKREGGDFVCCALSPRGEWIYCVGEDFVLYCFSTVTGKLERTLTVHEKDVIGIAHHPHQNLIATYSEDGLLKLWKP

SEQ ID NO: 16681 - DNA, 2355 bp, Homo sapiens
aatatttatgtatatttatgtgtgtgtgggataagtgtggatatgtttatacatactcatatgtatgtttgtgtgtgtatctgtctgtgcctgcctccattttcttttgctttagagaggctatacttgaggctgccatcaagagtgagaagtttgaagctggaagagcctgcatgggcccttcttgaactggtgcagcatgtgcagcatgacatcactcaagagttcttgtcagagtgataatgaatgtctggctattgtaaacgggaacaagaaaactatttccagctgtgtgacaaccaagacgacaaaaagcattgcagagaatattattgccacaaggaccctgcttcatctgggtctcagacgacgggaggaggggcattttggagcacgtgtttggcatctgtgaaccttttgttaggtagaaaacaaggcctgaatgaaaggcctttcaaccacttctggagcagagaagataggtagagttactcattataggcaggtttcattgtaggagtattcagtgaggacccccgccttggaagtctgtaatcagcatatgataaggatggtgtgttcttactaagagaataacacaactgaaacagaattgccttttgttaaggggatgctttgccttcttggactacgattgtggggagaaggattattgtcaactaagtgaggcattcattctgtacccactatttattgtagttccacagagaactgcttgctttactttctgactaggcacagaaaagtaaaggttcaaaggctagggcaagatgactgacttttccagatttagcacaatctgttctctggtcactttgagacgctgtcaatttagtttcatgcagctgatatcttggagaacttctgtgtccttacgtttggctgaggacactaaatttttttttttttttttttttttttgaggcagagcctcactttattgcccaggctggagtgcaatggcacgatcttggctcactgcctcctgggttcaagcaattctcttgcctcagccttccaagtagctgggaccacaggcgtgcaccaccatgcctggctaattttttttgtattttttggtagagatggggtttcactgtgttggccaggctggtcttgaactcctggcctcaagtgaaccacccgcctcggcctctcaaagtgctgggtttacaggcccaagccaccgtgcctggcctgaggacactaaaattaaaaaaaaattaagaaagtacggtccccgctcttgagtagctcatgaacatggagcgacatggactcaaatgattaagatcaggtaggtagtgatgaatacggtaaaccaaggttcaaacaaagagctgtctgcatatctgaggatggagagggtaagtcagccttagaggagggaaatgacttgcagcaggatgccagcctcaatggtctgtggagctcattccatgcagaagagtaatgaggaagacccagtgagtgacaggcttggggaggagtgcctgaaattgacggtttgtggcaggaagtggtgggaccaatctcgaagcttgtggaggtagaagggtactggagactactgtggacaaaaaagggcatgttgatgccattaccaggcaggacacgagagcatgatgattgttgcagtgaggcttgttagttttagacatgtctaaaaccatgcaggcagagattttcagctggtggctggcaatttgagtttgaagtttagctgagaagtcagttggcagtattcaggcataattgctaaatgtagaagtaagtgccagtaaaatgtgtgtgataagctggagagcacttttagagtgaaaagattgatatattttaacaaggacaaggcttatttcaattctttaggttatttttctttagcagattaaagtagttttatcggttatcaagcatttgttgagcgtttactatggcttctcttgataggtggtcctggggagataggaaggaaatggtgcaaatttcaacaatacccactggggtgaacaaaaaatccctgaaacaccccattccagctattgttatctggaaaaaaatccttacaataattagatggtgatttgacgtctgggggaagttgcagatatagttttaatttactgtaggactagtggcagtgagtctcatattgctgtcatataaaaggtaaaccttccagaagaactttggaaatttcagtagcctaaagaccacgctttgagaaactcgtaaaggtttgtcatagaggttttaaaagtctgatcaaataattttaagctttagttgcctactaaaaagtaggatgcagtacaagtttgtcctttacttggt

SEQ ID NO: 16682 - DNA, 2261 bp, Homo sapiens
aataaatttgaaacagttaatcaacaagtcttgaattctgaggatttggtggcctttaaggataatatctgaattcatttttcagtgatgtagaaaaatatgaaaacttacaaatgtccttaaaaggtggagggttagggggtggaagacaagcagggggttaggagataagtaagcaggttctgagaaaattgagaatagagttgctgacctgagagtcatggtgtttgggatacagtttgggctggatcagggaggtgtatcaataagggcaggccaaaaagaaggcagacatttggctcactagtggcaaagggatggattgggagaaggctgaaattgagtagctagagtagtatccagaagcaagagaatttaatagcttaattgagggctgtttatgtacccaggccctgtcctaggcttcctacacatgatctcatttaatccccataacatattggagatagaaatgataatacccactgtaggtggggaaaacagacctggagaagttaaaatttcacctgatgccacaaagctagaatgtggcagagccagagaccatgtttttctgaattctcttaattactaccttctgtactgcttttcttaattctgaaagtgaatctactgttgacattaaacttgtatttgcttattggtgtgtagtttgtaacctgacaccatcacaattttttgggagtagctttgtaggaatccaggtagttatttgaggcaggattactctcaatgatctcctcctgataaggacataagatactgccatgttctggagaacaccttattttggaaggtgcccccaaagtattagatagtggaggtgacagcaaaagcggcaaaatggggtttcatcgcagaatctacttactcagttcttttacacaaaaaagtttctcctatatttagaaaagtgtcaaaagaggccaggcacggtggctcacgcctgtaatcccagcactttggaaggtagaggcgggcagatcacctgaggtcaggagttcaagaccagcctggccaacatggtgaaaccccatctctactaaaaatacaaaaattagctgggcgtggtggcaggcgcctgtaatcccagctactcgggaggctgaggcaggagaaacacttgaacccgggaggcggaagttgcagtgagccgagatcacaccattgcactccagcctgggggacaagagcgaggaaaaaaaaagagaaaaaaaaaaaaacagaaaagtgtcaaaatagcactataaagagagctcagaaataaaagaaatgaaggaattcattaggaactcaaggaattaattacacatgccaaatttaaaaccacctctggatatacatcttaggacttttgtgaaatctgcattaatttctactacactaattttgaattcgaaataattcagacatgattgtgttttactttttcaaagcatttgattttttaaaaaatcgtgtgaaatgtaaattgtttatttttttgttaaaagtacatgtgtattacaaatatagatattaaaggaaattttaaattgtcaaatgagaaaatttcttattctggtggagtgtgaaagtcaacacatcttttgtgcatagagaaacacattaatttcctgcttttgtggtgttgcttctcttgcttttgtattattgtccattagctggtactgtggaattcatcagatttctgagaatcttaatgaccttatgaatctttctaaaataatgcgtaacaaacaagactttctttattctgacttacatctattgattcaacagtttttaggcattaagaatttatgatacattactgtgtaatgtcagcttcttttgtttacttggatgacttttttattagaatgacttttgttttaatttgtaatacaattttaatgccgtataatgtgcaggaacttcagaatagagttgctaccctgcttaaagtctgtagatgggaggctgggcacagtggctcaggcctgtaatcccagcactttgggaggctgaggtgggcggatcacgaggtcaggagacagagactattctggctaacacagtgaaactccgtctctgttaaaaatacaaaaaattagttggatgttgtggcactcacctgtaatcccaggtactcaggagactgaggcaggagagtcacttggtcccgggaggcggggtttgcagcgagccaagatcgcgccactgcactccagcctgggcgacagaacgagactccgtct

SEQ ID NO: 16683 - DNA, 1774 bp, Homo sapiens
agataaaaagggtacaacttgtttccatgtgggaggtaggaagaacattgcttttggagtcagttctaggcctggtgactctttgacttgccagttgtgtgccatgatcactccaagcatccattttctcatgtgtaaaaagcatgttaaaaattttaaatgaggagtttaaaaattacactcccagtaggcttactatgaggactaaaataaataaaagtgtgaaatgcagtgccaagcacataatagctgctcaataaatggaagctaaattattttccacagttatctttcaaatttcactttgatcagttttcacagactatcttctaagcaaattctgtaggtgtttgccttcggaaaagtgcgtttgttgtcagtgaatggttacagggaaaaggagatacttgtcatgcagctggaaacatgaaaacttggccctgtgttcttaaaaatgaaaactccctgcaggatgggtcaagttgctaccataggctggagcctatgattctcagagcagcatcactcttaatggcactgttctgcatgcccttaccttgctcattttgctgggctcagtactaattttcatcccctaggcaggcaaactaagtgtcattgtggcagttccttccatactaagaggaagcattgatcactaagagtcagcatggtttactatgagtaaattaaaccagacctatcttgacctctgacaaggttgtcgtgatgaccatgtcagtttggttccttgctgtatgcccagtgtctgacactgatcctagcatatagtagacactctatatattaaataaatgagccaacaatgtccttgtgagcataatgaaaaattactggccagtgagagtttcgttggatggctttgtaatgaaagacagcacaaagagattgctagcacctgagctcaattggctttgtcttcaggccagttatacgcaattattttcaaaatgatgaattgattgaggacactgataactctacctgaagatgaagaaagagccaacgtgttaaatgtcagaaacagaatccaaagaaatcctaagaaagagcacagaagaatggcaagaactagtcatgtatagttagaatgcttaagatttgaatcttggtttcagccagcacttggagtgtgaccatcagcaatttgcttaatcttccaggcttagtttcatcaactaagttaggaggggaatctctacctcacagggctcttgcatgaatgaaacgtttggcgtaatacggaagccctcagagcagtacgcttcaagcagtttatgaagtccttagcgtctttcttatggccgaaaatagtttggaatgggttgaaacaatgggccaacctaaccagatgaaactgtaaagaagataaatgtaaagagtgtttaagtaccataatttaattatacaaatataagacaggagctatgtaacagaggagagattttagctgacagtaagcatggaatgatttggaagaaaaagaaaagccttggccaggcactggggctcatgtctgtaatctcagcactttgggaagctgaggtggaaggatcacttgagtccatgagtttgagaccagcctgagcaacagagcgagaccccatctctacaaaaaataaaagaattagcctggtgtggtggtgtgcacctcttttcccagctgcttgggaggctgaggtgggaggatgtggaggctgcagtgagctgtgattgcaccactgtactccagcctaggtgacaaaggaagacc

SEQ ID NO: 16684 - DNA, 3174 bp, Homo sapiens
  CDS (1208)..(1540)
ggcctttttttttttttttttttttttttgcttatgaaggcttggaaatctagtgtatattttacactaacagcatatctcaattgagatggccacatctcaagtgcccagtagccacgtgtggcctgaggccatgactctgggcaatacagctttaagtgagtctagggcagggcagagggcagcacctgggatcaggtgtggagcctggggccttgtttagcaccctctggtgagggcactttctttccataaaacccaggtcaagcatgcctcacaaaggggacagtggaagtgcctcagtttacttgggagcttggcctctccagcttgccttcctactgcctggaagaagattggtgtcctcttgccttctctagcccctttcacaagaaccctcccagaatttagtcctatgaagggccaggggtgcaaggagccacccacacaatgacaggacccaccagcaataccggaagttggccagccctactcatccaaattcccttctgccagctgaacatcacaaggatttcagactgccatgctgtggcaactccattttagggtctgggcatgtaaggattactgtattaatccattctcactctgctaataaagacatacctgaggctgggtaatttataaagaaaaagaggtttcatggactcacagatccatatgacaggggaggcctcatgattatggcagaaggtggagaagaagcaaaatcacatcttacatggcagcaggcaagagagttgtgcaggggagctcccctttataaaaccattagatcaggcagggcacagtgactcacatctctaatcacagcactttggagggccgaggtgggtggatcacctgagatcaggagtttgagaccagcctgaccaacatgttgaaaccacatccctgataaaaatacaaaaattagccaggcgtgatggctcatgcctgttgtcccagattcttgggaggctggggcattagaattgcttgaatccgggaggcagagctttctgtgagctgagatcatgccactgcactccagcctgggcaacagagtgagactcggtctcaaaaaaggaaaaaaaaagaattagatcttgtgagacttattcaatgccatgggaacagctggggaaagacccagcccatgatttagttacctccaactagggccctcccacagcatgtggtgattatgggaactacaattagtgattttggtggggacacagccacaccatatcagttactgagctgggcatcttcttccttgaatgcatattggcctctgaggcacttcctggttaacctcattccacagctgagaaaacccaggcttggcacaggcaagggatctgacccaacgtctcccatcttattagtggaaggaccaagactggacccacaactgtgctcctgttttgagtcaccatgctgcccccaagatcagatctcaaaacaagcagacatgggggctcagaaagtccccagcctagaactttcctgtcaacccaatgacactaaaggctaagctggctgcttattcttctggattcacactagaatgaccttggggtgtgtttcacacatgccgatgtctggagattcacccccagctaactgactatgaatctctgggttggggcctgggcactgatattcatgcagagcttctgagatggtcctattgcattgccaaggtcgacacctgcagaaacattgcacactttttcattcatttagttattaaataggtaatatttattattatttttccagacacggaagcgttgcaagaatagtacaaagacatccgttatacccttcgctgagattccccagtgctaccattttaccccatttgctttattattttctaagtggcagatgagttatcctttacccctaaatattcctgtgtattccttaataacaaggactttctcttatctaaccaatgcaatgatcaaaatcaggaaactaaccctgctacaatacggttttctaatgtatggacctcattcagatttcgccagttaacccaatgatgtacattggagcaaacgatcatcccagatcatgcattattttcagttgttgtgtctctgtaggtccctttcaaccaggaacagctcctcagtttttctttatctttcatagtattggcattcttgaagaacgcaagacggttatttgatagaatgtcccttactttggacttggctgatgtttcttggcggtgatattcttatgcatttggggtgggactatcacagcaatggtgtcatgttgtctgtgcatcgcatcaggagggacatgctgatggtttaccccattacaccaaagtgaatgttgatcgttcagtgaaggtgggcgcaggatcattgcattatattgcagaagccatcatcagccatgctcgctctgattaaccgatcatcttacgtagccatttatctaacaaggctgtaagggtcttgaactcagggtaagcaagccttaaagcagaagagaagaaagaaaggaaggcactggaacctggagctttggcaaagggggcaggtgtggggaacgcaccaccaaagttgttcctggcattaggatgaagaggaaggagaacattctatctagaaggggtttgaggttagccagctgttgtctcatctcctaaatgtctgccttccccagcatccctgcccgcagttcccgcctcggtagcccctcctgagcctcagtcaccacctgtgctgatgaattgctgttcgccctcctcccaggcaggatgccccatggtcactgcaggctcagcccatccacaacagattcacaaagccggtccctcaatgctggatttcctagatttcccagccaacagtaccaccagcttaaaaccctgcagccatgcctaaatcctctatcttcctgtaccccacttccccacgaccaacccttgctgattttatggctaaatccctctcttggcagtcaggaccagctgcagaatttgcaaggcccagtgcaagatgaaaatatggaccccctcattcaaaaatcagaggaaaagcactgctgaagtattaccatataaagcattttctttcttctgtggtctctgcgtctcaatttatcatgatgctttcatttgttatttaatgtccaagc

SEQ ID NO: 16685 - protein, 111 aa, Homo sapiens
MGTTISDFGGDTATPYQLLSWASSSLNAYWPLRHFLVNLIPQLRKPRLGTGKGSDPTSPILLVEGPRLDPQLCSCFESPCCPQDQISKQADMGAQKVPSLELSCQPNDTKG

SEQ ID NO: 16686 - DNA, 3559 bp, Homo sapiens
tactaaaaatacaaaagttagccaggcatggtggtgcattcctgtagtcccagcttactcgggaggcagaggcacaagaattgcttgaacctgccaggaggcagaggttgtagtgagccgagatcgcaccactatactcccgcctgggtgacaaggcgagactctgtttcaaaaatagaattttttctaaggtaaaaggaggatgtaccttaatcaggtttgtcatcaaacatccaagcctttagcattggctttgccctttgcttttacacagctctgatcttgtgtcctccttctgttatgtgtaaatttgccttgtctccattcttgctttccagctattttagaattgattctcatatcctggcctgtcttttaaatgtctctcttctattttgaaacaatatacttctttcattcaatcgaaaacctttgctgaatgcctctatgtgttatgcccagggctacatgctaagaatagacagataagatgcagttccgtagtttctgttcccttgaaagagcagagaaataagtcacagcactgtgtagtaagcataacactgtattgtagaaaagtgtagactgaagtgtggacaaatgccagagaagcctagaatcctaagcagctactttatcctgggaaggatgggaaagacatcagcaaaaaaggtgaaacctcagccctcttctttgtcataatgctctgttttctctttccctagaagagctgcctccagaggtagggtatgttaaatgatatattgaagtacaggagtaactagactttctatttatatattttttaaaacatgaaaaaaaaacctaagctttactaatatataattctcaggtttatgttatacatacacacatatacgctatgtttttattaaactatatatgcgtatatagggagaaagcgaggatatgtgcttaaatattttttactgatgcagtgtaagatcaaagtttggacaccactgctgtgatcatttgttcttttagctagccatcagttaggcacaaaataatttccaaatttcatcccaaactgtaccaaagtgctacttataagcattttcacaacttcattcaagtgtgctttcaagaacaaagctgtgagtcttcattcccactgcccccatttcctccccaaaccagttaatcagttcttggggagtctacctcttaaatatttatccactccccattatccccacagacactagggcagccctcatcatctcaccaggactattgttagcctactaactgctcttcatgttactggtcttaactccttccaacccacctggcttcacagtacacctagagtaatccttccagaatgcaaacaaaatccttctaattccctaattatctcctagataaaagttaagctatttgacaaaaggcacacttcatgacccagtccaagtgctaatacccacaaactcttcacagatgggccatcagtttgtgaccactatggaaggttgatttgggctgccattgagcatgcatactcttatggacgtgtttgtcagactgaacactgagctgagtggatcatgcaacttgtgtagaggacagtataaatggctgaaaataaaagccaaatgataggcagatgtgaaaataaaaaagcctgtgcttactagaacacacagtcactttgtcttatgaatgtatcatcaggcatagcccaggtgctgagaaataaccaagtaactaatgcacttaataactggatccttttaaaaaccaaacaggcattgatgtcagatttcattattgctgatctgttcaatattgatttggatccttttatctttccaaggatgtggccaaagatttctgtggtgtatgcctctaccacaaaagcatttagaagtacaaacccagcccttgcctatgtctatcctcatatcctgccactcttcctctaccccacacaccaaacccctatggtctagccatactaaagagcaaattatctctaagtatgcctttcaagcaagcttcatcatcatgaatcaatgcctttatacacactgctgctttgcttagactgctcttctactttattctactcattacacttctcatttttggggacttattctaagcattatctcatctgtgatgctttttctagtcctcccagctcaagacagagtttggaatacctcctttttgctctcatagcatgttatgcattcctactaatatagcacctcctagtatgtagcgcttagcaaattatactgtagtagccaacagttcaaagctctggatccctgaggtcaggaacgccttaagcactggactgctggaggtctttctcatctttgtacctgcagtacctaatgcaggacttggcttacagcagagaatccgtacacatgtggggagtgaacgaactcaggatcttttttctcctcaaagcattgtaatcagtactttagggaaaaaggtagaagcataagaatattagggcaagatgcaacaacagcatcaacaatcacaaccacggctaattaatacttaacgttcgtcaggctctattctaagctcatacatatattcactcatttgtttctcacagcaaccctcctgtcctcattttacagatgagaaaaactgaggcacagagagactaattaagcaatttgcacaagatcacacacacaggctgctcgcggtgactcacgcttgtaatcccagcactttgggaggccaaggtgggtggatcacctgaggtcaggagtttgagaccagcctggccaacatggtgaaaccccgtctctactaaaaaatacaaaaattagctgggtgtggtggcacatgcctgtaatcccagctactcaggaggctgagacaggagaatcgcttgaacccaggaagaggaggttgcagtgagccaagatcgtgccattgcactctagcctgggagacagagtgagactccatctcaaaaaatataaaatataaaatataaaaaaaaaaataagatcacacacagagaaggcagcagaactggttccagagcctttatgctagaatagaaagtgcctgttattttgttcattctcctcctcgtccagtgtacagctgtagtgatggggaaacaggaaatcaattactaggttgccactaagtctacaaactattgaagaccagaatttacataaatcgtatgcagtcccacatctgacaggcttgcaaaaccttccacatttccatgagtaagcctatccaaatagtactacttctcaattgcaaatcataacaacctcttgtgtggccgtcagagctgactaagcagaaactatgatcctctgaatttagtatttttcctgtttgccaaaaatgatgtgtcattagtgacgaagttattcttaaagttcctttaacaaaactgtgatttatatcaaataacaatggcttggagggggtatggaaaattgattattcttcctaacaaatctattaattttattaaacttggtctccctccctttttcttggatgtttataaaatttaagtctttct

SEQ ID NO: 16687 - DNA, 3148 bp, Homo sapiens
  CDS (2788)..(3093)
ggccttttttttttttttttttaaataagctactggagaaagtgtgccttcgaaatgaggacagtaaggagagataacgacatgggaaccagggatataccacaggaaaggagccagggagaacaatttattaacaatttcttgcaactatccagggaaaatataaattatacaaaaagaaatccaaacaaatcagaaaaaaaatgaaatgactcaatagaaaaatggacaaagccattcagtcaatttaaaggaaagaagttaaacagccacgaaatgtatccaaaaaatgtccaaatctacctataattaaagaaactacatcaggtgcttgaaaagatttagtatagttaatgttagccaaatgtgtacaagaaacaagtccttttacacactgttaatgtgagtgcactgtccgaagtttatagagggcagactgacagcattttaggtacatacacttgaaaggtagcatgatttctaacagtttctacatgatacactcccttttataaggtatgacagaagactatgctgcaagtagaattagttagatatctatgcaatagcagtgaaagatctatcagaggtgttaggtagaaaaagcagaaaataagtcttatttatgtagaacgttctattgtattcatatttatgtgttttcatacacaataagtctggaaaaatacaaactatagcagttagcaataaaggagaacattcagaccagacgtggtggctcacacctgtaatcacaacactttgggaggctgagggaagaagagagacttgagcattttcccatgttgatacaccatggaggcagaagagatctccacagggcaaaaaccttgatgaggataaggacaagcacagatagaaggccaccttttctcacagggaaggatgcagttacatttattggttggtggcagaaaactgatagatgtcacttgatggcatctgctatctgttgaaatagtatttttgaagttcctgagagagaggctagaggtagcgaggtcccaagtttgaagagactgaaaagaagtctaaaatcactatagtttggcgctagagtgaacctggaaacataagagatacacaaaacataaagagtgaatcagacactggaagcatgtcccattgcctgggagtatgacccattgcctgggagtatgagacctccctgttacttgaggtaacaggcagcaatctttgaggctctgagttttgaaagccaggctcagaagcccccaggtggatccattcccagtagggatttccagagcctatgcagaggccagcagaacagaggaaaggacattggtaagggaaaagctggtggggagagtaaagacaggaggccgtgtggtgagggcctctgggttagacaacaaattgtatttgaggtgagctgtgtgggagaataacaggcccaggaagttgccacaggagcaggtggctgacatggagctcagagccatgaagagaaagatcaaagaaatgagatgtcaaagtggatgtagaaggcagccaggctggccattcaataccattcccagtttccacacaagctacaaatgtcattattacctgattcttagaaatgcaggccatgttatttcctggatttgattttgatgttatcatttgatttaaaacctgaacattatgcagaggttctgaggttctagctatgagggaaaagaggataaaatacggagaaattaagggtaaaaccgtaagtaaaattatcacataataaattcccctgatccttccagtaggaatcatgagaagtaaatcaactcattcacactgtctcagaaatttcaactaaaacgtttttaaaataagtattatacaattttctgatcaactcaacatgccaggaagtacccaaaagaaatgtaaaacctaactaataattttaaacaaccagataggataggcaatgcttattgctgaaatgtgatacttagttctaagaaaaagaaatggctgtatttctttaaaagttgcattaaacacatttgattccattcaaaatagatggagtccagattaagtattttggtcaattttgaattaaaaaaaaatcctacaaatacagtgaaattatcaattttttttttgcaggtttgagcttttaaaatgctaagacaaagcctctgctctttggggctatttagtgggcattatgatgatcagaacgctttctctgttacctgagagtgcaatttggttttcattaaaaattggatgggtttttttttttttttttttttttttttttgtggagacggagtctcactctgtcgcccgggctggaatgaagtggcatgatttcagctcactgcaacctctgcctcccgggctcaagcaattctcctgcctcaaaaaaaaagaaagttgtagtaaatacacctatgaaatgatcaagaagagatctactgactaaagcaaaggtatagatattttagaattggatcttgtatatatgaaaatttagtacatggtaaagatattttaaatcaatggggaaaggctgagcagatcaataaatgatttacagacaacaggcaatctacttggaaaatatatcctgatgctattcatacagagaagtttgaaaaagggaggcttctagttaaagacagtggcttgatatactccaaaaatctcaccaacatgacagtgaaggaattctaacacttcacatagctgttgaaggaggctaggagcggtgtgtccctaattgctagacaagttcagaaatctacaatgctagctacacctcagaatggaagtgaaggtggaggtgaagataggaacattgtaaaattctgtttaaaagcagatgctggccgggcactgtggctcaagcctgtaatcccaacactttggggggccaaggtgggcggatcacgaggtcaggggatcaagaccatcctggtaacacggcgaaaccctgtctctactaaaaatacaaaaaaaattagccaggcatggtggcaggcgcctgtagtcccagctactcaggaggctgaggcaggagaatggcgtgaacccgggaggcggagcttgcagtgagttgagaccatgccactgccctccagcctgggagacagtgagactccatctc

SEQ ID NO: 16688 - protein, 102 aa, Homo sapiens [sequence omitted]

SEQ ID NO: 16689 - DNA, 2329 bp, Homo sapiens
  CDS (1607)..(1921)
atgctgaattttctgctttggaaagaaaaaaaaaagaagctattgtccacagattgatgcttccataatggaatcagctttaattgcaaggaatgaagaaaaacaagagtggaccttcaaagctacaacattttcctcctcccctccctccccaccagccccttccccaccaagaactgctatgatgtcccaaagtgaggtgttgttgattccagtctcaatgggattttctgactttaatgtttgcaaggcatttcaccagaatacagctataaacggccgctcccaacaactgggctctgactcacccacacccacttagtgtccactaagtagtccagggtgactcagtttaagcacatctcaggtgaggtcactctgcatataccttggcttacctgaaatagcctgaacttgaatctcacataagggaaaactagtcatcaatcaccaactcattgactaccctcaggaagtcctgcagaaatcaagagtccttgaggagaacacgtggatcataccaaaaccagggtttaaatccattctgcttaagagttctatcagtcagtttaaccataaattacgctacagaaacaaacaacccaaaaacctcagtggcttacagatttatttttcactcacatgtttgtaatgatccatcttggttgtaatccatattgcttcagcacccagtctaaaggagcagcctctaaggggggcatgttggtcttaagagggaaaagaaaggtgggaaccacatgatggctctttcatcttccgctaggaaatgataccctttacttccatgacattccattagccaaaacaagtcctgtgacaggcacgatgtcagtcaccacagttaaattatcctgtcatagggagggatagtgaatattttgcagaagtaatatgatacaccataagggtacataatatccatgtctcccttcaaggagccatcctgttgtaggccataacggtaggcctattcatctgcacatttggtaatgtattcctggtgacaaagcagctactcttcaatcaaaagccgtgtaagaagcagttgaggaaaaaaagtcctggttgagctctgaaaaccttgcgttgataatttcattgaccaggatggcatcagtatcaaacttgaagaatgggtgtcagtgtctaagaaaaagattccagagacaatggtggtgtgctctttaacgaaatgcccatcaccactgctcttaatagcatgaagaccacatgctgtgagaaaacacaaacatcaattaccaagtcaagaaacagacactgaatgtgaaaaaggttttgaaataccttaagtaatttattttgtttctatttttccttctgtttgtgtacaagagtaatttaaaagaaaaagctatgtgaaaatagttggggttttttgtgtgttttgttttttgtggtggtgaaggaggaggcctaatgtccagaggactgtttatccctgaagtatgatatactaaaatatttcttattatttgtatcaattttccttggagctcaatgtgcccttgcagtcttcagactttattttaggaaaatatatttgcatgttttccccccattctcaatgtttggtgtcctggttcatcataccccacagaatgttatgtttatgtatcataccattcctctgtggacatgcatttactttgtttacaggttttggtttgggggttctctttttcctactctggacagtgcatgtacatttactttgcatgctggtgcttttttttctatagcaatagtgtctgatagacatatgcaagtcacatgtaatttaagatctagtagccacgctaaaaaacaagtaaaattaattttaatatatttaactcaatacattggagatattatttcagtaagatatttttcattcttatgaaactaagtctgtctggtttgcatatctcagttgagacactaaagttttactgataatacttaatccatgtttagatttcataaaatctaaatttgcaaagtaaatttacatacccatgttggtctaaatgtgcttaaaagttttccaataactgaaatgagtatcagttttaaatttaaaaatttgttacttggttactccatatttcaggtattagtggctaccatattggtcagagcagattcataggatgatttcccaggtttgaagtgtgtgtatatttctggtattataagatgtcagactggtttttggagaaatatgttgtcttaatttttacctgctttgatatgacctttctgtgtgtacgtgtgacatttctttataaatgcaacatgttcacat

SEQ ID NO: 16690 - protein, 105 aa, Homo sapiens
MFGVLVHHTPQNVMFMYHTIPLWTCIYFVYRFWFGGSLFPTLDSACTFTLHAGAFFSIAIVSDRHMQVTCNLRSSSHAKKQVKLILIYLTQYIGDIISVRYFSFL

SEQ ID NO: 16691 - DNA, 2770 bp, Homo sapiens
ttcaggtataccaatcagacctagatttggtcttttcacatagtcccatatttcttggaggctttgttcatttctttttactcttttttctctaaacttctcttctcgcttcatttcattcatttaattttcaatcactcataccctttcttccgcttgatcgaatcgctactggagcttgtgcattcatcatgtatttcttgtgccatggttttcagctccatcaggtcatttaaggacttctctacactggttattctagttagccatttgtctaatcttttttcagggattttagcttccttgcgatgggttcaaacttcctcctttagcttggagaagtttggtcatctgaagccttcttctctcaactcatcaaagtcattctctgtccagctttgttgcattgctggcaagtagctgcgttcctttggaggtggggaggcgctctgctttttagaattttcagcttttctgctctgttttttccccatctttgtggttttgtctacctttggtctttgatgatggtgacgtacagatggggttttggtgtggatgtcctttctgtttgttagttttccttctaacagtcaggaccctcagctgcaggtctgttggagtgtgccagaggtccactccagatgctgtttgcctgagtatcagcagcagaggctgcagaacagcgaatattgctcaacagcaaatgttgctgcctgatcgtttctttggctttgtctcagaggactacctggctgtgtgaggtgtcagtctgatcctactgaggggtgccaccctgttaggctattcgggggtcagggacccacttgaggaggcagtctgtccgttctcagatctcaaactcctgctgggagaacaactactctcttcaaagctgtcagacagggacatttaagtctgtagaggtttctgctgccttttgtttggctatgccctgcccccagagatggagtctacagaggcaggcaggcctccttgagctgcagtgggctccacccagttcgagcttccaggctgctttgcttacctactcaagcctcagcaatggcgggtacccctcccccagcctcactgcctccttgcagttcgatctcagactgctgtgctagccatgagcgaggctccgtgggcatgggaccctccgagtcaggtgcaggatataatctcctggtgtgccatttgctaagaccattggaaaagtgcagtattagggtgggagtgacctgattttccaggtgccatctgtcacagcttcactttgctaggaaagggaattccctgaccccttgtgcttcccaggtgaggcgatgcctcaccctgcttcagctcactctcggtgggctgcacccactgtcctgcacccactgtcctacaagccccagtgagatgaacccagtatctcagttggaaatgcagaaatcacccatcttctgcatcgctcaagctgggagctatagactggagctgttcttgttcagccatcttggaactgcccctgtggttgttttttctttttttcttgtaagttcagttgaacaattctgcagacgttgtacttattctttcaggaacatgcttttatactatcatttctattagatgtttctagattcaggttttccagtcaggagggacagtagtccagaaactggtcgtctataaaggagaaactttatcctatacaacagtatggtgtggctgaaaagcccagtagacaagagagagagagagctggactccaggtctaactctgccacttactgacaagctatgtggtcttggaagctaatttttcatattcagtcttcagaatccacattgatgagtgaagggattagactaatgctgaggctatttttcagcttagaaatgctctgtaactcttaattatttgtagttacttccctattacccaaatatattacagctctatctgtcactgtgtttaacctccatctctctccctctttcccttcctttcctccctccttctgtcctttttctcccccttctttcttcctttccactgatattctccttttcacaaagaaagaaatttggggcacagattaaaatggcccagatgcctgtagagccactggcagtatatggatagggacaaactaagtacggcaaggttggaaatggagaaattactgatgccactaattggagtcagacattgagatgctgtccatgaagaaatcaggatctttggcaatggatgcagctcttagattgaaatttgacactggcccttggattccaaattctttaaaagtcagcacatattccctgggtatgtactgcaccagcaatgtgtcaggcttcggcttacagaggtgaataagatgcagccactatacttatgggtccattaccagttggggaatataaatagctcttacaagcttgacttttagttcatttgcaactcactcttggggagtatagaaactgttaagacgggccgggtgtggtggttcacgcctgtaatcccagcactttgggaggctgaggtgggcagatcacttgaggccaggagttcgataccagcctggctaatgtggtgagaccccatctctactaaaactacaaaaattagccaggtatggtggcacacacctgtaatcccagctacttgggaggctgaggcaggggaatcacttgaacccgggaggtggaggttgcagtgagccgggatcacaccactgcacttcagcctgggtgacagagcgagaccccgtct

SEQ ID NO: 16692 - DNA, 3161 bp, Homo sapiens
  CDS (1984)..(2310)
atcaagaccagcctgggcaagtttgagagaccctgtctgtgttagttcattctcatggtgctatgaagaaatacccgagactgagtaatttgtaaagaaaagaggtttaattgatgcacagttccacatggctgagaaggcctgaggaaacttataatcatggtggaaggcacctcttcacagggtggcaggagagagaatgagtggcaagcaaagggggaagccctttataaaaccatcacatctcatgaggactcacttactatcatgagaacagcagggggaaactgcccctgtgattcagttatctccacctggtcccacccttgatacctgaggattattacaattcaaggtaagatttgggtggggatacagaaccaaaccatatcactgttatctacaaaagattttttaaaaagtagccaagtgtggtggtatgtgcctatggtcccagctactctggaagctgaggtgggaagaacttttgagctcaggaggtcgaggctgcagtgagccatgattacaccactgcactctagcctgggtgacagagcgagagaccctgtcccaaaaaaacaaaaaacaaaaaaaaaccccaagctaaaaaatttatatacaaaaacctcagcatatttgtcaaataactgtgtcagtgagttcttaagcattttgttttcatataatataaaatattttatttcctgctgtctttctatgtatacaaataaccaagttgctagtttctttgttgtatgagcttttatgtaatttatggcatttccatttgtatgtagctgtaatgaactttgtctctgctttgttccttaccatggaaatgggttttttccccctcagatggattcagacaatagttctgggtggtaagtctccatgtaaggagttagcccttctatttacaaaggctgtccttaatttcataggtaatgtttctggaagttcagccattgacagaatgttataagagaaggttcttatcccacagagctttattatacattctctaatttcattttgccttatcattaatatatttttagtgtgttatacatgttacttatattgacttttcctttaacatttaaatagtgttgatgcaggatttttcttggcccctttgctgggctcgcaggagcaggtgccccatttactcagcctgccaggccgcatctggcttgcactccagtgtggatcccacagctgccacaactgcacactcagcccccacattcagtgggtcccgagttcttgtcccatgtccaagaagaatgaggtctcactgacaattgaagggtgatgaggacagagaattttattgagtgatgaagcagctctcagtctagagaggggacaggaaggtggtctctcactcgaagttgggtcatctccctcagtgtggctggatctggggtttttatgggcacaggatcgggggggcccatgggccacaggtagtattggaaaaggcaacatttgattggttaaaaagcattattcagaaagaaccagttgggaaagagcaggcaaacagaaatagaagttctctctctgggtcatgggtttcaggctgtttttgacttgaaggtggggtttcaccctgtctgactaggatttttctgcttcctgcctctatcagtgttgattgacttaatatttagtgagcttccatttgagcctaaagatgttatattaaatctaatgatttttatttgcatctagattattgcttatcatgtgtcagtacttctttcctgagtccatacttctttcattttttttctttttttgagatgaggccccactctgtaacccaggctggagagcagtggtgcgatcacggttcactgcaacccctcgagcctgggcacctgctcgcctcagcctctggagtagctggtactataggcacacaccaccacgcctagctaatatttctattttttgtagagatggggtttcaccatgttgcccaggctggtctcgaactcttggactcaagcaatccacttgccttggcctcccaaagtgctgggatttacaggcatgagctactgcacctggcctctattcatttttatatacagtgttgtgagtactaattttcaaatatttgttaacctgaaacccttcaaaagggttgaaaagttatctaaaagtacagttatctactacagatataggtggagaagcttatggtggaagaatgctagcagctacagccttgtgaacatctcttcattttatcatctatcgtgtgaaagagatcttctatcgtttgaaagggatctttaatctttcctgtgtttgggtatcttcgaagggctaggccatacatagaacagggtaggagaaaggaggtaagtaaggtgaaaggagaaacagatttgtttgacacaagtgttgtagggactgatactttgttaccctcagttgtgtaacatgttgcttgattctgttgaagaccctgtattccgggtgttcattgattttttttgggatacttccttgacgatctgtatgaagcaccctaagagaacatgttagaacatgtagtttctctaaaaattccactttgaatttttggaagactgctatgtattagtcaaaaaatattttagataaatttctttcccctgccctcttattctttgactaattagtcaaatgtatacaaagggtgtcttcctgtatttgaaccaaccaaaaacacacatctgaactgtcagctaaggggtaggcttggtgttatgatcaattagaggagtcttgcttctagaacaatacccactagaacaataaaaaatccaagtctttttttagaactgttgatatgatttaaaagataagattaatgggccgggcgcagtggctcacgcctgtaatcccagcactttgggaggccgaggtgggtggatcatgatgtcaggagttcgagaccagcctgatcaatatgatgaaaccacatctctagtaagaatacaaaaattagccaggtgtggtggtgcgtgcctgtaatcccagctactcaggaggctgaggcaggagaattgcttggagccaggagacggaggttgcagtgagctgagattacaccattgcactccaacctgggcaacagagcgagagcaagactccatctc

SEQ ID NO: 16693 - protein, 109 aa, Homo sapiens [sequence omitted]

SEQ ID NO: 16694 - DNA, 1449 bp, Homo sapiens
gtgaaatgaatgacagcaatattataagtcatccggttccaagatggccgaataggaacagctccagtttacagctcccagtgtgagtgacgcagaagacagttgatttctgcatttccaactgacgtaccaggttcatctcactggggcttgttggacagtgggtgcagcccatggagtgtaagccgaagcaggacgaggcatcacctcacctgggaagtgcaagaggtcagggaattccctttcctagccaagggaagcgtgacagatggtacctggaaaattgggacactcccaccctaatactgtgcttttccaactgtcttagcaaacggcacaccaggagattatatcccgcgcctggcttggagggtcccacatccacggagccttgctcactgctagcacagtagtctgagatcaaactgcaaggcagcagtgaggctgggggaggggcatccaccattgctgaggcttgagtaggtaaacaaagcggctgggaagctcgaactgggtggagcccaccacagctcaaggaggcctgcctgcttccgtagactccacctctaggggcagggcatagcagaacaaaaggcaacagaaacttctgcagacttaaacatccctgacagctttgaagagagtagtggttctcccagtacagagtttcagatctgagaacagacaggctgcctctttaaatgggtccctgacccccaagtagcctaactgagagacacctcccagtaggggctgactgatacctcatacagctgggtgcccctctgagacgaagcttccagaggaaggatcaggcagcaacatttgccgttctgcaatatttgctgttttgcagcctccactggtgatacccaagcaaacagggtctggagtggacttccagcaaactccaacagacctgcagctgaggatcctgactgttagaaggaaaactaacaaagagaaaggacatccacaccaaaaccccatctgtacgtcaccatcatcaaagaccaaaggtagatgaaaccacaaagatggggagaaaccagagcagaaaaactgaaaattctaaaaatcagagcacctcttctcctccaaaggaatgcagctccctgctagcaatggaacaaagctggacggagaatgactttgacgagctgacagaagtaggcttcagatgatcgctaataacaaacttctctgagctaaaggatgaggttcaaacccatcgcaaagaagctaaaaaccttgaaaaaagattagatgagtggctaactagaataaacagcatagagaagaccttaaatgacctgatggagctgaaaccatggcacaagaactacgtcacacatgcacaagcttcagtagccgatttgatcaagtggaagaaagggtatcagtgattcaagatcaaatgaatgaaatgaagcaagaagagaagtttag

SEQ ID NO: 16695 - DNA, 2218 bp, Homo sapiens
aatcttatgtcgtgccttatatatttttacaaaaagtggtatgtagatacaaatgaataaatgtaaccacttaattattttgaaaatatccataagatttagctgtttttgtatggttgatatgtaagaaatttggtttgttttaaccatttataggtaggaaattatcctaaaaaataagatgcaagattatgtttcggtttcttcctcccaatacatttttatgtccccatttgatgaatttttctaaattccatttgcacacttaaaagttctaaatcattgcatatgttgtattgaatagaatgtgaatttctcagcaagatattaggtcccctctaaatgtaatccaaattgatatcatttctatcgatttctgcaaattaaggtattctctggaaaaattagattatttggatgcttcatgaacaaaataatctgtatcttcatcatatctaagattcttctatgacttccaactggaatattcagaaaatgatcacattacaaatgatcactctagcttccatgccactttcctgaaatgttcttgccagtgagaaatcatcacttcttccttggaatttctaaatattttattgttcaaaggcgtaattctttactaagttgtaaactcattgagataaagaactatagtctgtatatctgtttgtctcagaaagtgttttacacatagttaggttccaatatacatgtaatcaaataaataaagaaaatatgatttacaaaaatactaaagaatggtatgttgcctaccaggtcaaaaagaaaaagaaatactaaaatactaaatattaatattaaaatactaaagaatagcatgttgcctaccagttcgaaaagaaagaatcagataattttatttgccatagataagcaatattgcttgctttattttgggtaacaagctataactggcttgagtcatgtaaaaacataatatatgcaagttttactacaaattaattgttaattctaaatttgggggcacattttaggtagggtaaaatgacgattttgttgttaacacattttcttccctaaactcttttttaaaaaacctccattatgtttgatccagtctgttggttgaagcacaatctgtactgcttcaattacttaggatgaaattagccacatcattattaacaccagctagaaattttggaatgattattaatggtagcacatgaagcagaaagaggaccagctgaccctggtggagtaataaagttaattaatcaagcaggaggcagatttcatatttatgagtctacccagaggaggacaaattccagtatataagactttaatttaaagtaatctccagtcaatagcacactttcaacattggcagccatagccatctaaatgcaaacatcagtgggaaagaggaattttctagcagttaggttgtctgaatataaagtggcctgtcctataaggtagcgaaggcccctcataataagaatttgtgctgaagctaattgggaacctgtttagcatgtggtaaaagaaatccctgctttatttaggaggttgtgatacaagtttaacgtaagttcaaacattgagatttcataacaacatatttgtgagttctaattatgttccaatcacttttttaaaatcttttctggttaccaaaacatgtatagcctttgcagaagatactattatgccaattttacagatcaagaaagtaaagcataatgaagtatagtaacttaacagtacccacaggtagtaagcattggaatggggttattatggcattaggcccttttcatactaatgcttagaaccaaaattgagttccctttctacccattcagtactttcacttttctttttcaccttagtcattatttataattttctacatgactattttttattattacctccaattcgtcaccctcccttaattacttacattttgccttagcataatgtctttgaatataagcggattttcagaagactatttataaatctcagtgcatcaagttcacagagctgtgcagtgttttaatgcatatttctggattaatgtacacatggtagaccaagtataacactccaaagaggcaaaataatgcagttagtgtgatttacttaaatatgcagggtcctgatgaagagtaactatttgcacagaaagtagaagtcgcccttcaagagagactgaattgac

SEQ ID NO: 16696 - DNA, 2493 bp, Homo sapiens
aatatggttaaaatttgacaagataatcctgaagtttgtaatgacaagtctggagacaatataaatgcctttcagtggggaggacgattttaagtttatttatatgtttactattgaatatgtgcagtctgaaatgaatggtgcatctccatttgtttttcaagatagattaaaaatccaaggacagaagaacattgtgaataataagctcccatttgttggcgatagtaggtggagtgatagaagaggctgtgggtacataaacaggtgatactagtcaagagcaggtcaaatggaaagaatgaagacatgtttggaggctactggaataattccaagtaaaagttgctaaaggacatgtactaggataatgacataatgctttgtaaaaaacaaatctgaaaaaattataggtgaatgtaatgtacacaaagctatctgaacattgcagattatgggaagagaggagtcaaagatgatgattccaggtttcaaatctggtgacaatatgtggttcatttctcatctgccctcccctcctatgtgtactttgctgttccttctcttataagtggggtaatgctaaagttttcttcatcccttgctttccccactctctttcttccacattctctttcttcttcgtggtttcagctgtcatctctttttggatgactcccacatttttacctctggttctgatctctttctcagcctctggtccttcatatcccttgcttgcttgggatgttatcatgttatgatcatggtcttagtgtaatcagacatctgttcaattccagccactgttgggagatatatgtcaccttggaaaagttccttaacttctataagggtcaatgaccccatttataaatgggcatatgaatactacttatctttcaagggtgttaagagcactgaatgaataatgatcttctaaaaacagtacataaactgggctcattctccttggtatgaggtgaaatgaaagaaatttagataatattatatctattcacctatcttctgtctttcttgtttttggcatataatctattatgaaccatcatttattggaaaggactgtctgaagtatagctcagaaggacacatcagaaggtgtggggctcgtccttatggatggagaagtggggctatattggtgtggggaatgaaaggatgagacaggacaaaatgtagaaatagattaaatatgagagtcaaggaagcattaaattatgacttagctgatatatagaataatatgttaccctttagagatacaggattttttgtagaagtttttgcagaaaagtgaaggaattgatatttattacgttgactgtaccttgtgtggtgcatttgttgcaactgatgaaacgatactgatacatttttatattaatactaaaatacatagtttgcattagggttcatactttgtggtgtacattctgcgggctttgacgaaggtatggtggcatatattcattgttactgtatcatgtagaatagttttagtgccctaaaaatcccctttgcgtcacctctttcattttcccctctccctgaacaccaggcaatcactaatctttttctgtgtccacatttttgccttttccagaatgtcatgtagttagaatcatctagtgtgcggtcttttcagagtggcttctttcacttagtaatatccttttaagattcctcaagtctttccatggcttgatagctaatttctttttattactgaatgatattcctttgtatgacgtaccacaattcatttatccattctcctgctgaaggtcagattgcttctaagttttcatagttatgaaaacttgtattttaagattaaaatctggaagtttttattgatattaggcattcgtttcttagggctgctataataacagagtaccacaaactgggtagcttaaaacaacagaaatttattctttcatagttctggagcctagacatcagaaatcaaggtgttagcagggttggcacctgccaaccaagagagctttgagggagaatctattccatacctttctcctagctgctcatgagggttagccatctttgatgttccttggattgtaaatgcatcagtccaatctctgcttccctcttcatggggcattctccctgtttcttcacattgctgtcttcttgtgaggataccagtcatattgaattaggggcccaccctacaccagtatgacctcatcttaactaattatatctgcaacaaccctatttccaaattaggtcacattctaaggcactggtggttagacttcaacaacgttattagagggcacagttcaacccatagcatgaagtgatgctttctagaccattcttctttagatagtcatcctttttgttattgttgaatcatggatggtgatgtaacgttttccagctttggctagttgtggtttcagctgaaaaaccaaaatgtccctgactgtgttatat

SEQ ID NO: 16697 - DNA, 1607 bp, Homo sapiens
attataatgaggattaaagtaaagaacagaccgggcatggcagctcactcctataatcccaggactttgggaggctgaggcagaaggatgacttgagccaggggttcaagaccagccttggcaacatagcaagaccccatctctatttaaaaagataaatataaatatataaagaacacattgcaaagcatgtggcagtagtgagctttcaggaactggtggtgctaatgaataaatagcaccttagtaatgctcattctatctcactcacaaactggacagttcatgcatttgctggggtttcattttgaagtaagaggatggtttgtttctgcttagttttccccagtgactgagaaccctagcaagaaaacgaaacacctgtgcagacacattatacccatggagctgcatttctgtatgtactttttgcaggccattatcagacattacactgccccagaggttaattgtaatctccagagtccattgcacttccacagtggctgggatctttggccactttcccagcctgtttatggggagcctgacctgaagcacatctcctaagtgttttccaagttggcactgagtctctccgacttggaaatgccagcacacagctttgtgtgtgcaatgatttagctcttatgaaggcgccagtgaaatgcccactcctacccgggtgttggacattttggagacctggaaagaagtaagcagtgttattgacaagcacaggccctgcaggggactgtgggaagttaggcatgattctgtcccttgtgccttaacaaggactggtgaggacactcagccattccctcagtgcatcaaaatggaggccagcacattgtatagccttagtttctctatcagggattagggtgataatgattaaccagaggacttagggtcaactaatccccaaagtggttctcagaatactatgaaaatgtagcacaggaaaaggttccatggccaaatatatttagaaaatgcaatgcactgtctttccttctttgcattttataatatgcaatttgcatattcaaggccctgagaagtcctgcagtaaggaaacaaacttaaccttgttcagtccagcagcacccaaatcaaatttccatgagcatctttttccctttaacatccccagcagctaggaaaaacactgaagaaattctagattatctaattatccccaaagtttatttttatttttttaacttttttttttagtttttttgtattatatcctgctccttctgtagattgcaaaagtttataacaagtgatatgtgaatattaagaaaggagaatctgagccaggcgcagtggctcacgcctgtaatcccagcactttggcagggcgaggcgggcagatcacaaggtcaggagtttgagaccagcctggccaacacagcgaaaccctgtctctactaaaaatacaaaaattagccaggtgtgatggcaggcacctgtaatcccagctacttgggaggctgaggcaggacaatcgcttgaacccgggaagtggaggttgcagtgagctgaggctgtgccattgtactccaggctgggcaacaagagcacgactccatctc

SEQ ID NO: 16698 - DNA, 1937 bp, Homo sapiens
  CDS (89)..(1552)
cttgctgcctcttccggctgcggggcgagtagtcgtccgacgtctggccgtgagacgtttcgggagccggagtctctccaccgcagacatgacgaagggccttgttttaggaatctattccaaagaaaaagaagatgatgtgccacagttcacaagtgcaggagagaattttgataaattgttagctggaaagctgagagagactttgaacatatctggaccacctctgaaggcagggaagactcgaaccttttatggtctgcatcaggacttccccagcgtggtgctagttggcctcggcaaaaaggcagctggaatcgacgaacaggaaaactggcatgaaggcaaagaaaacatcagagctgctgttgcagcggggtgcaggcagattcaagacctggagctctcgtctgtggaggtggatccctgtggagacgctcaggctgctgcggagggagcggtgcttggtctctatgaatacgatgacctaaagcaaaaaaagaagatggctgtgtcggcaaagctctatggaagtggggatcaggaggcctggcagaaaggagtcctgtttgcttctgggcagaacttggcacgccaattgatggagacgccagccaatgagatgacgccaaccagatttgccgaaattattgagaagaatctcaaaagtgctagtagtaaaaccgaggtccatatcagacccaagtcttggattgaggaacaggcaatgggatcattcctcagtgtggccaaaggatctgacgagcccccagtcttcttggaaattcactacaaaggcagccccaatgcaaacgaaccacccctggtgtttgttgggaaaggaattacctttgacagtggtggtatctccatcaaggcttctgcaaatatggacctcatgagggctgacatgggaggagctgcaactatatgctcagccatcgtgtctgctgcaaagcttaatttgcccattaatattataggtctggcccctctttgtgaaaatatgcccagcggcaaggccaacaagccgggggatgttgttagagccaaaaacgggaagaccatccaggttgataacactgatgctgaggggaggctcatactggctgatgcgctctgttacgcacacacgtttaacccgaaggtcatcctcaatgccgccaccttaacaggtgccatggatgtagctttgggatcaggtgccactggggtctttaccaattcatcctggctctggaacaaactcttcgaggccagcattgaaacaggggaccgtgtctggaggatgcctctcttcgaacattatacaagacaggttgtagattgccagcttgctgatgttaacaacattggaaaatacagatctgcaggagcatgtacagctgcagcattcctgaaagaattcgtaactcatcctaagtgggcacatttagacatagcaggcgtgatgaccaacaaagatgaagttccctatctacggaaaggcatgactgggaggcccacaaggactctcattgagttcttacttcgtttcagtcaagacaatgcttagttcagatactcaaaaatgtcttcactctgtcttaaattggacagttgaacttaaaaggtttttgaataaatggatgaaaatcttttaacggagacaaaggatggtatttaaaaatgtagaacacaatgaaatttgtatgccttgatttttttttcatttcacacaaagatttataaaggtaaagttaatatcttacttgataaggatttttaagatactctataaatgactaaaatttttagaacttcctaatcacttttcagagtatatgtttttcattgagaagcaaaattgtaactcagatttgtgatgctaggaacatgagcaaactgaaaattactatgcacttgtcagaaacaataaatgcaacttgttgtgctct

SEQ ID NO: 16699 - protein, 488 aa, Homo sapiens
MTKGLVLGIYSKEKEDDVPQFTSAGENFDKLLAGKLRETLNISGPPLKAGKTRTFYGLHQDFPSVVLVGLGKKAAGIDEQENWHEGKENIRAAVAAGCRQIQDLELSSVEVDPCGDAQAAAEGAVLGLYEYDDLKQKKKMAVSAKLYGSGDQEAWQKGVLFASGQNLARQLMETPANEMTPTRFAEIIEKNLKSASSKTEVHIRPKSWIEEQAMGSFLSVAKGSDEPPVFLEIHYKGSPNANEPPLVFVGKGITFDSGGISIKASANMDLMRADMGGAATICSAIVSAAKLNLPINIIGLAPLCENMPSGKANKPGDVVRAKNGKTIQVDNTDAEGRLILADALCYAHTFNPKVILNAATLTGAMDVALGSGATGVFTNSSWLWNKLFEASIETGDRVWRMPLFEHYTRQVVDCQLADVNNIGKYRSAGACTAAAFLKEFVTHPKWAHLDIAGVMTNKDEVPYLRKGMTGRPTRTLIEFLLRFSQDNA

SEQ ID NO: 16700 - DNA, 2624 bp, Homo sapiens
cgtggagacatgcaccatcctggtctggtgtggacaaggagcagggcagcggggcaggcagggtgaggatggactccttgaacagtcttgcactgaggagagtgttgactgacatatttggactcttctaccttgtctgtcatggtctaatgcatgtcttttctgggtgtggtttcttttctttttttttttttttcttttttcgagactgagtctcacccaggctggagtgcagtggcgtgatcttggctcactgcaacctccacctcccgggttcaagcgattctcctgcctcagcctcccgagtagctgggaccacaggtgtgtgccaatacacccagctaatttgtgtattttttagtagagatgaggtttcagcatgttggccaggctggtctcaaactcctgacctcagatgatctgcctgccttggcctcccacgtgctgggattacaggcgtgagccacgcgcccagcaggatgtggtttcttgaggatcctctcagggctttggcctctcccagctcctatcccactactattagggtcacagaggaggaggtcaagactgggatttacccatgaaggctctttggatgaaatcagctggatattggctgggtcactttgttaaagaccagaacctggggtgggaagcctgtgcctgtttggatgtcagagcccacagccatgggcccctggcccagcttcctaaccagtttggccctgtttgccttggaagcacttgggctgtggggtcaaatggtcccacgcgctgatcttggccttggcgcttgctggctgcatgaacatgagtacatcttgtcacctgtcccagtttcagtctctctattctgggcagaaggattttctcaccgacaaggactaagtaccctcctgtaggctcaggactagggcagagcttgtacacgatagaggagatgctcgatcgggttctctctccaagtcctgcttctcatggatttaaggggctgtggagggcctgactgctgtgctgagttaggcccggggcctgccagtggagttctaaggcctttaaagagtttgagttgtgttttaggaagaccacctggggcagtgtggaaatgtcatgattgagggagagagtttcttgaagcaactccgtctagtgcagagcttctcaagctagggtgcatctaagtatctggaggagctgttaaagcacgtgttgctagatcccactctgagagttttatttttgtttgtttgttttttgagacagagtcttgctcttgttgcttaggcaggagtgcaatcgtgcgatctcggttcactgcaacctcagccttcctgggttcaagcaattctcctgcttcagcctccccagtagctgggattacaggtgcctgccaccatgtccggctaatttttattttttctttttgtatttttagtagagatggggtttcaccatgttggccaggctggtctcatactcctggcctcgtgatctgcccacctcggcctcccaaagtgctgggattacaggtgtgagcccagccgagagtttgattttctaacattctcaggggtcgctgttgctgctgccgctaatgttggtaaagtggttagtcagatagatacagggcccttgcccagggtttaaacccttgctgggtttcaactttagatcttctacttgtagctagctatgtggccttggccaggtcctctaacctgtgtgagccttagtttcctcatctgtaaattggaatgctacctacttcctaggatgttgtaagaatcccatgatttaacgtgtataatccctcagcacagtgcctgtggtcagcatttaatagaggatcgttttattattttattaataccagtgaggaggctgttgctgaagtccaagggagagatgaaagagaggctgaacgaggctcgtggctgagggatggagggcatctgttttctcagtggctcaaagcctatgatcctccctcataggagaacacgttgcttccttccacagcgggaacttgctgaaaacctgtcggctggtgcctgtgtgtcctctagagggcagtggagtcaaggctgaggatggagcattgtgtgccctcggttggggctggtctgtgcgttcagcctttattccctgttctgaaacccaattgtgtatttgcattggactgtcccctcctccttgctctgtgtacttgctgacgctttttggaaaacacatcacagggcacctctgatttcctgcttgtcttgtagcctgggattagcagtagctgaagcgtgctgctttctggcagttgtgtttatttctcaagggcacaggctgtacagatcatgggggcctgctccctgcagctcagctgagcctaggatgaaccacagttgctcttatgccagttaaaaacttggggcctgttccatcttgcatttcctcccccgcttcccagtcctcgcccgcaccctttgatcctgtgagtggagaaatgaagagaactccaaatccttaatccattttgaaggccggctggcagcagggctttctgtgggcctggtaagcagccctagttgaatcattttagagaagggcaggtattctttcaaggttatagaaag

SEQ ID NO: 16701 - DNA, 2598 bp, Homo sapiens
  CDS (126)..(467)
ccaagtttattcctcctaattatcacacacctccttatctcactgctgagccagaggtaacttaccaccgattaaggccacaggataagtttctggtgttggctactgatgggttgtgggggactatgcataggcaggatgtggttaggattgtgggtgagtacctaactggcatgcatcaccaacagccaatagctgttggtggctacaaggtgactctgggacagatgcatggccttttaacagaaaggagaaccaaaatgtcctcggtatttgaggatcagaacgcagcaacccatctcattcgccacgctgtgggcaacaacgagtttgggactgttgatcatgagcgcctctctaaaatgcttagtcttcctgaagagcttgctcgaatgtacagagatgacattacaatcattgtagttcagttcaattctcatgttgtaggggcgtatcaaaaccaagaatagtgagtggctctttcactggcaattctcaaatgatatacatttaaagggcagattttttaaaaagatactactataataaacatttccagttggtcattctaagcatttacccttttgatactctagctagtcaggtactccaaattgactttgcagcagggtggcagggtcaggagagtctggtcctgcctagctcagatttcatggcacctgcacttgaagcaagtcacttctttatcacaggtgtcttgaaacattagcttcttttaccaacctgagaaaattaggatgacctggcaaataagatcttgaataggccaaaagcaagtatcttgctgtgtgtagtctcttggttaaagtgaagaaacagtactgttcacacctttcttcactgagattccagtgtacatgagaacatatatttattgcatgattttctagatacacagtctatgcattattcatatacatttattttagcctaaagtggttttcaaatccagttcttcaagccataaatgaccaagatccaagcaatctgaatttgtttttgtgattatttgactggaatgcttcttaagtggaataactatactccgttatccacccgatttcctaatgtaattgaaagattttctattttgccacacacttggagacaataagggtttttagttttatctactcttctattgaagttaaagaaagaaaaaaagatttttttatttgtattaatgaaaagctttagtttaaaataaggagatccagaataaaaagaagagactgatctcttcaattattgtcatctgtagccaccagcacatcactcttatgtaatccccaaaggcttggcatgccgtaagtgtgtggtgggtagactgctgccggggaatcgtacttcttatttagtaatgataagacttttcattatttttggaattttaaagatgacataaataagtttaaatatcaatttggggagtaaggtttaatattgccatcgggtattgagacaggaggaagtttctgtttttctccatttagacataggtcaattaaaatatttgggtttaaaatgactaaatgctttaaacatattgtagcttaagatatatgtgttaagatatatacatgagaaactttaaaaggtaactactgtgcatgcctgatgcttaatagaatacttagtggcatcaaatgtttgcagcagtctccataattatattcagtcccttctaatactgtatcaatgtaaatgaaataaatatattcaaattggctttttgatatgcatcaagtggcattttgttcctgtgtttaatagtgatctgtatacagctgtgcacatattgtcatcacttattctagcatcactgttaaggctgtgattatgtttgatattcacctggattttaatacaagccaatatcagcttcccattgtgtaataacttgggtgtttaggagtcttttcacattttttggggatatgaactagatgttcaagaactccttctggactgtggatactgaatcagtgtactattggctgcagaatttgtttcaattgaaaatagactcaggaagattgctgctcagaatatcatataatgtttattttttgaggtgtttttgtttttatttgtgtgttttttttttttaagtcagcttggaacttttttcctgggtagtatttgggagagggaaaggctgtactatatatttatttctaaatgttttgactgggcatttttcttttaatgaaatatgtggactgctctagcaaaccctattttcagctactatttgaatattcttgaacaccaccactgaagagtttcatatacaccaaataatgtctcatctctatagtacagggaatataaaattggtttcctgtggtcatgatcaagatagtagtattattacacaagaaacttggtctgcagtctggaagcttgtctgctctatagaaatgaaaatgcagcatgcagttgacattgtggaaatgaaagtaattgggtattagaaatctgaaagtactgtcatctaaaagcaattgtgattttattgtaattggttgtcactgttgtacggtgtctagaattaaagaatacatgtaaactttc

SEQ ID NO: 16702 - protein, 114 aa, Homo sapiens [sequence omitted]

SEQ ID NO: 16703 - DNA, 3170 bp, Homo sapiens
  CDS (358)..(792)
aaagtacatcctttttgtctccattttttccctttcttaaacaaagcaaacatttgtatactcacacactgaaggaaaaaagtgcaagtgttataagataattagaacggttaggataattgccttttatggatacataatgcttcagttgtttactgctaaatgaaatgtaaaagtatatattagactaaggaatagtgtacaaaatagatctaaatacaaaggaaattgtgttctgtctgaaaatttgtagatgggtctaaattaacaagaataaattaagaaggatatatacacactcatttatacccttgtgcgtatctcacatatgtgaacacacacaccaaatacactgaaatgtccatatttagtgccaaaaattgtgatgaaaaaccagtgggattatcctttgtaatagctcattctttaagttgcatttcaataaggcattgctgtgaatccagaggagattgtcaattacagaatttttttcatgatctagtatttgcttggtgcctcagagaaaatggttgttcatctctgcccctcactgttcatgtttgggactattgtttggctgcgccagtagagcttattctgataagctcaccaaatttcaggagtagcctcctttcaataactccacacttgtgcatgtggcttagtgaacttactggtgactcagtcatagcaagaaagggcatctcatgtctatgtgactacaaatatcagggaacagattctccatcaccaaccccaacctctaccctaacacaaaggtgtatgacaaaatgagacaaaatgaaacaaaattgctccacatgctacagtggcctactgttgactagaagccttactgataacagaaacagttgattgacacatatttttaaataaatataatatttctctagttaggttttctatttcattttattttaaagatgacaaaaactaaatatgcttctcaaacctctacctttttcaaattaagtgaagtcttcttctcatttaaagctgtttatactcaatttgaaatatgaaacatagcttcaaatccaacaaagagaatgttgctaactctggataacacttggggacttgagtccctgaaaggctgattgacaaccagattgacaactctgattgacaaccttgcttactttgatagggcttactatacttagtatgatagtttttaaattaatttagagcagaacctttccaagggatctgtgacaagaatggttaaatactgaagtgttgaagaaggaaataatttatcctgaactttgaaagtgtattattactaatgaatttaaagataagtgtagaattgatcatttatcatttttaaaccttttaaattagaattataatgaaaaatgcactccccatcccacacacacaaaccccaacaactctttaggtgcctacaggtaggaaaaattgcatttatctgaattaatcttggagtgaatactaaagttagttggaaaagctcctgaaatgtatgagacctcgaaatatcaattaacaaaaaatagtacctaaaatgtcttctaagaagtgtagtcttttaactaggatccttcttcctgtgtaaacactgaaatgaaattttggaatgaacctaaggtggtcctgaagtgctgtgttactagaaaaagatataattggtggaaagggtgggtggatacacaggaagaagcaagaacctgaactcctgctggctgatggaagaaaatgggtgatcaagtttttgcttctgaatatttgacataaacatcataattaacctcacctaaagaaaacttaaaaggccaggagtagtggctcacacctgtaattccagcactttgtgaggctgaggcgagtggatcacttgaggtcaggagttcgagaccagcctggccaacatggtgaaacctcgtctctactgaaaataaaaaagttagccaggtttggtggtgcatgcctgtaatcccagctactcgggagaccgaggcatgagagtcacttgaacctctcatggcggaggcggaggcggaggttgcagtgagccaagattgcatcactgcactccagcttgggtgacagagcaagagtctgtcaaaaaaaaaaaaaaaaaaagaaaaaaaaagaaaagaaaacacaagaaaaatatttgagagtcctcaaagctttgtataaacacattctttctggtacattcaaaaggaactgatttcagattggtgtagggcaaagcagaaagtaagtgtgtggtcacagaaatgaaaggacaagagagttgacaagagttacaaaagacagacaacagatcattaacattgctgttgatttaatttggtcactagaaatgcggcattcatttttaaaagaacgtctatctatccataccaataatctggagatgatcacactttccaagcagagagctgaagtgaaggcttgaggggatgcctctgcctctcttcattttctttcatctacatggctgaccaatattcacgcattaatagattttggtttctctctggttccaacatttacataatacagtaatagttataggaaagggtttgcatgttcattatataaacccataccgattttttttctacattcatctataaattacatacgagtggggtagctctatttcttgctaattcctgacagtatttattttaagcatgtctttaattcaaagggatcaaatatgttataaggaccacgtatttattatttcaggtgttttacacagtatatcacattttatccttaaacacatgcacatataggtatgacactttatacttgtatagtataaaaatattaggccaggcgtggtggctcatgcctgtagtcccagcactttgggagactgaggcaggcggatcacaaggtcaggagtttgggaccagcctgaccaacatggtgaaatatacaaaaatacaaaattatacaaaaaacatgcaaaaaatatacaaaaattttgtcctaaaaatacaaaaattagttgggtgcggtgacatgcacctgtaatcccacctactcaggaggctgaggcaagagaattgcttggacccgggaggcagaggttgcagtgagccgagatcgtgcaactgcactccaacctgggcaacagagtaagactccttctc

SEQ ID NO: 16704 - protein, 145 aa, Homo sapiens
MSIFSAKNCDEKPVGLSFVIAHSLSCISIRHCCESRGDCQLQNFFHDLVFAWCLRENGCSSLPLTVHVWDYCLAAPVELILISSPNFRSSLLSITPHLCMWLSELTGDSVIARKGISCLCDYKYQGTDSPSPTPTSTLTQRCMTK

SEQ ID NO: 16705 - DNA, 2393 bp, Homo sapiens
gctacagcagaataaaaactgctgtcaaagagctattgccagctatcagtggtggtacaaggacggttttgtgttcatctgaaacccagctgaatttataattatgtaggaaataaacagttaatatggttatataatagaaacagtaccacacattgtaactaaattatactatgtatgcctacactaccattgtaacttttggaataatgattatactatttgccttattgctttttgaagtatgggtattttagtgcatactttgtagacctcaaaacccatgaagggtctcaaagaagctggctggatacaagcctgctgtggatgcctttttactctcatagattgggattacctaaattcaacctattctctgtttacaaactccaactagagcagctatgcgaccttgtgcctttagactcttggtttttcatttctccccgtcccttccccacctttttaaagtaagccacagcttttctgattgaaagagtgaaaggccagtgcatataatgacaaactgatgataaccttatattggcagtagggggtggggggggcggtggggtgggacgatcagctgtcatcaatttgcacagcaagtattatctcctgataagatgctggtgaatgcaggggagtgagattcattgctcatctttggatatgaagtctgttagggaagaaacagtgccactattcccttagatgcaacagtagcatagcctcttcacccaggcgtcccaaaagcttggcgtgaagatttcagcaaacatgtcttacaacatgaggaggaggagtctaaatcagtcaggggataaaagtatcgaatcattgacaacacacacttggctttagttcttaggagggttttgtttttgtttttgtttttaggttgaagattttcttttaatattcagttttttgaaaaaaaatggatctacactgttaactgattgagactccactgtgattcacttgtttacttaaaaacttttcagggatgtctgtaaatttcagtgttaatatgtcatgaaaagtggtgtggattgatctaaggagggaccagaaataatttttgctattccaaatactgaaggaaaaagataattgatttatactatgttttaaagaaaaaaaaggtattgatgagcccccccccccaggacatttaaccttaaaatttattttaaatgtattcttttattattataagggaaatacagatggctgataaataccaaaaagattcaaaagcagcttaatttaaaaagcacaaagagattctggcttacagtgccccaatctcaatgtttttatagttgctgagctaactaatgtgattattgagtttacagatttaaaaattgtcactgttagagtatctactgtttttatgaagtcaaacttatgctgcctcagaaatccctgggtactgaaatggtaacatggaagtgaagaggtcactttgaaatattggtgagtcacaaagattaaagaaaaggatcagtttgcagatactcagaaaaggttattgaaataattactgaacagcacattttctctctaaaaagtagtttcatatgggttgtatttttaagatcagattatcattttgatatttggtcaaaattttgtaccttaggttacttagagccagatttaacatcatgaacattatgtggctttgtctttactacagatatgtggaactgtaaccaaatatgttgtctctaaaacttgttgattgcaaaatacagttctataaacaaaacccatatgtatatataaatgttaattttgcggaagtctggaaattataactatagcatttaagtttgagtctgtattggacaaataagcaccatgcttttcaaatgatttaaaaattacttttatttgcctctttattttgatggtggttggatttttttttttttaatagtaaaatcactaaacttgtgcaatggtagcatggaaattatctgaggtatattgtatgattgtactttagccagggtggacatagcttaaattataaaaactaaagatgaaagtacaaggaagtataagttatacttatgtaagtataaattcatgctgcctacttctaagagaaatttcattcttcataaccacataacattataatgccactgattcatacgggatttacattaattctatgggggaggacactagaattattagtgttcattttcatctaagatctttattctctaacgttcttggtcctattgaaacattgcagtatgcaaaactactgcaatgttaaacccaagagaaaagccattatcatgtgtatgctggtcatcatgatcagtgtggtacaatttttaaaaataaactatcatgcccttcatgcc

SEQ ID NO: 16706 - DNA, 2534 bp, Homo sapiens
gtcatggactggaagttaagaacttccacacaataacaaaaattatgggccagacacagtggctcacacttgtaatcctagaactttgggaggccaaggtgggaagatcacttgagcccaagagttcaaggctgcagtgagtggtgatggagccatgcactcagcctgggcgacagggtaagaccctgtctcagaattaaaaaaaacaacaacaaaacaacatacataaatacctgatttgtgtactactgagaaaagttcagttcttggggagagtttcagtttttcccatcaagaactgcgtggtattttttgttatttgtgtgtgtgtgcgcgtgtgagacagagtcttgctctgtcatccaggctggagtgcagtgatgtgatcttggctcactgcagccttcaactcctgggttcaagcgattctcgtgcctcagccacctgggtagctgggattacagacgcacaccaccacacccagctaatttttgtatttttagtagagatggggttttccatgttggccaggctggtcccgaactcccgacttttcaagtgatccacccaccttggcttcccaaagtactgggattacaggtgtgagccaccactaccagctgagaactgtgtgttcttatgctccgtgtgctacttatatctcagacaacgaccagattttttaccataccaagtaaaatagtaaggagaagggaaactgtacatatatctttttgtcttttaggaaacttttacaaatgtgattcagagattgggcatttcacaggcacacttttttctccctagtttctgctagctggaaattttctttctagcaatgtctttttttttttttttttttttttttttgagacagagtcttgctctgtcacccgggctggagtgcagtggcacaatctcggctcactgcagcctctgcctcctggattcaagtgattctcctgcctctttcccattttacagatgaagaaaacttgttcaaggtcttgtacccaggtctctctgacagcagtctcttgctattatttataaatgtctattgctgtaaatgccaccatttagattttagtgtcaaaacagaaccatagcagttcacatcttaatcagacattgtctgttagctgcatgagtggtggcctcattcagaaaagaaagaatgtgttattattgacctagttggactcagaggaagagattgggtctttagccaactggagtaatccttttcctctcttagagagaagcttggtcagagcaagactagcatttttggcattgttgaggttttctgaaaatcctatactaatgggaatctttatttgttgttaacattataatttctaaagtggagaagaagtaggaaactctgcaaatattttagagggggtaaagttcccatgacagtacattttagcatctgtttgaaaggaacctaaaacaacaaagtataattggctggctgacagcgaatttctgtgacctaacagtttagatgtaataattgtgaaataactgctctattagaatctttagagagagatttcaagaatcatagtaaacaggttataaaggctatgtcctaagtaatggtactgaaagaatttttcattagaaccataggcataatttaagacaaaagagatggtaatggtagaaaagagataaaagaattgaaaattgtgactgatgttagcagccttgaatgtaccaaatgaccaagggtatcagaagagagattggtaaaaataataggttctaagaaattgattataaaataggatcctaagcagaaaaaatgcatcctgagaatctctagtaccccattatgttcttcacttagtagtatgccatttctcctcttttcactaattcttttcccccttttttcccctacagacattccatacaccaagcttgggtgatgaggaatttgaaatcccacctatctccttggattctgatccctcattggctgtctcagatgtggttggccactttgatgacctggcagacccttcctcttcacaggatggcagtttttcagcccagtatggggtccagacattggacatgcctgtgggcatgacccatggcttgatggagcagggcggggggctcctgagtgggggcttgaccatggtaaggggcaagacattgtcaggcttaccccagctaatgggcatggcattaggggagacaaagttactctattccctactacacttgggtattacttgtttctcttcttgtggctaaaggctcaccaacaaagacttaatttcacctgaataaatgaaatttaccatgtaggtagattttacttgaaaaataatttaaaattgtacaatgtctggtttgaaaattatttattgtggtttttgggaaaaagtgttttctgcttttattatggccttcacatcctaggattcaaatttgaatgtgatagctggcacacggagggatttattcaaaaatggcctgaatcacgttgagcagccagcagaacagagctt

SEQ ID NO: 16707 - DNA, 2675 bp, Homo sapiens
  CDS (209)..(538)
gaagggagacagggaagtgctgggaggagaagggtgggtccctggcgagggctccacccccgggcctgtgcccacagacctaggtgaagacaggcactccagccttcacgtccaaatgttgcatttcccaagaccactttgacccgccacgcccccattctgtgcctataaaaaccccaagaccctagcaggaagacacacaagctggatgccgagagaaacacattggcgaaggaatacacaggtggatggacgtcgagaggaatgcactggtgtaggagcacactgggatgccagcaggccatcgactggtggaatgacacaaagtttggctggggcagttggagaagagttgggccaccaagcggccagactccaggggaaaaccatttcccttctggctgccccatctgctgagagctgcttccactcaataaaacctcgcactcattctccaagcccacatgtgatcctattcttctggtatgccaaagccaggatacagaaagccctctgtccttgccataaggcaggggtctaattgagctggttaacagaagccgcctatggacggctaaactaaaagagcatcctgtaacatatgcccactggggcttcagctgtaaacatttacccctagacactgccgtggggtcggcgcctcacagcccgcctgtctgtatgctcccctagaggtttgagcagcgggacactgaagaattgagccacacccccatcacacacccgcaagtgggacaagggaacctttcccatttcactgctgtgacagtgcaaagctattaaaatgaagttgaggtagcaaggaataccaagacaactgagaagtccttataaagaacacattcagtacttttaagatgttattttccaaaacatacacttttgggttgcctgtcagactggagatgtatgcctgtcgagtcacgttacactgaatttatttaggaaatagtctgacatacagaagtttcacttctcctgccacttgtgaaggatttgtctcattggtgtggtgtcagcctggtgagataggacttgcttgtggtttggaagctgtctgtgggcaactccaagagctgttgtgctctgcctctttatgaaccttctgtgcttatggaaatggttcccagcgtgtgctcctcaggaatgagtctgagtgacagaggtgccagtaggctatgagatggtagcaatgaccttagctagtcttttttgtttgttttgttttgagacagagtctcgctccattgcccaggctggagtgcagtggtgcgatctcggctcactgcaacctctgtcacccaggttcaacctctgtcacccaggttcatgccaccgtgcctggctaatttttgtatttttattggagatggggtttcaccatattggcctggctgaccttagctagtctttcttaagaggctgggagcctgaggacagttgagaggtactgagctagttaaacctcaggcgctctccctgcgaaggctctatggcagataccacttggggctatagaagctgttacctacagtgtaaattctggatttcaatgcagagggcagacatagggctactaattttattttgttttgcaaggacattgaaaaaaagtcattgtttactgtcgtcagcattttataaaagggaggatactttttaatcacaaaatatgaagaagtttattatttgttttttgagatggagtctcgctctgtcatccaggctggagtgcaatggcatgatctcggctcactgcaacctctgcctcctgggttcaagcaattctcctgcctcagcctcccgagtagctgggattacaggcatgcaccaccacgcccagctgatttttgtattttttgtagagacaggatttcgccatgttggtcaggctggtcttgaactcctgacctcagatgatccacccaccttggcctcccaaaatgctgggattacaggcatgagcccagctgtggtttcttatatcatactgttaagtgtacttttaaagctttaaaaagcagtgttaaccctttcttaaaacagatttcagggaagacagacgtttaaaacattagccttctctccccatctggagtatggtttggaagtcattgctttgtagtaaggcattattttcctggtacattgccaaggaccaacaactgttaaatcaacaaactaagattttcttctagatttgtatcggattgtgactttgctttctccctttcaccacccattaatgcttagtaaagccactatggacctcacgtatctaaacccttccctgaaatgcatctctcttttcataccactccaatgggaactcctgttgatttgtttctgggccctgacagattagcaggaaaagaaagcgctttagaaaagtgagaggggagttcagaggttagaggggaatcagaaaattaatgtcatgattatcaagaatgtttccagaaggcagggctcatcagtccttgacaaaaaggctgatgaaaaaaatggagttgagtgcagccgatcacctcaataatcctagcagtttggcaagctgaggcaggaggatcacttaagtcccggattttgaggttgtagtgcgctgtgatcacaacactgcactcggcctgggtgacagagctaggctgtctctt

SEQ ID NO: 16708 - protein, 110 aa, Homo sapiens
MPRETHWRRNTQVDGRREECTGVGAHWDASRPSTGGMTQSLAGAVGEELGHQAARLQGKTISLLAAPSAESCFHSIKPRTHSPSPHVILFFWYAKARIQKALCPCHKAGV

SEQ ID NO: 16709 - DNA, 2196 bp, Homo sapiens
tcttttgaactctcctgtggtcagctgtctgctttccttgctcagcacggtgttgggatggggtttgtaaatttaatttcagataacatcttgtttgtgaaaaaaagaaaactaaagatcagtgtaacaataatagtgaagcatatggaataaaactaaagatcagtgtaacaataatagcgaaacatatggaattgtgaaggaaaataaataggtttagtatacacaagaacatattgctctgatggttttattttattttatatttgttttttctctgactttaaatgctcctaaagacacatttggcatttttgcgccagtagcaaggatgtgcagagatgtattggtggaagaattctagtggttccctattaaaattctataacttgccgtattaccagtaaacgtgagctgccagagcctacaggtaggcaagggctcccagaaggagaggcatgaggaaaccttgccaagaaggcaggggaagccccagtggtcactcccacatggcattcagacggagggtcctccagcatcgtgggctcaagagttgtccaagtgtgtgttcgtgtgtgtgtggtgtgtgtgtgagagagagagagagcacgctagctctcaggatggggatgttggggaggaggcctagaactgggtttctccctctgtgtaatctactctctctttatcctcctcccagatacctctcaccctcgggagaagactcttagagaagcttgttacaaatgcatattcctcagccaccccctcctgaattcctgtttcagcaggagtggagcgggcccaggaatgtgcattttaaatcaggatcattctgaagctgaaggtgtagcctaggcttcgaccctaagctgcgttaaatgacttcttgctagagaagaccccactaaaagagtccagtgtcacccgccctggtttattaacacttgaactgggatgggaaggttttaacttattgcagagccaaacaaattaatctttaatggtgagcattgcttctgctcaccaagggaggggacctctgggagctctctgcagtgctcccctggccagctcctgggggaggggcctggtcactgtgaacacattctggttgtgcagaacccacggcgacaacagatcttcgctgatgtcctactgtgtccatggacgtcagggccatttatcaattcccagcagttaaaaaggggataatgaaatgttgcctgatccccaacttatagctggaaccgaaatgcatggcagattcatttgtcagccagcagcagcggtggcattttgggctctgtattctagggacagttcattccaagggtcttctctgcaatggagggccgctgattatttgtgacataattaacctttactcatgcacattttcctttttactattcatgcagttgctaattccaaaagtagatggcagttgtccaagacgtaatgaaatggatgccgtgagtgagagtctctcatttggtgaacgaggctgcggacccttgatagaaagtccacattgaaggaagcccccagtgaaaggaataataaaataattgtaataataaaatactggggaataacaaaatgttgttgagtacagtgttgtgaatgagacctgagtgctgaccccaggtggcctccaaggtaggacaaggaacacaaaacccaggagacctttccagggaaaaaaagcaaaaagatcaccacacccaagacacttgctttcctcttcatttttcctccctctgtcacccacgtagaaaaataaagatagaaaagagtttcttagccaagtttgaaaccagcctaatttacatggactgatgttcattttatcttgggcaatacttctaagaaggaagatttttttttgactttgttaagaaaggtggctgggcacaagggctcacgcctgtaatctcagcactttgggaggccaaggcaggcatatcacttgagccgaggcggacgtttttgagatcagcctgggcaacatggtgaaacctcgtctctactaaaaatataaaaattagcagggcatggtggtgcatgccagtaattccagctacttgggaggttgaggcaggagaatcccttgaacctgggaggtacaggttgcagtgagcccagatagccccactgcactccagcctgggtgacagagggagactccatctc

SEQ ID NO: 16710 - DNA, 2101 bp, Homo sapiens
tttaaagagatcaaactagataaaagtttactttattcttcatgatgtctgataggttgtttgctgatataggtgctgtgtctggttttcctttcatgacttgtacctagtgtagctatttatagtgtatttgacaaacttttccacttgtagactcaggtaggcctgcttgacctcctctggggatatttgttaatgtcttgtcagagttgataaaattttccatgttcatgctttcttttgattctcataataatcttctaaggtaactaaaaaagaatccttattttcacatttgattaaggaagctggtcctaagagattaagtcacttggtcagggtctcttggtgaggtacttaagtgaaattggttttccaggtgctggccttccttttccaaactaatcctactttgcgtgtgacctgaaaaacatttttgtgttacctgtttttgtttgtttaaacatgtacttgtttattagacgaaacagggagcccaaataaaaccagatgtgagctgcttttaaccatccctgaatcgtaatgatccatgtgtgaattatccctttgtagctagtttttaatcccagactgggctcttccagtttttcagcctgctgttcaagtctccccagcccctgacttggttttgtcagagcagattagagagaaattctacagtgcgagaacacgatgtgtatgatttaggaagcagaactcttttttttttttttttttttgagatcagagttttctttgttttccatttacctgaagtaatgcattgtttcatttaaacttaaatagctttcaagattgggttcatgaacatgtcagtgggcagagtttcatatctagactcgagagatgacaaaataaatatgtctaagatagaattattttcacacctgccttttccctttcaagttctatcatcagtgattgagaatttaggctttcaagggcacacttggatttaaatctcagtttgtccatttagtagctgtgaatgcccttgggcaagttaatctctttgccttggactggttatcctccaaatgggataaccctacctataatgaggaatgaaatgcagtaacgaacaggaagccactaagcacagtgccttacacagaaactttaataatagataaaaatatttgtatcaccttctgggtgccaagtttgatgctaggaaataatccaatgggctataaaagtatgatttggtaatttgtttggagcatgggtaaatgaaaacagtaagaatacataataggcttatataaaagttttgaagagagagcggttatgctgttggggtgtggctttgaagggcttaaaaataatcaggggtgttgagttttgatcccaaggtttaagaatgactttaataagcatgcaagttaggatatagtttggtcctaagtgcaaaaaaaatctaccctgaatccaccctaagcagaaaataaatttgttgtgaacaaacaatagatacatggagcagtttacaggatctgagaaacacctgaaaaatgggatcagaaaggtggacgctgggcagctctggggctgctggtggagggagctgaagccacatctctgtagagcgtcccccggtggatgagccaactccaacccttttctgtctttttctgcttgagattcaaattccatggacaaacgttcaaatgtcccagtttgagtaaaatgtctaaaccagcctatggagataagttattttcatttgacaaaactgggttgcttctatcagaaatggggaaaatagatgttggatagcaaaagtccaccatgtccaggccaggcgctgtggctcactcttgtaatcctatcactttgggaggccgaggcaggcggatcgcctgaggtcaggagttcgacaccagcctgaccaatatggtgaaaccccgtctctattcagaatacaaaaattagccgggtgtgctggcgtgcacctgtagtcccagccactcaggaggctgaggcaggagaatcgcttgaacccaggaggcagaggttgcattgagccaagatcatgccactgcactccagcctgggctacagagcgagtctccatctc

SEQ ID NO: 16711 - DNA, 2571 bp, Homo sapiens
  CDS (2095)..(2397)
gtgcaatgagatctaaatagaaacagcaaaaagtttaaaagcaggggcatgatattaaggcatagagtttttcttagttttctttttccttgtttgttggtttatgtagagttaagttgttatcaggttaaaataatgggttataagatagtattcgcaagcctcatggtaacctcaagccaaaaacaaacaaacaaacaacaacaaaaaaacacatagtggatacacaaaaaataaaaagcaagaaactaaatcatatccccagagaaaatcaccttcactagtggaggataggaaagaaagaaggaagagaagatcacaaaacaaccagaaaacaaataacaaaatggcaggagtaagtccttacttatcaataataacattgaatgtaaatggactaaactctcccgtcaaaagacagagactggctggatgaaaaaacaagacccattgattgttgcctacaagaaacacacttcacctatatagacacacacaggctgaaaataaagggatggaaaaaaatattccatgccagtggaaaccaaaaaagagcgggagtagttatatttacattacatacaatagatttcaagacaaaatctgtaagaggagccaaagaaggtcactacataatgataaaggagtcagttcagcaaggtgatgtaacaatgtaaaatatatatgtacccaacactggagcacctagatatataaagggaatattattagacctaaagagagaggccttgatacaataatggctggagacttcaaaccccattttcagcattggacggatctcccagacagaaaatcaacaaagaagcatcagacttaatcttcactatagacaaaaaggatctaatatttacagaacatttcatccaagggctgcagaatgcacattctttttctcagacatgaattattctcaaggttagaccacattttagatcacaaaacaagtcttaaaaaattcaaaaaattgaaataatatcaagcctcttttctgaccactatggattaaaactagaaattaataagaattttagaaactttacaaatacatggaaagtaaacaatatgctcctgaatagtgggtcagtgaagaaattaagaaggaatttgggggccagaggtagtggctcatgcctgtaaccccagcactttgggatgccgaggtgggtggatcataaggtcaggagttcgagagcagcctgaccaacatggtgaaaccctgtttctactaaaaaaaaaaaaaaaaaaaaaaaattagccaggcatggtggcgtgcacctgtaatcctagctactggggaggccaaggcaggagaattgcttgaacctgggaggtggaggttgcagtgagctgagattgtgccactgcactccagcctgggtgaaagagtgagactctgtctaaaaaacaaacaaaacaaacaaaaaagaaggaatttgggaaatgaagcggtggggcagaggctggcagctcaggcagtgaccatgcatattatggcctcatggtgcctttcgctgtgatgagcatgttctggggcttcgttggcttcttggtgccttggtttatccctaagggtccttactgggaagttatcattaccatattggtgacctgtccaggtttctgctatctcttttggctgatttcaattctggcccaactcaaccctctctttggaccacagttgacaaatgaagccgtctggtatctgaagcatcattggccttgaggaggaagatgtgctctacagtgctcagtctttgaggtcacgaggagagaatgccttctagatgcaaaatcacctccaaaccagaccacctttcttgacttgcccattttggtcattagttgccttaaacatcagcaccacatttaaatgtcttattctacaatgaagtgttttttccttcacttttttacactttaacgaattatgtccctacttaaactgaactgtgctgactccagaaaatgattatgtactcttctgagatagaagattgtcttcttctgagagatatgttactgcctccttggaatctgtgcatttgaagatggctcctgccttctcacatgggaaccaatgaagtgtttagaaactgctgcaagacaagtaatactccagtggggcagtcagtaggagagcattttcagagggaagagctgtctcaacagaattacaccttactgtattttcaggatgaatttattatttctgccgtctttcggaataaattatttttctgctttctatgggggggaaaaaagaatttgggccaggaactgtggctcatgcctataatcccgacactttgggagactgaggtaggcagatcacctgaggccaggagttccagaccatcctgggcagcatggtgaaaccttgtctctacaaaaaaaaaaaaaaaatcacacaaaaattagccaagcatggtggcacgtgcctgtggttcctgttacttgggaggctgaggtgggaggattgcttgagtccaggaagtggaggttgcagtgagctgagatcatgccactgcactccagcctggtttc

SEQ ID NO: 16712 - protein, 101 aa, Homo sapiens [sequence omitted]

SEQ ID NO: 16713 - DNA, 2744 bp, Homo sapiens
  CDS (1526)..(1861)
ggcctttttttttttttttttgtctgagacagagtcttgctctaccacccagtctggagtgcagtggtgcaatctcggctcactgtagcctccgcctcccaggttcaaggattctcctgcctcagcctcccaagtagctgagattacagacgcccaccactaggtccagctaatttttgtatttttgtagaaaaggggcctcaccatgttggccaggctggtctcaaacgcctgacctcaagtaatccacctgcctcagcctcccagagtgctgtaattagagtcatgagccaccacacctggcctaaatgcactcctataagacaatgtggaaggtaggggccaaattccacacaaccagcttagaagacaaacttttacagcaaagagccatcatttggagaaggacatatgtataatggcaaagaggtattaatacgtgaagtacctgtgacattgaggatcgttacctagaattgacattcagtatttacttcacatagctctgtaactgggtctcttgtaaacaggcattttgtcctcccccttccaatactgtgaacccattattatgtcacctttcctcatgacagtcctataaactaggtaaagaacaaacgtctctattcacagacagaacaggggaaacaagataaaaaatacaactttccagtatttaacaaattctgtcaagtctagacaaaaggtatgatgtctaaatgaagctgttagtgggctatgttgaatctcaaaattatctttctccttttttttttaagagatgatctcattctgttgcccaggctggagtgcagtggctcaatcatagctcactgcagcctcgaactcctgggctcaagtgatcctcccgcctcagcttcccaaggagctgggatgtgccagcatacttggctttttttttttttttttttttgtagagatgaggtctcacaaagttgcccaggatcgtctcgagcttctggactcaattgatccttctgactcagcctcccaaagtgctaggattacaggcatgagccaccatgcctggcctcaaaattgtctttttaaatatgtctgtgcttttcatagtgtaactactatacaactgaaatgtcgattatggcacaattgatcataactgactcacatactttgtgttttgtttttcatggtgtctctcctagcccagaagcttcctaaaccacttttccagaggcttttttaggaacacacattaaaacatgcttcctgaagcagagccactcattcccgggtccccttcctcatccttcaaagagctctgactctcaactttgttttttgagctagcatggcatgcacacaaaatccaagcttatgactctacaatgagagtgctttgatttaaataatctttccttcctaatttaggccctcccaacgaaaacttaaacctttatgcttctttacagagaaaaacaagcataaggaaagcccctccatttcctacaagagacagatctccaggactgaattttaagccatggggaaattgcaaaggagacacctgagctcttttgagcacttgtgccaaaacacaacagatggaatggtttggcatttcagaatccagttccacagaataaagaagaatctccactctggcagtggggaggaggaaggaagtggaggtttgttggctttactttgccatccatccctttctctatgtggtagagaaggactgagaggagtgatcccacaggacacaggttcccccgtgtctgtcaccttcaagggggctcaggctcccagggggaaggcacaggggaatcacggagttcagttccaggctccaggactttccagaagggacccctgagcaggactcgctttcaccgtcaagtattgctttcttttttagacacaagattttgctctgttgccctggctggactgcagtgatgcaatcatagctcatcgcatctgcaaccaccagggcttaagcaatcctcccaccttagcctctggagtagtggggaccacaagcacataccaccacagccaggtaattttgttgttgtttttgtaaagacagggtctcactatgttgcctaggctggctttgcactcctggccgcaagcaatcctcctgtctcagcctcccaaagcactgaagttacaggtatatgaaccacatctggccagcaccaagtattttgacaaagcacctattagggtaattccaagtaatctctggcaaacatggtttcagttaggcaagactacaagaaaccgcccacatctattttgtaaaaatctgtgctcccctttcctacttgagtagacacgctcacaaacagacacaaaggcagacccctccctctagtttttctaacataccagagccccctgcaaacacctgaggccctcaatgctgattttcactggaatctcatcacagttgaacagggtagaagcagcttaacctctctccttgtgcctcgctggaaccagtggctcgtcttccacgggctgcccctgatccctgggctttgagggacaaagagcttgctggaaatagtgatcaccctcgtgatgacaccaggtcaacaggcagctgtgggctcattaagatgtaagccggccgggcgcggtggctcacgcctgtaatcccagcactttgggaggcctaggcgggcggatcacgaggtcaggagatcgagaccatcctgggcaactttgtgagacctcatctctac

SEQ ID NO: 16714 - protein, 112 aa, Homo sapiens
MGKLQRRHLSSFEHLCQNTTDGMVWHFRIQFHRIKKNLHSGSGEEEGSGGLLALLCHPSLSLCGREGLRGVIPQDTGSPVSVTFKGAQAPRGKAQGNHGVQFQAPGLSRRDP

SEQ ID NO: 16715 - DNA, 2363 bp, Homo sapiens
aaaaaaatgaaaaaaaatttcttatgagagtgaatgttctcacctctaatatgtgtgggtttcaggataagagtataaatggagcctgaatactctatctaaatatctcaaaattatgaattcccccaacaagttgctgaataaactgtgcgttgtctgcctgccttgacaaacataccttcaacatttaaaggtctgggtttaaatgtagaattctgaggctcctcagtgtcccatgctggaatgtggtggccttgggaaaatggaccttagctttaggcctggccctcctctcttcccaagctcttcttcacactgcaagggcctcccagatgatgcatgaagatcctggcccatatattcagctacatccacatccctagcaaaagggaggctaaggccattcctcaggcctagggcactgcccctggagggaagaccagtggaagatgcctggaaaggccctggaagtagcttcaaggccatttcgatagagaattctgggggcctgaaaacctagagccaaggggtggacctgggctcaggataggcaagtccccttgatccaaggtatcactgtaggaggaagggcagtcagaggagggccagagctgagccttctaatgcacagggcccagagtggagtgaggaacaatgctgggattagacacccaaatctactgaattagcgaagtccaagcaaagtactgcaaacaaggtctggcatatcacaagcaactaataagtgttacttttattattaagcacctactggatgtcaccttttagcactgaggatgtaacaatgaatagaaagtgatcactgctctgggatctgtccctctaatattaggcttctgcaccaacagtttgggctacctgctgtgacagggatatggaagtttgttaggtggagaataaatggaaacccctacctccctggaaggtcaagggaaggtcttacagaggaagccatggctgagctgagatgtgaagggtgaatatgagtttagccatcagatgactggtaaaggtggacagtccagtcaaagacaacaacttactggatacatggaggtcagaaagagcatggcatttagaataactagaaaaaaaaatgtttgttttgtgcagaggcagggtacttaggaggatggcaggtaatgaggttggagaaatgggcaaggaagaacaagatcgtgaatggtgagagtcatttccttagggagctacggatgtcacagtgaccttccacataattcagcatatctgctgcagaggtagccaagaaaccaagattaggacttcagctggacaatgttggcctgctggctcacagggcatggggagcaagttcacataaggcagtagggaagaggaggaaaactgcacacatccagggagattttagtgccagaattccggaaggctttcttccagaaggccctcaacctaactgccacgcctcctcccccacttttttatttagctacctcttatagactcatccttcagaacttagatgaagcattacacttcctccaggaatcccttcctaaattctcattctaattcagaagacattcttttgtatttctgcagtgtctcaaaaagtagattgcacgagacttattaattcattggtcagttttcctagaagagtggtttttaaactttatcatgaattctccaatgacttggagggcttgttgaaacacagatttctgaggcctatccacagactttctgattcagaaggacttagaattttcatatctaacaacttttccgatgaggctgatactgctagtttagggaccacactttgaggaccactgaggaaagagtttcacaagtcagagatttacagtggaggtaccaagcttttctcaagttagtttatcagaagcacaaaccatcaccctctaccaatcattataatgaagaccacttcatttcagtttatgtacaaaaactcatctccacagttatgccaagtgtatgaagacaaagaaacaatatcaggaaaagaggtttatttgattttgaatccttagccccttacacagtgcctgaaacatataagaggcagtgaataaatgcttattgagtgattacataaagagatgaatgggaggctgaggtgagcagattacgaggtcaggatatccagaccatcctggccaacatagtgaaatcccaactctactaaaaatacaaaaattagctgggtgtgatggtgcctgcctgtaaacccagctacccaggaggctgaggcacgagagttgcttgaacccaggaggcggaggttgcagtgagcaccactgcactccagcctggtgacagagcaagactccgtctcc

SEQ ID NO: 16716 - DNA, 2404 bp, Homo sapiens
atttacagatagattagataatctatctagagatagatagggagagatatctatcaatacatatctctatctagatatagatagatggttttctatatagacctatctatctatatatgtatacatctatatatgtctacacatatctctatacacatatatatatttatatctacatctatatttctacatgtatataggtatgtatatatctacatgtatatatgtatatagatagatatatacataggtatctgtatatatgcatatacatgcctatctatctttatctacatgtattacatagatagggtaattactgataaatcctttggccttctttgtaaatctctgggctaaagacccctccagtattatacatgttctggtctagattgctcactcaccagttctcctcactatctagagaagatccacttagcaggcctccccttaaagaagggcaccttaactggactcactcctcccatagtagactgcacagtacacaagcagaagaggagagctcaataataaagtcaccataaaggataatttttaaatgaataaagaaatcagaaaatccagtattggctagcacatatggctatcggcaagctcaccctacaaaaaaatagtgagaaaacagttcgaatattggccgtttggggcacatattctacaaaaaggaaaagttttgaaatgtatatatatttaatttaactctaaaatatttgtaaggcaagcccagtggctcacacctataatttcagaactttgggaggccagggcaggaggatcgcttgaggccaggagaccagcctgggcaacatggcaagaccccatatctacagatggttttaaaaaattagccaggtataacacgatgaaaccccgtctctactaaaaatataaaaattagccgggcatggtggtgggcgcctgtagtcccagctactcgggaggctgaggcaggagaatggcatgaacccgggaggcagagcttgcagtgagccaagatcatgccactgcactccagcctgggcaacagagcggagactccatctcaaaaaaaaaaaaaaaagaaaattagccaggtatggtggcacacacttgtggtcccgtctatttaggaggttggggcaggagaattgcttgagcccaggagtttgaggctgcagtgagctatgatcatgccactgcactctagcctgggtgatagaacaagaccctgtctcttaaaaaaaaaaaaaaaaaattgtattctgcaccaggtacaatgtgctaggtactggggagagatcttaaaaaaatgtattatacaccaggtacaatgtgctaggtgctggggagagatcaggggataaagcagagcaaaatttctgtcctcatggagcttgtggtctaaaggaggaaaaaaggcaataaacaaattaaaaagaggaatacaaagtatgtgggtagggatgagtacaacagaggaaaatcaagcaggaaagatagaactctggaaagaagtagggccagtgtcaaataggatggccagggaatgccacactgagaaggtgacaccaaagcaaagacctacaggaggtgaagtggtgagccattcaggtcactaaaggaggcatgttcccaggagaggggacgacaatgcaaaggcaagaaggagcaccagcgtgtgtgttgagaaaagcatggggacccaagcagctaaagtggaacacatgtaagaagaataaccgtaatgaggtctgagagacaactgggtgggaagtgtcttaatctgtttgtgttactataaaggaatatccgagtctgggtaatttataaagaaaaggaggtttgtttaggtcacaattctataggctgtacaaaaatcagcaccagtatctacatcaggtaaaggctggaggttgcttccactcatggcaaaaggggaaggggagccagtgtgtgcagagatcacagggtgagagaggaagcaagagagagagggaagcaccgggctcttttaaaaaaccagctcttgggaaaactaatagagaactcactcactactctcaccatggcagggcattaatctatttatgagggatccatccttatgatccaaacacctcccactaaacccgacttccaacactggggatcagatttcaacatgagatttgaagcggacaaatatctaaactacagcaaagagtacagatcgggaggcatggcaagctctgctggtcactccaatggagtcaacatttcaagaatgttacaagcagctgggttggtggctcatgcctataatcccagcactttaaaaggctgaagtagaaggatcacttgaggccaggaattcaagaccagcctgggcaacataaagagaccctgtctctaccaacaattt

SEQ ID NO: 16717 - DNA, 2322 bp, Homo sapiens
attgcaatggaagcttaactttagtttatttctaagcattttttatatctgtggagtaatagaaagctccattactcaactggaaaggaccctaatgacagggcaactgaacagattgcacatgggatagccaaactggactttctttgtttcctctttaaaagtttacaatgcagaccattttttgtcccttccttttgtttcctctgaggggctgttcgccccaggcagggtccatctttctgatctgtccaacctcctttgtgccacacggtgctggtcacagggcttcagtagtgtttgtgttgtgcgctcaccccattccagaacaaatccaagaggccagtcctccataagcacaaatggaattgtgcaaccaccagaaaaacactactgtggcaaactggagaagtgccaatttaattctaactgccacgttctcatgatgtgctccaccaactttttagtatatgagtcactggttttataaggttgtttttaccacagtggtctttttaaaccacctgcccactcccttaacaagagttttataccaattattagtcaacactgataaaaggcttttttagggctttatttgtttgagccttttcagtgaaagaaggaacatttcctatggtgctgtctcactgccttaaaacagatttctatgacagtttaacagttggtttaaatcctaaaccattggtaatttccactgtcttttcatttacaaccaagcaacaccagttaacatagtagcctcatctctatatatctttctcttttttttttttttttgaagaaatggataggagaaagatcagtatttttagccttgtgaatagatcgctttgcctatcctccaaaatattaaaataacccagaaatgctctttgaccgtcacttaaaacctaagacatgtggcgaaattccatccagttctaagtgaaagagtttcagaaggcaggagattttgaattattatccagcagggctggaagcactagatgcagcatgagcacaactattcggctttccttccctattgtttttgtttttttaatgagttttgacgcatgttgttttgattgctattgttgtacatgagaaattcagcattaaagaacactgaagcggtaaggtcactgtggaagaggaagcgtttatactgtaaaagaaggttagatttgcacagtctactgggtaggtattgtaaataataatttttaaaacttgcacaaatcaaaacaaacacaaacaaaattgtattttatcctgttggtgttaagaggtgtttcacttgctgagatttcctgtacattgcaaacaaatacagaatgcaaaccctcaaagctgtattatctggtgtgtttgtcctgtatttacagttgtttttgactatgcaggagctatcagtgctagagtgagcatgcttcaaaactgtacatgaagccagtatatttttggataagtaaaactgtctgaaagtacatctgtcatggcaggctttaaagagagtgcatgaaaactgatcagtcattggagaagttaccaccacacacaaaggacaggttttaagtttatgaaacccaagggctaggccatggtatagacttcttctatgagtgtgtgaaaatgtgttacttttaggacgtgtatttggtgctactctctgtgaccaccaatgggtcagttgctatagaacaacaacaccacgaaacatctgtgcagttttcagagtgtcacaaagtcaataggtccttacacggtgctattgccctaagggaaatccgaactgaatttatgcacatagaattgtcaccctgactttgaagcctcaaacatggatcaaatctgttgtgaaacatcaatatatgtagctggatgagtgactagtttcccttgtataatatgtgatctaagaaaattgctaatctttccctgccattttgagaaacacagtccaaacatgagcataaacagaatttcctgcaatacaccccagtaggtccacctagtttacaacttaaactagtttgtgaaacatttgtctgtatacattttatattttgtacattttgatgtaacatatcatgtaaataggcagaaacagtgaaataaatcatctgaaaagttttgtagtctttgtaaagccccaacaataagtacttggtgtcaatggacttaactggatgatgtattttctattggtttattgttcctctagcttgtaaaccagcttgcatatatttttttgcaaatgtgcaccctgtatctgtctaaattattactttgccattaaagtggaattatttattg

SEQ ID NO: 16718 - DNA, 2201 bp, Homo sapiens
gtgatagaagatggctggcattccttccttcctgagcaagaatttgaactctattcttcagctgtgagttaacttttgagaactgtggattatgagaagtaacccaataccttatttgacttgtgaaaatgatcacttcttttgaagagtaataaggtgaagttgacttatccattcctaatcttaatatatttaaaaggattgaagccatgcagagtatgatctctgatcacaaaggaattagattaataatcagtaatactaagatatctaggaatacccccaagtatttctaaattaaacagaacgcttgtaaataatctgcatgtcaaagaaattagaaaacattttgaagtgagtgataatggttatgtaacatattgaaatttgtggaatacagacagctaaggcagtgtttagagataaacttacagctttaaaatttttactagaaaggaaagtctaaaattattgacctaagcaccaatttaagaagctagaaaaaaaaaagcaaagtaactagaaagaaaaaataataaaaataagagcagaaagcaataaaataactagaataagtaagtttagcaaagttggttgatataagatcggtatacaaaaacgaattgaattggcaacaagcgatctgacaatgaataaaatatttacgaataaatttaacaaaagaaattcaaggtctatacactgaaagacataaaacattgttggaagaagttgcaagagatctaaataaaaggagagatactgtgtacatcaattggaagacaatattgttaaggttagtggttggctgacttttgtgaaagaccattagatagtagatattttaagctttgcaggtcatgtggtctctgttgtaactactgaactctgctgttgttgcacgaaaaaagcaatcagatgagacatcagtgaatgggtggtgctatgttctaataaactttatttgcagaaacaagtagcaggctggatttggctcattaaagtggcagttctcccttaattgatctgtagagtcagtgcagtccctgttaaaattctaataggtgtttttgtagaaatggacaaaatgatacaaattttatggaaatgcaaatttaaatatataagtttatatggaaagtcaaaacagctttgagaaaacacttgattactgtaaagccacagtaatcaagagagtatggtattgctgtaagcgaagacatacagaccaatgaaacagaatacagggtacagaaataaaccttccccttaatgctcagttgatttttgacaaaagtaccaatacaattcaattgggaaaggatagctttttcaaccaatagtattggaacagttggatatccatatgtaaaaaagataaacctagacccttacctcacatcatccacaaaaattaactaaaatgtattatgcaactaaacatgagaactaaaactatcaaacctctttaagaaagcacaggagaaaatctttatgaccttcagttagacagagattttttagatatgacaccaaaagtgactgaaagcaggttagtgatttcctagtattgggtgttacacaggtgtatacaactgtcaagactcatgaaattgtgtagtcaaaatggattcagtttattttttataagttttgtctcaataaagttgactaaaaagaagataaaagaataatctaatgcaaatgttaagtagctgattagaaacagcttaggagaaaataagtgatttgaaatatagatccgaaataattactcagaatatggaacagagaaggaagatggaaaaacagagaggttagacacatgcatgcttaataaaggaagaagatccaatatttattacatgggagtttaggataaaagatgatagaggctggttatggtggctcacacctatagtcctagcacttaaggaggctgaggcaggcaggtcacttgagctcaggagagtttgagaccagcctaggcaacatggcgaaaccccatctctatgaaaaaatttagctaggtgtgataatgtgtgtctttggtcccagttacctgggggtctgaggtgggagaatggcttgagcccagaaagttgagtttgcagtgagcagtgataatgccgctgctctccagcctgggtgagagagcaagaccttgtctccaaaaaaaaaaaaaaaaaaaagaggaagac

SEQ ID NO: 16719 - DNA, 1518 bp, Homo sapiens
tgtttttccattcccaagaaaatgcaagattgtgttttggggaagattctcaactgtgagatgacagcgtatgctatgttcctttcattgcaattggtgttttatagcatcctgcccagcctggcccgcatttggccccgtagccatgctgtcctcaggctaggatctggttagttgttccagactcaagttggtccctccttctgctctgtggagaaaaatcacaacctcaaagggataggtttttttttttatggttgctcctgagagtggcatggtccctctagatgtcagcaaatattaaggcaattaaataaggcaaattaattatgggaaacattagcattgatttctgaagacagtcttcttcttgctgagtctagcctcaccccttcttgccttttaggaagagttccatgttcttagacaagcttgttttcggataaaatattagacttttttcttagaaaatccctttgttttaaaattggtaattttttaaaaatcccaatctctggctacatttgagtttgaggaaattctttttcacatctctaaatatgtttcaatttgatagtattagtaaataagtaaataaaaatgccttattccacaaatgtttattgagatccttctaatttccagtaccaggaatacacacatcaataggacatggttcttatacttcataaagtcatagaaagcaaaaagaactggcagttatctggttcagttatctgattctctgaaagagaagaaatataccagccagtatagtcaatattattttcaaaaatttggtgaatggccattgtaaggtgcatttacacacatataatcatactcctatcaactataaatatatgaattgcttataagcatgattgacatttgttattcttacatagattttgtgagtgactagcaaaagctgttctttgcttctagaaccatgctgtcccaatataactttttgcattgatggaaatgttctattttagcactgtccaataagttagcctttagcaaaacatagctattgagcacttgaaatatggctagctcgttatcctcagcaaactaacacagcaacagaaaaccaaacaccgcatgttctcacttataggtaggaactaaacaaagaaaacacatgggcacatgggggaacaacacacactggggcctgttgaggggaagaggggagggagagcatcaggaagaatacctaataaatgctgggcttaatacctaggtgatgggtggagcaaaccaccatggcacacatttgcctatgtagcaaacctgcacttcctgcacatgtaccccagaactttaaataaaagttggaaattaaaaaaaaaaaaagtattgggcatgaggtccaaaagagaattggtatcaactaagtaccgttaacatacaagatatgacaatgaagaattaatactgattagctgctagatacgaagatgcttacatataaacaagcacgtttttcaaaataaacatcttgaaact

SEQ ID NO: 16720 - DNA, 1873 bp, Homo sapiens
aagttatgctctgtacttactcaaaaaacgtacaatctaattggcaataaacaaaggaatgaccatgtggacctccctaagttagtgagccctggtttgcaaataagtgttgcttacatcctaacacaggtttgcctccgccccacccacacttccttcaggtgccaagtcctgcagcttggcagccccagaggcctgctggccccagcttttcacctccatggcctccttacacaggtgaccgcactggactggccggccatgggggacacacttttgttcttccatcagttggggttgattaattgaaagacaatgacttctcgactgtgcttgtttatcttcttaagtcctcttccccgccggctcccgtccccctgctttctaacctcaggaaacattttcatgatcaattcattctcttgtatcctactttggtaacatgactttttttttttctaccgcttttcagctgagttgtggagtaggcagaactttattatctgacctgggaagctaaccactatgtgatactgttttctgaggaaaatatgttagattccacatggtaacttgacaaacaaacttgaaacatggctgtttgaaagctgagatggtttgtgagaaacattgtgaggcagtgtggcgtgattaattgtcagataacaccagtaagtacctttgagtttaggggaagaagtgattagtggctagagaggtctgagaaggttccactgaggcaatgaaactagctagttcttaaaagtagggtggcatatagaagagaaaacagagtttctaggcatgggagaagggcaaatatgtgattctcagctgaggctgtatcttttaaaatgttttgaaaatacctttgtacagaaagcaacactggccacacctaagaaagcgatgcttccagtccccctccttgccctcacttctctttcccctctcacacagtccctttctctcaaagccattccccatgtctccacctcaatggcctgtggtagtttagagcaggggtccccaacccctgggccatggaccactaccgtggcctgttaggaacctggcccacagccagaggtaagtgacaggcgagctctgcctcctttgatgtaagcagtggcattagattctcataggagcacaaaccctactgtgaactgcacatgtgagggatctaggttgcatgctccttatgagaatctaaatataaatgtgatgcacttgattcatccagaaaccatcccctccatccccatccatggaaaaattgtctttcatgaaaccagtccctggtgccagaaaggttagggaccactggcttacaggagaaatgaatggttgagatatcatggatgggagtagcctgcacttgtaaatagtgtagaggcagaaaaaaaggttgggaaaaccttgaactagatagagatcaggagaagccagcattgtttatgttactcttctgcttaaaggccaattttagatatttccttggggattttagttatttcctgtgcctttgcaggttctaaaatgattcttttcagacttagagtcaaagtagctaaagaatattaaattctggctggttgcagtggctcacgcctgtaatcccagcactacgggaggccgaggtgggcagatcacgaggtcaagagatcgagaccatctggcaaacatggtgaaaccctgtctctactaaaaatacaaaaaattagctggatgtgctggtacgtgcctgtagtcccagctacttgggaggctgaggcaggaggattgcttgaatccgagaggcagaggttgtagtgagctgagattccatgccactgcactccagcctggcgacagagtgagattctgtctc

SEQ ID NO: 16721 - DNA, 1947 bp, Homo sapiens
tttgaatacttggatgctaggggatatagaggcactgagagataggtgtcctccaaggatctattctggatctttctctcccttctttaacccttttctcttatctcccttttctttctcctgggtagttctgtagcttccactgtcacctccagtgtgttttcccagctcttaccttcatctggagaccagtcttgagttttcatcctttgggcagctatcttccaccagtatctacaattcagtctgcccaaagcacatcttcttcctatgctactctctttctgtgcttatgggaaaccaccattttctctctggcaacttagcagccaagagaaatggctgagtcttcaaggatgaatgtgacgtggtacccaaggtcatttgatgtttctacccttaacacctgtttgtcacccttcttgcacttgagcaaaactaaactgctggtccctgtacttcccatttttcccatttatttctttcccaatagttccaccaattagaaatgtcctaattcttcccactcccttattcgtcagatacatttttaagtttaggctcaaatgccacctccccagagtttcctctgatacctctttgcagctagaaatgatctgtctttctgggaactcccatagcttcatactcatatctatctatactgcttatggcacttctcactgtctactgtaccttttaactctttatatatgtctcctccgatgcgagtgtaagctccctgagattagttaacgaatcttttaagttcccgtattagatctgtcgcagtgccttgaatatacaagcattcattcagtagatatatgaatgaatggattaatgggtgatttcttatattcagatgattcttaaccagtaagggtcctgaacagcagtgcatattaatgttaactcaaaacttaatggcaaatttataaataaacctgaaacctcttacatagccaaatacaaatgtatcagtctacctaggaaagatggttaggtacttgctcataaacagttatatgtttatgatttaacaaaatgattttactgttcataaattgtgcttttgaaatgaaatgtatcaaatttcttttcaatgatgttttgacttggaatttaaagcaaacagaaagagaataatgacttatctctttgagtattaagctgacttattctcttgctatttttgtgtttcctgtttatccattttctcattctcctttcacttcattgtcatttttattttatttagtgaaaaggatttggtgaaacaggcaaagaccttaaatagtgcagcaaataaactgatcccaaaacatcattaggcatttttaagttggtcacgtcgcaagtccgatatcacaacttaattgtaaaaggaagaaatctgaaagttactacatttaagctctgattctatataaaatgtcaccaaaaagttgactttgaatttgttggacttttaaaaaaccagttggaaatataggttgggtttttttcttattgttttctccccagggttagaaaaattggtataagttcctaattaaaagctgaataaactttgagaaattatttctgagttgaccaataaataaaaataccactttctttaaaaaagcctagggaattgaagctctgtacatatactaatgatgcctttacaacccagtccttgataataccagattctcggtgcattgttcatgtctgtatctgcaagcctgttctgccattgcagtgtgatgaacctagaggtaactaccatgtgaacttgaactcttctaaaatagttctgtgtctcttagaccatgaccccttttcacttttgttatataggtttaatccccaagccaaggatagtacttagtatttcactacacttctattctcagtaaccaagattgcttgcaactttttttgccttggtgacttttg

SEQ ID NO: 16722 - DNA, 2035 bp, Homo sapiens
  CDS (95)..(1549)
atttagatatggaagctgaggggatgcacagaggcagccagaacctaggtcagggtctcgctcggtgctgaccgcccccggggtcgagtaggcgatgggggagcccggcttcttcgtcacaggagaccgcgccggtggccggagctggtgcctgcggcgggtggggatgagcgccgggtggctgctgctggaaggtgggtgcgaggtgactgtaggacgaggatttggtgtcacataccaactggtatcaaaaatctgccccctgatgatttctcgaaaccactgtgttttgaagcagaatcctgagggccaatggacaattatggacaacaagagtctaaatggtgtttggctgaacagagcgcgtctggaacctttaagggtctattccattcatcagggagactacatccaacttggagtgcctctggaaaataaggagaatgcggagtatgaatatgaagttactgaagaagactgggagacaatatatccttgtctttccccaaagaatgaccaaatgatagaaaaaaataaggaattgagaactaaaaggaaattcagtttggatgaattagcaggtcctggagctgaaggcccctcaaatttgaaatccaaaataaataaagtgtcttgtgaatctggtcagccagtgaaatcacaggggaaaggtgaagtggccagtacaccctctgacaatttggatcctaagttgactgcccttgagccaagtaagaccacaggggctcccatttaccctggcttccccaaagtcacagaggttcatcatgagcagaaagcctcaaactcttcagcatctcagagaagcttacagatgtttaaggtgaccatgtccaggattctgaggctcaaaatacagatgcaggaaaaacatgaagccgttatgaatgtgaaaaagcagacccaaaaggggaactcaaagaaagttgtgcaaatggagcaggaacttcaggacttacagtcccagctgtgtgcagagcaggctcagcagcaggcaagagtggagcaactagagaagactttccaggaagaggaacagcatcttcagggtttggagatagcccaaggagaaaaggacctgaagcaacagctggcccaggctctgcaggagcattgggctctaatggaagagctaaatcgcagcaagaaggactttgaagcaatcattcaagccaagaacaaagaattagagcagaccaaggaagagaaggagaagatgcaagcacagaaggaagaagttcttagccacatgaatgatgtgctagagaatgagctccaatgtattatttgttcagaatacttcattgaggccgtcaccttgaactgtgcccacagtttctgctcctactgtatcaatgaatggatgaagcggaagatagaatgccccatttgtcggaaggacattaagtccaaaacatactctttggttctggacaattgcattaataagatggtaaataatctgagctcagaagtgaaagaacgacgaattgttctcattagggaacgaaaagcaaagagattgttctgaagaccgtgctctaagggcatttgaaagactgccaggtagtgcgagcctgagatggtctggaggattctctctagccgtgactccgctgctctgaaggtcaactgagaagtcttgtgggacagagacttgagttaggaagccctcagtcacttgccttccacggtggccagccctgctgccatcattggctgaagcaccaccaggattcacggcacccaactgcttcagggtacttcgtagactctgcctcactacatgtcgaaagagttatttgagttctcttctgtttttttttaatttgttgttgttgttactgtcttgatacctcggaaacacctccgttgacagttgttttggataggttgggtgtaccccatggctgcctctgaaggcagtgtctattttgagaggatggcttacctcttctttgtgaaaatactatctcatttcctggaaataaaatgtaaaacctgtctgttgctc

SEQ ID NO: 16723 - protein, 485 aa, Homo sapiens
MGEPGFFVTGDRAGGRSWCLRRVGMSAGWLLLEGGCEVTVGRGFGVTYQLVSKICPLMISRNHCVLKQNPEGQWTIMDNKSLNGVWLNRARLEPLRVYSIHQGDYIQLGVPLENKENAEYEYEVTEEDWETIYPCLSPKNDQMIEKNKELRTKRKFSLDELAGPGAEGPSNLKSKINKVSCESGQPVKSQGKGEVASTPSDNLDPKLTALEPSKTTGAPIYPGFPKVTEVHHEQKASNSSASQRSLQMFKVTMSRILRLKIQMQEKHEAVMNVKKQTQKGNSKKVVQMEQELQDLQSQLCAEQAQQQARVEQLEKTFQEEEQHLQGLEIAQGEKDLKQQLAQALQEHWALMEELNRSKKDFEAIIQAKNKELEQTKEEKEKMQAQKEEVLSHMNDVLENELQCIICSEYFIEAVTLNCAHSFCSYCINEWMKRKIECPICRKDIKSKTYSLVLDNCINKMVNNLSSEVKERRIVLIRERKAKRLF

SEQ ID NO: 16724 - DNA, 3051 bp, Homo sapiens
aaaagatgtctataataaaatttatttataccagtggttctcaaaactgactgataatcagaaaaccctggggctctttcaaaaacaattaacaaaacaattctatttttagacccatgaatacatattttgggggaggaaggaggagggtatagatctgtattttgaaaagttccccaggtctccttgggaaattatatgaacaatcatgtttgggaacaaatgaatcatgttaccactgggaagaagtttgttatacatcctaaccaagaaacctaaatggttcttaagcatctgctagcagaaacagttataattatgaatacctaatgtctgttagattttgctgatccctcacctacctcaggaagaaacaaacccaaaaaagtaagatacggtcttttttatttgtgttaattaaaaaatgctactcctaaaaatatactaactttccacacttataaaggtgtttcttattttaaattcctcaatgagtgcggagaagacaacatagaagcttcttctctttctttctgtcttccttcaactctgtttctcttcttccttttatctttcctttcttttcttctttcctctgactggattgtttataacactttagaaaatttccctgactggaagagggccaatctgaatgagcttttgtctgtcttgggagtagaatgaaagcagattctgagcatggaccctgacttccagaaagactcccatctcctcctcagtgcctcactcttccctcagtatccagaatagagtggggtggggaagtagaaaaggaaggaaataagaaggtggtagaaaactgaggcaaccctagtaatttgtttttctctaagtaaattacaggaagtatacattttctttaaccttaatgtccactactgtgtggacagcctctgggaaaacatctgttgcattagatactttatggtgaatattataataaaatcaacaaaatatgatttatgaggtctgctagttgacattttaaatttttcattattatcatttttatatttctgtaatagagtttgacctacattagaatgattcttaacttttcttcctcattaaatccttttttaaaaagagtgttctgtgtatgccaatcttgaagcatagaattgatgccaatttttaagctacttgctgtttttggttttagtcctgccttttttaagggaagaaaagaaataatattaatttgagagtgtattatgaattatgccattatcctaacagtaacttttattgtaatctcaccatgctaaaaagtatccaaaatattttgagatgggaagggatttgagtttggtttctaatgtttatcttttggtaatccctaccaaattttcatagtaatagtagaaagaaggaaagtgaatattggatattatttcctttacttaaaagcttttgatggatactatttgaattggtgtaatatgctgaagtgtatgtaatggaaaaacattattattttctaaattgaataaaatggatttaataaatactgaaagcagaattaactaagcaaaaataagtatgttttgcttagaaaatggatggcagttgcttaagaaaaaaggtttttttactaatttaagaatatacagattgtctggggaaaagaaacttttttttgtattttacttgtacagtctcacatataaccactgttgttctcatgacactctcctatattgatgtgatctttatatggtttgtaccttttttatctcttattccattatttcttaaattctattttatttaccagtttcccaaataaagctatcagggttgacatcagctatttccaggaaaataaaaaggttattactgctgaacactggaataatttgattatgtagattgaagaaaagtcaatctgttataattgctgtaaagaagccatttaattttgtgcctgtttgcattagtctttttttaactagatatgcagattagtgggatgaaaatatatattctttatttgaattgtgattgccaactgaaagatgaatatgagggcagaaaatgaatctaaatctttggtttaaatgataaagtctttacacattgtagagaattaaataagcagttggtcatacttttatttatcttcaggatcttttgctctctgataaaagtagaaagctttagggaatagattgtgtagaaagtaaatccgacttcaagattcagttcctttttgataatttattgttttaaatcctaaatatctgaagcagtaatgccatgactcaccagtaatgccatgactcacaaacatatctttgtgaaatgatttccagagattgggagaaaaaaatactaatagttgattttgctttaagtgttttttatttctcacaacattccaaatgtttgttttaggagatacaagagtttatcattttttcttttaattgctaagaagacttgttacaactttcaaaaaaagtcctcatggaacctgataaataagaagttcaatgtcttatttcattacgagctatctaaatatttttgtcagattcagaatatgtaactgaatgtatgtaattcttttttgtagcagccaagaataatttaagtttcacaactaatactgatatgcctttatcatatttttgctaaccagccaaatctgttttcccatgatcatccttaatgtttgtactagtagaggactatagtggtgcaaactgaaccaaaatagcaactaataagaaggaataaatgaggccgggcacagtggctcaagcctgtaattccagcactttgggaaactgaggtgggaggatcacttgaggccaggagtttgagaccagcctgcccaacatgttgaaaccccgtctacactaaaaatacaataattaggcaggcatggtgttgcacacctgtaatcccagctgcttaagaggctgaggcaggagaatcacttgaacccgggaggtgtaggttgcagtgagcagagattgcaccaccacattccagcctgggcaacagagcaagactctgtct

SEQ ID NO: 16725 - DNA, 2826 bp, Homo sapiens
  CDS (184)..(618)
gagagggcccggactaggggcggcgggcaccgcaggagctccgcgcggctgcagcgcgggcgggagcggggacgcgatgtcgccgccgccgcctccttgcgggccggggctgcgcctccggggctgagccgccgccagagccgacagccgagcagccgctgggcgctcccgcggcgcaggaggatgggctgcggcgggagccgggcggatgccatcgagccccgctactacgagagctggacccgggagacagaatccacctggctcacctacaccgactcggacgcgccgcccagcgccgccgccccggacagcggccccgaagcgggcggcctgcactcgggcatgctggaagatggactgccctccaatggtgtgccccgatctacagccccaggtggaatacccaacccagagaagaagacgaactgtgagacccagtgcccaaatccccagagcctcagctcaggccctctgacccagaaacagaatggccttcagaccacagaggctaaaagagatgctaagagaatgcctgcaaaagaagtcaccattaatgtaacagatagcatccaacagatggacagaagtcgaagaatcacaaagaactgtgtcaactagcagagagtccaagcagaagggcagatggacttcttcagtgtccttcacggcactggatcccatcaaagaaccttgaagaagtggctgccccttgctggacctgaattctactgagtccctggcaagaccgtcttacctggcagcaaactgctgcctgatttgttgggaccttctgagccttctacttatcatgtaaatgtattggcacagtgcttacatatgttaataaactgcaaatgtgcagttcagtttgtctctttgcaactcctgtaatacggtctggtgtaaaagtagtgagttaaagctacaggtcagtttatgaaacagaaaagtaggaatgcattttctgggtgaaagagtcacaccttagtgctataactctcctgcccatgatagtgtattctgtttcaggcaagcttattctttccttccttcattttaaatattgtcattacaaatcttaccaggttcacttaaaagctggctttcatccaactctaaacccacatattgaaaaaatcaaggtacaggaaaactccttgttatccttgtttccttagcttggtatgagacagatcggatccagtttcccatgcaccaacccactgcccatggcatgtctttgggaggtgtctgtgaagcagtcatacctgctcctcatctgcctggaaagtcctcctattccagtgtccatgttggcctccagtccttaatgtcaccatgcttgtggccaatgcatccaaataaggatacccctcagggctcagctagacattgcaattttgcatagctttccagttccctttgcttgtcttcttgactgtcttccctctctaccggggtcacttgcaattgttaatcaaagattgaacactgcgtaggagagggagatgatccagagacatgtggcagcaggcatggcttccccttggcctctctgtacactgccccaggactgtcattttggcatctgcaaaggaatcactttagaaagccagcacctggttgatgtgtattcatactgacattagattgatgtgcactgcattagaaatgaggtagctgacacagaaaaaggatgttttgataggaataattttctagtatgtcttgaaacatgttcatctggaagtattttcctccaaagtaatgtagcatgatttttcaaggattgttaacatgcctgggattgggaaagataggactaaagttgtgccaaactatatcaataaattccatgtttagcagaaataggcagcctattggtgttatgtttatgtaacatagtccagagaactgacatgcaggtcaaaagtcagatacgcaacctccttatctgctaactctgttattcttcaaacacaagtgggtagtgtcatttttccttccttccttccattggcagattgtatatttattcacaaaacattaaatgtccatcctgtgccaggtactatgcagatgttgagggatttggggtctggttagtcgtgactatctatcctgaatctaacagtgacttcataactaggagactgaattagacccttaaggtatagtgtgtgttgcaaatcactctgcaatggaaacttttatattcagggtaggtttgtgtcttaaactaggtgttctaatcaatgtacaagactttaccatacacgcaactatagtttttctaaaccttcatcattttgtgattctttgagaaagggcttttaggaactttatgttctaaaaaatgtttttaacaataataagataaaagaaaaacctgtgattcatatgtccccactggcattactcagcaggagcccccagctgccaaaggttggcagtgatcctgcaagttcaagggctctttctccctggggatgtgctttgtggcttctctttacagctttgtttctgcatcagttcactgctgcatgttgtttggaatttatcaccttaagaaagtgtctctgttttatatagaaacactttctcacttacaggggagaaggaaatgcagggcacatgatctggccctccccagaacaatctggatttcacggagacagcaaccagaagttaaaccatgtgactaaaaatgcatctggctactttttcatgtatgtatgagacagaaactaatccttactatcctattaggataccacttttcattgcaaagtttgtgtcaataaagtcattaattttaaacat

SEQ ID NO: 16726 - protein, 145 aa, Homo sapiens
MGCGGSRADAIEPRYYESWTRETESTWLTYTDSDAPPSAAAPDSGPEAGGLHSGMLEDGLPSNGVPRSTAPGGIPNPEKKTNCETQCPNPQSLSSGPLTQKQNGLQTTEAKRDAKRMPAKEVTINVTDSIQQMDRSRRITKNCVN

SEQ ID NO: 16727 - DNA, 2290 bp, Homo sapiens
  CDS (718)..(1017)
gcggctgaagggccttttttttttttttttttggtagagagacacaagattattctaaaatgtatatggaaagcaattccaaaaaagaagagtagaggaattgccctccctgatgttgagaaccgtacagctacagcacagcgttatacggctcctggcagacaaccagtcctgctgcagcgaggtggggacaaggccgggagcagctcacttcccagtagaggccatccgatggcgccagggcacggggcagctgccgtcctcatggcccggggtaacgtgggcacagggtttcctcatcccactgtgctctgtgtctcccctgagcccggtgattttacgcacctgacttcgttagtcttctcggcaatgcccagcgtgcagaccaggctcgagaggtgtgtcggtgtgcccagggtcacgcagcttcctggtggccaagccgaggttagaagctagttctggtgggtgcgaaagcccccgatgtcggcagctctgccaccaggcccgcacaagcaggtggtgtaagaggggaggcgttggggccggcagtgctcaagtcaggattgagccgtctatctggaaggtctgttgagggtgtgtgctggtggccgggaggtggtggcaggctgactacctgccattttcctgcagtgcctaggcccaggagagggagcagcccccggtcaggacccagctgcaggacaccccatcctcatggaccttggttcccgctctccgtccccccacaaatgggctcccagcataacttcccccgagggctcctttcctctccccacacagagccctgttccggagcggcgcttgcagcacaccaatgacaggaggattgggcttcagggaagcaggcgcctggagctgtgtccagttaggtgcgtggcgcttgcagatccaagcatggaatattcatgcctcccccggcccagcagctgcggcttctcatctggaacaagggggtgcttctcccaggaaggccagtgggagcaggggtgtgtctgagaatgcctgggcgctctgccctcacgatggccgctgatgccacaggcccggcctctgtgcccaggccactctccagcctggtgaggtctgttctgggaaaagagagaagcaagacagatgtgggccttgccctgtggggccagggcacaggcaggaatcccacttggggttaagacgctgcagtcacccctccaggtgccggggtcccctgtggccgtggcgttctaggagagatgggcagggagacgctggcgccctgtcgtgtagcttatccttgtatctgcttcacaggctcttccactgtgcaatttcctaaaattttggcgaggcccatttatccattttaattttattctgtggattgtgctttggtgttgagtgtcagagctctgcctcatccagatcctgaagatttcttttttaacataattctgtgttttacatgtaagttcgtgatacagtttgagttaaattttatttgagatgtgaggtttcggtcaaaaaaaatttttttttaactaagtgtgtccagctcctccggctccagctgtagcaaagacaaggctgcccttcctccactgaagcgcctttgtgacttttctgtgacttttccgtatcgattaatagggtcatatgttgtttattctttagcctgttgatatagcagattacattgattgattttcaaataccaagctagcctcgtacacctaaacgaagtcccacttggtcacggcataatattctctgttagaaagtggcctggacgcgtctgtgggtctctttcgagttcctctgttctgttctgctggtctccacatctcccctccagcgctgccccagccatgtctgtctgacgtaggagccgtataacgctgtgctgtagctgtacggttctcaacatcaggaagggcaattcctctactcttcttttttggaattgctttccatatacattttagaataatcttgtgtctctctaccaaaaaaaaaaaaaaaaatgctggccgggcatggtggctcacgcctgtaatcccaacacttggggaagccaaggcaaaaggatcgcttgagcccaggagttgggagaccagcctgggcaacacagggagaccccatctctatgaaaaaaatacagccatgagtggtggtgcgcacctgtagttacagctacttggcacgttgaggcaggaagattgcctgaggctgcagtgagccaagaccacaccactgcactccagcctgggtgacagaataagaccctctttcc

SEQ ID NO: 16728 - protein, 100 aa, Homo sapiens [sequence omitted]

SEQ ID NO: 16729 - DNA, 2973 bp, Homo sapiens
  CDS (484)..(792)
ttttcataaggacatcatatatgaattagaataggaatgtttactaactgccctaaaacataaagatggtgctcctgaacgctacaccagttgccccagggcactgtagtgaactcacagggaggcagccggacatttttaaatttcaagggaaacacagtgacatttgccagctaccatgcaaactgccgttattaaattgtttagacccattaggcacttgctttggcctaggtccagaacaattaggtacttcttttggcctagagtttccatgaaaaaaactactgaaacactaaagatgctgggaaccaagaaagtttaagaatctctgtaataagaataagaaatctatacgaggctgggcacggtggctcacggtggtaatcccagcactttgggaggccaacaagggtggatcactggaggtcaggagttcgagaccggcctggccagcatggcagaaccccatctctactaaaaatgcaagggttagccggatgtggtggcgggcgcctacagtcccagctccccaggaggctgaggcaggataatggcttgagcccgggaggtggaggttgcagtgagccaagattgtgccactgcactccaggctgggcaacaagagtgagactttatctcaacaaaaaaaaagaaaaaaactatacaaactgctgttctctgtcaggctccactactctggtgtgcaactgcaagaattacagacagagtgcctcagagaaactgactggccttgaaaacctaaaactattcattgataaaaacagtgagtgatgatatggagcacctggaaggaacagtttggtgttacagctctaaaaatctccagcaaactctattaggtgagcttctaaattatttcaaacatatgattttcatcaaaaatgcccctcatgctgtgataaaacttaaatgtgcatctggctatttacctatgcaaagggagggcaagagttgagagggatcaggtagagcaatgggtgttgaaaggctgcaactgaagaaaaggaagacctcaggcatggtttttaatgaatagtcaatcaacctattttactcacaggtggtacttctgagatttaacctatgcttcatccctcctgaaaaaccggaacacagcttgaggaatatttattgaaaacttaccctcatttttacttaaaaggatagcatcagggaccctattttaggaatactgtgtcagcctaaataataaccagagacagactctctaaaagaaaggatatttatttaaagatagagcattgcaatgtcagtatgcatgccatagtaaactatgtgtgtgttcagggaggtaaagacaaaggtttttaaagggaaaaaatgaggaagattacatcattgttttgaaataattatccgtggctacaaagatcaacaataggggtgatgccagcctgaggttggacaggcagtagtgggacaggtgtccttgcagaggtactttttatataaggtggcaatggcctttgtgcaaggttgtgggttttgcagttttttgtgacagtttttgttaccagacatacacggatgagaaccctctctttgtggccttcccggctctatttgtcatggttttcttaactttagcaattccattttgattctaacaactatcacacttgcatttgtgcttatatagcaccaggagtactatcaggacactttgagtttccctgcagagggaaaggtgattgagtagataggaaagatgacaaagctattctcctcaaccatggacacatctgcacatgtaatcccagggccaaggccacacttggcttgcttcgctgatctctcttttacataaattccatttagcattttggctaccagataaatttctttccatttaaatataaaaagtcctatcagaggaatgaaggattgcaattttataaaaggtcataaggagaggttataacaatctttaacaggaatatgaaaaagcctgagtttgggggaaattttctgaacctgaaaaaggaagaaacagtagccataaggggaaatggcttttgaattttaacaaaatgaacttcgtatgttgctaaaaaatatgagctgaaaatatactgctttttttccctgagttatacctatctcctgaaggaccaagagtggcccgtgtgatgtcacttggcaacactaatcgatgagatgtctcgatctaaggcatcttagcaccaataacaaaaacattttaaaatcaatgattatataacctattcctattttctttgagagaagagctcttcctaaaaataccaccaaccatattctctttcagctacaaatgaattcaaatgtaattttttttctataacattaatgtcaggttttatgacccactgcagagaaataaatagtttaaagtgtttttggactactggcatttaaatggaaagccagccttaaggtcgtgtgttaggtcatgtaaagcctgaagctgtcctaggtcagcgtcagattccgagtcatgtttgcctagtccgcacatgactgcagtacttgaataagtgcctacagcagacatttctcattttcccagaactatgatttgtaggtaaagaaatggaactgtggtgtatccaacatcatgtcatatatgctaaggtaaaatctggcactaaataagaaaaatggtttaactcttaaatggaatgaaacttttaaaaaatctgattttttcagctcttaaatagggaagttaggctggagacagtaggctcagtcatctcttaagcattcatggaaaaacctactatgtgtagtcattttgctagggtcatggggcctacagagacatatcagacagtagtaggagatgataggttcataaacaataacaataacagcaccatggcacatgtatacctctgtaacaaacctgcacgttctgcacatgtatcccagaacttaaagcaaagt

SEQ ID NO: 16730 - protein, 103 aa, Homo sapiens [sequence omitted]

SEQ ID NO: 16731 - DNA, 2103 bp, Homo sapiens
  CDS (17)..(1771)
ctctttccgggacaacatggcgccgtccacgccgctcttgacagtccgaggatcagaaggactgtacatggtgaatggaccaccacattttacagaaagcacagtgtttccaagggaatctgggaagaattgcaaagtctgtatctttagtaaggatgggaccttgtttgcctggggcaatggagaaaaagtaaatattatcagtgtcactaacaagggactactgcactccttcgacctcctgaaggcagtttgccttgaattcccacccaaaaatactgtcctggcaacgtggcagccttacagtacttctaaagatggcacagctgggatacccaacctacaactttatgatgtgaaaactgggacatgtttgaaatctttcatccagaaaaaaatgcaaaattggtgtccatcctggtcagaagatgaaactctttgtgcccgcaatgttaacaatgaagttcacttctttgaaaacaacaattttaacacaattgcaaataaattgcatttgcaaaaaattaatgattttgtattatcacctggaccccaaccatacaaggtggctgtctatgttccaggaagtaaaggtgcaccttcatttgttagattatatcagtaccccaactttgctggacctcatgcagctttagctaataaaagtttctttaaggcagataaagttacaatgctgtggaataaaaaagctactgctgtgttggtaatagctagcacagatgttgacaagacaggagcttcctactatggagaacaaactctacactacattgcaacaaatggagaaagtgctgtagtgcaattaccaaaaaatggccccatttatgatgtagtttggaattctagttctactgagttttgtgctgtatatggttttatgcctgccaaagcgacaattttcaacttgaaatgtgatcctgtatttgactttggaactggtcctcgtaatgcagcctactatagccctcatggacatatattagtattagctggatttggaaatctgaggggacaaatggaagtgtgggatgtgaaaaactacaaacttatttctaaaccggtggcttctgattctacatattttgcttggtgcccggatggtgagcatattttaacagctacatgtgctcccaggttacgggttaataatggatacaaaatttggcattatactggctctatcttgcacaagtatgatgtgccatcaaatgcagaattatggcaggtttcttggcagccatttttggatggaatatttccagcaaaaacaataacttaccaagcagttccaagcgaagtacccaatgaggaacctaaagttgcaacagcttatagacccccagctttaagaaataaaccaatcaccaattccaaattgcatgaagaggaaccacctcagaatatgaaaccacaatcaggaaacgataagccattatcaaaaacagctcttaaaaatcaaaggaagcatgaagctaagaaagctgcaaagcaggaagcaagaagtgacaagagtccagatttggcacctactcctgccccacagagcacaccacgaaacactgtctctcagtcaatttctggggaccctgagatagacaaaaaaatcaagaacctaaagaagaaactgaaagcaatcgaacaactgaaagaacaagcagcaactggaaaacagctagaaaaaaatcagttggagaaaattcagaaagaaacagcccttctccaggagctggaagatttggaattgggtatttaaagattcacggaaagcaagttgatgaccagaaatcagtgcaaacacatcttctgttaaacccattggtatacacagaatattcctgtgcccacacttaatgtcaatctataattttaaccatttatccaagattctactaagtgtaaaattatttaataatgtctattaaattgatatttatatcttgcatcctatatcatgtcaatatgtgatatagaaaagagatacgtgaattttttagctaagcttgacagattgaaagacaagtgtcatttttttttgtagagggtgatatataccatgtaaatgaataaagacattttaaattt

SEQ ID NO: 16732 - protein, 585 aa, Homo sapiens [sequence omitted]

SEQ ID NO: 16733 - DNA, 1655 bp, Homo sapiens
ccatgagactcttatctttgaatgtttttccgttgcttccgcctctgtgaacaacagaagtgagaagggggtctgttttgtgcacttatggggtatacttttatttgtgaagggctttgcagccagctttatacatggataatcttataacttgatagataaagatgaaggcccagtgtatcataggtgagaaacttcaatggtacatatggtgcctcataatcattcagaagcagaacattggttcactcctcttaacccacagcatgggttaaagagaccattgccaagaggccttccctcttctagaagggcatcatttgttaggtcctttttccatggtttggaattaaaaaggcaatgactagaaacatatccctcatggtagactctgtagcagattctactgtaaaggctacacaacagatgttaaattctcttgtgaagttatgctaaaaaatagaattggctaaacaggaaagtacctgtgcagatgctggcacttaaggcctatggagaaaacatcaggtgttatagagagtctgttgtagggaattaacgaaaagaccactgagttaagtcaaagaatggtctatttgagtttaggtggtctggtttatggggaccctggctaaggagcatactccaaattcttggtgttaaccctctcagtagtcataagaatagtctccctggtgcactgtattctctcaaaggttttaaatgtttgcatgaagccatctttagaacgtcagatggtctctcttcaactggaatgacaagagctgaaagaaatgtgtgaccacgaggacaccgaaaccgatgagtgacatgctgagactggaaatccaaaatgatagtaacggagagtggcgctaacatcctaagttttggtcacactcttgcctaagtgacaacctgacaaagggggaattttttaaacaaaatgatgggaggccattgttttggactgagcactaggtcccaacagaccaaaccgaaccaaaatggcatcattcgtgctaaatgtgacataatcgaattaagactttaaggaaacacatgggtcctagaatagaccaggttttgtttttctcttgcaaacaggactttccagcataaggtggtatcctcaactcagtccttgttcctacctttgcaaaactcactgttctgcttcctagtgggtttcaagacccatggtgacagtggcatcaataactcaagtttcgatcaatctctcaaaactgataaaatgaccaaaaagggggaattgttaaagcgaactaaatatggcctgagaaggactccgtacttctgtattggagtccctgtgaacaaactgagcctaacttaataggtagacaagattgaaaacctaaattaggagtatgtacctgtcacaattgctgagtctcggccagtcccagcagccgtacttcaatcactcatacactgctgaatgttcaaactgtgtgtaaatagggcaaatgccaacctgtaactaatccaggtgtttctctacctcacttccctttttttgtctataaatcttccaccacgtggctgcactggagtctctctgaatctgctgtaattctgggggctgcccgatgtgcaaatcattcattgctcaattaaactcctttaaattt

SEQ ID NO: 16734 - DNA, 2123 bp, Homo sapiens
ttatagttattcttttccttatgaaaaacaaaaaggggactgggcgtggtggctaacacctgtaatcccagcacttggggaggctgaggcgggcagatcacaaggtcaggagttcgagaccagactggccaaaaggatgaaaccccatcactctactaaaaatacaaaaaattagccaggtgcggtggggcgcaccagtaatcccaactactagggaggctgaggtaggagaatagcttgaacccgggaggcggaggttgcagtgagccaagatcgagccacggcactctagcccaggtgacagtgtgagactctgtctcagaaaaaaaaaagaaaaacgggatcgagatggtttgcaggattagcaagtgatagagatatattgaagacatagaaagccagtgtggttgctcacacctataatcccagcactgtgggaggccaaggcaggaggatcacttgagtcaatgagttagagaccaacctgggcagcaaagtgagaccccatctctacaaaaaaattttttaaaaatcagccaggtacggtggtgcacacctgtaatcccagctactaaggaggctgaggtaggagaatctcttgaacccgggaggcagaggttgcagtgagccaagatcgagccacggcactctagcccaggtgacagtgtgagactccatctcagaacaaaaagaataacaggatagggatggtttgcaggattatcaagtgatacagatgtactgaagacacagaaagccagtgtggttgctcacatctataatcccaacactttgggaggccagggcaggaggatcacttgagttgacgagttagagaccaacctgggcaacaaagtgagacccccacctctacaaaacattaaaaaaaaatgagctgcacatgttggcacgcacttgtaatcccagctacttgggaggctgaggtgagaggatcacttgagcacaggaggttacagtgagctatgatcacgccactcgacaccagcctgaatgacagagcgagaccctgtctcaaaaaagtggggggaaataaaaggatatagtgcactggattgaaactttctcctgtcgttatcataagcagaagaattgaagtaactaaaaagagaatcatagtctcaatgtgtgcttgaatgttatttaacatcacgtctctgctacctcatcattaaccagctgtggtaatgattccacactttgaacccatcccacctgttgacagaagcgattgcaatgccagcatcactcagtgacggctcatcatgtagggcccagaatactgattttgtgacttctaagcttgtgctccattcccaacacaaagtcttctgaccagcctttgagtaccattattgtagaggaagctcatcttaggtaactattactagagcagaaatcacttaatataaaatatttcatgtatcaaatttaaaactcacttttgggttcattgatgtagtaactcaaccaggaaacttaaatggaattagtgttttcactgacaataatgatgctgctttttcattataggcccataagatggcctggcctttccttgaaccagtagaccctaatgatgcaccagattattatggtgttattaaggaacctatggaccttgccaccatggaagaaagagtacaaagacgatattatgaaaagctgacggaatttgtggcagatatgaccaaaatttttgataactgtcgttactacaatccaagcgactccccattttaccagtgtgcagaagttctcgaatcattctttgtacagaaattgaaaggcttcaaagctagcaggtctcataacaacaaactgcagtctacagcttcttaaagttcagcgtgttaacctaacataaaacacagcaagaatctggttgtctgaactattttaaattaaggagccagatgtttttagtcaggctatcctgacaagacttgacctaaacttcgtttttattggccataacagtccaattatattcttggccaattttgtccaacggacaagaaaaaagcaaagtcaacgacaccattatcttgtcaagatcagatggttttactattgtggcagaagcgagaaaactttgtttgttg

SEQ ID NO: 16735 - DNA, 1584 bp, Homo sapiens
aacgcgctccttgtcattgtcacactgtggtggcctgggtttgtcctccttgcatgtgccagcagtgattgatgactcacaggggcaattccattgtcccagagcctggagctcctgttgctccggggtcctctttggtgttgaagagaagcactcatcccttcgtcagaagacacacacacacacacacacacacacacacacacacacatacgcacactccatgtaggcttagtaagcccagccagtcagtgcccagtcagccgtcccccttccttgtggctgaaccgcaggaggtgggggtgcatctgctctgcaccactcagccagagatgcaggagcctctgcccagctcagaatagatgatgttttcttattagtggctttatttaaaagccatcccagtcatttcacattttttttttaaagttttgattgacatctatttggtcaacctgtgctccctatggactaaaatagctgactggggcattgtctgggcttattaaacctgcatgttgtgtgtgtgtgtgtgtgtgtgtgtgtgtctgtgtacacgcacgtgtgcacacgcaggacaagcatagcatggaatttgatggagtggatgtggagggaattgaagtggtctccgtgcagaagggggaaggtaggaaccaagtgaagtgccttgtacaggcgtcctgctgccgctagagggcgaagtgagtctagaatccacatgcccgcgtcctgcctgcgagttttcccctaaagcagctgtgctggctcccggacagcagcttcaagttgacctcttagaagcccgaccctaatttccgatgggctcagggtcataaattagatttctgttctaggaaactaatttcataccaccacaatactttaaaaagtgatcacaaaatgaaatacacttatacgttttacaaataattacatgaaaacctaacacttaaggctaaattcctttggtgggtgtaggggatggggattgcttggagaagacataatgaggcttgcagtctgatgaggtttgaactgcaggtaccctctttctttcctgtgactttccctttagcaagcacagccattcctccttgccacaagggccttcaaactgtgatggaaatgagggtcatctgtcttggaaatatgcaccgctgagtggatctgcctgcccatttccggagccctgtgcctggcgactgctgggggatgggcagttgcagtggtgactctggaggggcagctcagttcataggatgtaatcatggttggatggactccagagggtcataggatcctttgaaattataagcaagtatttgattgtgagtttatctgggtagagtgtccaaagcattcactggagtctcaagggaatccatggtccccaagagacactattgtacgttcaggttcctttctagtaatacttttttctaaaaagtgtctgtaggtcagttcttctaaggacttctagagatagtagtgatagtggtacaacaaagtgaaggtacttaactgtacacttaaaaatggctaagatagtacattttatgttatgtgtattttactacgact

SEQ ID NO: 16736 - DNA, 2149 bp, Homo sapiens
gagaaacaagttggatgacctaacatcctgttagagactggctggaagaggaacccagaagtagactgcactgtttgaccctcaccggtcggtcgtatgcagagtggttgtgttcttgagctgaggaatgccggccttgttgcctgtttggctttgattacagtatttgtagcagaatgttgctatggagattcatgccaggtacgcagtgggaggtgatctagaagaccgtgtgccagccactcgtaggtaatcactggcgctcagaacatgctgagacaagagttctcgttggtttatttccttccccagctgtgtgagttttcagatttcatcattggaaatgatgtcttacccaatgatacaaaagcagaggaaatgcctttgtagaatttcttccaagggaagaatgaaagtagagaggtgacttagcttagctttgttgtctctagaatacgttacagtgtgtcaagggaaggcttttcaaagtatttgtcaagggattgtgaggaacgtagtccattactttgtcaaagagtttatgtgaaaagtagatatttgaataatttcttatatttcaagcagcgttacagctaatgtttcttttaaatcaaaccttttatctccaaggttaactaatggcacctcgaggttacatctgcagcccagtgtctaggatagtagaggaacatagtgcaaattcatgtttgtcatcagagctgggtgtggtggctgacacctgtaaatccagctactccgaaggctgaggtgggaggatctcttgagccccatgagtttgagaccagcctgggcgacatagtgagaccctgtctaaaagaaaaaaaacaaaagtggtcaaacatgtttgccatcagacagtagttttcattaatgtgaacatgactgaggtcaagaagtttattcatgtacccagcctttgcggagcatctgtggtgtgccacttgggggatgtgaaaccagtaaaccacatagttttcatcatttaggatcatgcaggtgtacagggtacatgtgaaacagtagtgaggcccacacactggtggggggagatccagtaagcctttggaaggtggggggtcagcagggagtgtttcctggagaagatgaatgactcataagttatgattcagagaatgagttgagagttagccaggtaatgagggagaagggctcccaggcatatgggaggaacaaaggcacttagggaagaagccgggacagagtgtgtgtgcatacaggaatattataagtattgctggagggaccagggcagggtgtagtgggggctgaggcccaaaaggcagtcagggaccagatggcctcatatgccctgttaaggagcttgggcttgatcctctaggcagggagccgttggaggatttaagccagggagtgctgcggttggtcacactcgccatttatgtagatcgttttggcagccaggggaaggatggatttgagggggatgagattagaaagctgggatatgagttaggaggctgaaagatggttgataaaaatgatcgttgggcagccgagataactgacttcaaggacatatactggacttatagcagagcctgttgagtcttgcttttgcacacagttcaaataatcacttagtcatgtggtttatctgccagtggcaaatgttaagactgtggggaaaaactagaagaaccaataacatcatcaagaaataagtgataggaggcaaaagtcataaaagccgtacaaaaattggaaagttgactgttgaagcatcgtggttaagacaggatttgggttgctaggaaactttggggcaagtatttaaccttcctaagtgtcagtttcctcctctttaaaatgggagttagtaataccatccttattgagttattctgaggattaaataagatgatgcgtataaactattttacaccatgcctggcaagaaaacccagtaagtggaagctgttactgtgaatacattttgtggccttttgattagggtagtgttttccttagatctctaattttgtggatgttaattgtattataattacattaaaaagagttccatggtaaatcaatttgggaattaaagaggggtttgtttttttgagacagagcgagactccgtctc

SEQ ID NO: 16737 - DNA, 2683 bp, Homo sapiens
aacagaaatgctgttcagtgaataccaatgcactgaatatacaaaaaagcttagttacaaagtaatccttaatggaaatctatattgaaaaatgttgagtataaaagtcaaatatttgtaacatatatccaaggagtattccagagagcagacctatttatgaataattttaaaagtaagcagagaaagtactctgttttaaacactgtatacagtgtttgaatttgaatcattttccacttttatgttctttataatgtttagaaataaaacataggttcttattttacacttgcatccatggagcacaaatcctaccaacacaatcaggcaatgtaagttttccaattagaacaactcaactgctggaattgttaagtaattgaatgatgagtattttgtaagagttcagtaaatacttgaatgagtaattggatattggaaaaggcattaccaggtagttcaaccataactctcatagtattttctaaatctgcaaatatacatgattttcccccaaaatattatacattaagttatttcagaaaatggactagatgcctctccttaaaggtaaggtcataagcacctcttgaagttgagaataatttaaaatcattctgttaaaaatcacagtagtttttattaaaattactatttagtgtttttcgagtgaaaggcattgtgcagtgtactttgtctaccttatcttatatagtcttaccatagtcctacttgataattttgtaaaatatcgattttatcagtgagaaaactgtgagttagaagagatcacttgctaaaagttcagtagctcgtaaatggcagagctgggatttgggtccaagtatgcccaataccttagcaggcagccctgtccattgtatgacacaacttgtatatttcgcttatcaaagggatgctgggctgtttgttcactagttttcaggttggtactattttaaatggctgacttataataaagcattcagatttgagggttgtggcagactcttacatttagtgctgcttcctactgtcatgataataaagaaaatggaatagcttgtcagaattcatcactctttgttttcataacgcttgtttatttgcttcctttgttaaccttcttttcatattctacttgatgggttgattctactctatcataaccagcagtaaagccccaaaatattgcaactaaataatattacaacaaatttttgtccttttgatgaaaaacttattattttggaaaacaagcaacacaaagttttcatctctttcagagtttggatgataaaattattgaaaatatcaacctctgtggtgagtcagcacaaatataaagaactagctcagtcacataaataatgagagttgctgagttagagtatggttctgctgaaaatctagatgatggtacagtgggcacttaattgaaatgtcgtaatgagaagatagtgcctctttttggctaagcgtgtttggcttcccaacacatagcttgaaattgaacttaggagtggttcttagagttggaaagatgaatgccctgtactatttcaggtatatatgagaaactattattggaaagaagtgggaggaaaataagtctgacctggcaagccaaagtgctgacctggcctcttgtctagttactcacgctcaaaactgtctggactgtaattagaaatgcactgacaccacactgcaggaacaactgctacatcaaatagtgctttcttaggttggttcccaggagggatctggcaatccaaaagttaaaagcggagctgccaagacgaacagttgcttcactaatatcctgacatcagaagggctttcttcatttaattatagacataatgaattctgtgtgggttctaatccatgatggaaacacaactgatgagagcttaggaggtactgttgtttgggacctcgcaacacctggcccgtatatggaaacagctaggcttaagtgttactcagacattgctagattcagcagaatccacagccccgtccagcggagacaaggaaattaaagactcatgttttttcttctaagtaatggtgttcctctataattaagcatgcctgggctctccttagggaaatagctggcatggcagcatatgactatagttgttgtatggaagaaaccactatacagcttaagctctttaactttggtgaaaaattgatttattttccagcaaataatgtaattatttatttaaaattatacgtgatgctacaaatgttaaatgtttaatttactgaattgaaaacattctaaatataggaagttacatattgtatttcactactcaaaagcacagtgaaatgtgtaagagtatacatttatgaatgtctatttaaaaagttctgccaactttctaggaaataaggtaatcccagtgctttgggagtacaaatagagtcacttgagtccaagagtaccagaccaggcgggacaaaaaagcgagacctcatttctaaaaaaaaaaaaaaaaaaaaaaaaagccacatgtggtggccatacgtgtattgtagtcccagctagtcaggaggctgaggtgtgaagattgcttgatcccaggagttctaggaggcagtgggctattattgtgccactgcactccagcctgagcaaccgagcaagaccctatctctt

SEQ ID NO: 16738 - DNA, 2076 bp, Homo sapiens
agaaaagatgtgttcatctaattcactattctccaaatacagaatagtttctctatgataaagcactggcatcttatcatgacggagagggtagtagccttgaatgatgttttaactggtaattgcttttatatcaaacacttttcagctgattatgaacaagattcagcctaattttaaagctaaaattaaaaatacgtggggcctcagttttacctataaacatgtaatgaaaaggtgtttttatttttttcctgtggcctctcaaggaagaaatgattctatctttaacacgtttttatttattttatgaatgggcaaatatcctaacaaaaagaaacacacgtcttaccattcatcttgggagagaaggctattgcttgataactaaggaatactatttttgaagcacctttacagtacttgacatgtcagttatgttttcaatgttcagccctatgtcagcctgcaggaatttctcatctgcccatgtctgtctattcatattggtaagtttcagcacagccctctttaaaacttcattgtgttactaatatttaatttttaagttttaaaatctagcacttctgtgctagatcctcgaatcaatttttacattcttttgaaatttatagtaatatttttgcctcatccctatactcaataattggcagtgagctatattatcacttaagtaactttattaccaattgtgctatattctaccatcacaaagtattcttttaaggcattcttcagatactgtcattttcattggtgtcttccagaacgattctataaaaactctgtaagattagcccttttactgttatgtgaaagaaacagggtaacatgatgggcaaaaaacttgagactgaaattttacgtgtaacactgtcatgtgttcattcaaaaaaaaataatttaacttctgtgtgttgctatctctgcctttaaaatacagtagtggtgccgtatctcatgtagacaggttgtgaaatccaaaaaatgtattttacatgttctcggtttttaagccttacaaggttcttttccagctagaatcttctttgaagaacaggaaacaaagaagacttttcctggcctcctcttagactctggagtagggtaactaaaagataaatcagctacttcttaaaacttccaactcccaatcatatcaagaataacatttcaaacaaagcataccaatgaaaattcaaggtatcttgtaacttcccccccaccttttcgggagctgggaggggttaccaagctgttcccaaagctgaaggaaaagaaggcatagtgtgcctcagcaactttcctgagctccgtatttccttgactgcagtttgtgttacctataaagggagatttatcatatcttggtgccaaagctcaaaaattactgggtaaaatatatacatccccatgtatgctgcttaaatacacacatgaacatataattcaaattttcactgtgctatatttaagtaggtaagacaagaaagacaaaatctctgaattgaagcagatatgaagcatataaatgatagtacttcctttttatttagtgcctttactttttgaaatttttgcacgtaattttatttcatcctgacaactttaaatagttcataagacaagtatacactttataaatgtctaagacacagagaggcaaaggtaaatgcttaaaggttgttggactataatggcaattagctaacttcctgaattatctcctttacaggaattcccttttaaaatattatatacagatatatacagacacacacaagaagtatatattcataaatattcttaaaaattaaggttatcaatatgaagtgtgtcagtcccttggaggaattagtttaacttcgttgtagatggaccagatttgaaatgagcaaaaagtctatgcctaaatttttcaaataaaaagagcattgaaaaacatcttgatttccctctccttgccccctaccaatcctagtaggattgtgctttcaatcagagactctgccttcaatctgagtgacatcagactcagagcccacactttaaggc

SEQ ID NO: 16739 - DNA, 1672 bp, Homo sapiens
caaagtatacaaatgttggcagggagcattcattttacaggtaaacatactggcatagaaggattttaggcaacctcatcagggtcacatagctaataaatgtcagaatgggattgaacctgggactgttagattctacgcctcctcattcattcatttattctctcactcattcacatgctctgttatgctgtatggtgttgagtaccatatttcagatattggcacattcggcttgtataaggggagacgcttttttgcagttggacggccattgaagacaagttggtcaccccaagttttctttccagttcttctgaaaaactcactaaagaaaaagaaagcaagaaatacagaaaagtatagaaaaataatccttattcccaccacctagaattaagttgttaacaagatgaaaacttcatactgaaaaaccaccctttctagaggcgatttaccacttattccttgcctttcaaaatatttacttttcaaggtaatctctccttattaatttgaaaaaaaaaatgtttcttttaaatagagattgttaacttggggtctggctaggctgtgaatcctctgatattaaacaaaagattttgttgaaggtgcttataaggctttatttttcttcctttctgctctagccccatatgtgcaggattttcattagatcctcaaagagttctgtgacccccaccctctccctcctaccttgttactttgaaacattctcactacagatttagtggggaatttggtcatttatttggattattaagagtttggaaactgcttctaactaagcagatgatgtggtaacaaagaaggcttatttgtgaaatagtgggtccaagattgatcacatctttctggtaaaccagccttatgcctactctcttttctcttatatcttcatgttttgccctttaattaatgaagcagtttacattgtgtgctgtggactgtcatatctgaaagcaaaagccttgtcttactcatccgtatatctcctgctatacagtaccatgtgtcttatgtaagtctttgtatctctgctaggttctcatgaagtcccatctctgtagtaagaataactcataaatatttctttattagccacctactgtgggaaatctttgggacttcaagtcttgaggtaacagaacttggttgcagctattatttacagtagatccctgtgggatgttttaattgaaccattatttttagtttagtcatttttaacctcaccaacttaactggagttagtattgtgaaagttttcagtgtttaataagcatcaaagtagcatattttgactctcggaaattcactagactatctgtttctgctgttacctgattatgccatctagttgattaggaaaacagtttttaggtccttgaggcagtgcagttgcatttatgacagtagtttatctgaatttttataaggataatttaatgggttaaaaaatgtggatttaatgaggaccttcataatttttccatacttgaccacagatgaaagggaatttttacttcacattggtatgcgaagtagtgcctgctggtaccacttatatttttgttaggaccagtaggaggcaccaacatccatggtgtaacctacaccaaacctaacttttttcagctttcatcttttc

SEQ ID NO: 16740 - DNA, 2431 bp, Homo sapiens
  CDS (1063)..(1686)
gtgtctttactcatttcaaaggcacttcggaaagcaaaagatctttatgattcagtctgctcttttgaacaagtgcccttttgcttgtttttttgttttttttttaaattaatgtattaatgtatattattgactcagccaatgtctaattacccttaaatttttttctgggggagaaaacccatccttcttcttttttttttgaggctttgaattttctatttgtgaatctgtccttttatttgaatataattttttaaattgcatttattttgttttatgatcaagtgaaatttatggaaaaatatactaattaaatcatcctttgttagctttaaatcaaatagattattgtacataataaagtttatagtttatgataaatgtattcttttaaaactatgggatgatccagttcttctctagttgtctggaggacttttgtgtttcaggctattgagtgaatgaattagctaatgaatactttggtttaacttagcaaaggagacacaaaataatctaacatggcactatagcatttattgctaattttagaaggaaaatgattttgatttctgtcatttatatatacaatattttatgaatgggatagtacaaaataatcatttgtaaggtccaggatgtgtttctgttttcagaaaaaaaggaccatttactccatctatttgatggtatacttgttccttacagtaatctcattttttggatctaaacattttctttgacctaccacagtgttgtcagaaaatggttctgcagtggcttatacctgtaagtcctaatataatgcaatgtgggtatattattttcaagcttaaaaggacctttcagttttattagtggggaggagtacagagttacaattttgtgctttatttggctgccttccgagcggacgtggatgcagctactctagctcgcattgacctggagcgcagaattgaatctctcaacgaggagatcgcgttccttaagaaagtgcatgaagaggagatccgtgagttgcaggctcagcttcaggaacagcaggtccaggtggagatggacatgtctaagccagacctcactgccgccctcagggacatccgggctcagtatgagaccatcgcggctaagaacatttctgaagctgaggagtggtacaagtcgaaggtgtcagacctgacccaggcagccaacaagaacaacgacgccctgcgccaggccaagcaggagatgatggaataccgacaccagatccagtcctacacctgcgagattgacgccctgaagggcactaacgattccctgatgaggcagatgcgggaattggaggaccgatttgccagtgaggccagtggctaccaggacaacattgcgcgcctggaggaggaaatccggcacctcaaggatgagatggcccgccatctgcgcgagtaccaggacctgctcaacgtgaagatggccctggatgtggagattgccacctaccggaagctgctggagggagaggagagccggatcaatctccccatccagacctactccgccctcaacttccgagaaaccagccctgagcaaaggggttctgaggtccataccaagaagacggtgatgatcaagaccatcgagacacgggatggggaggtcgtcagtgaggccacacagcagcagcatgaagtgctctaaagacagagaccctctgccaccagagaccgtcctcacccctgtcctcactgctccctgaagccagccttcttccatcccaggacaccacacccagcctcagtcctcccctcacagcctctgacccctcctcactggccatccctcgtggtccccaacagcgacatagcccatccctgcctggtcacagggcatgccccggccacctctgcggaccccagctgtgagccttggctgttggcagtgagtgagcctggctcttgtgctggatggagcccaggcgggagcggtggccctgtccctcccacctctgtgacctcaggcactagcctttggctctggagacagccccagagcagggtgttgggatactgcagggccaggactgagccccgcagacctccccagcccctagcccaggagagagaaagccaggcaggtagccagggggactagcccctgtggagactggggggcttgaaattgtccccgtggtctcttactttcctttccccagcccagggtggacttagaaagcaggggctacaagagggaatccccgaaggtgctggaggtgggagcaggagattgagaaggagagaaagtgggtgagatgctggagaagagaggagaggagagaggcagagagcggtctcaggctggtgggaggggcgcccacctccccacgccctcccctcccctgctgcaggggctctggagagaaacaataaagagattcacacac

SEQ ID NO: 16741 - protein, 208 aa, Homo sapiens
MDMSKPDLTAALRDIRAQYETIAAKNISEAEEWYKSKVSDLTQAANKNNDALRQAKQEMMEYRHQIQSYTCEIDALKGTNDSLMRQMRELEDRFASEASGYQDNIARLEEEIRHLKDEMARHLREYQDLLNVKMALDVEIATYRKLLEGEESRINLPIQTYSALNFRETSPEQRGSEVHTKKTVMIKTIETRDGEVVSEATQQQHEVL

SEQ ID NO: 16742 - DNA, 1955 bp, Homo sapiens
  CDS (739)..(1062)
agcatatgcccagtctttgtgttatgtttctcatggatgaaaagacagtataggccaggtgtggtggcttatgcctgtaatcccagcactttgggaggctgaggtgggcagatcacctgaggtcaggagttcgaggccagcctggcgaaaccgtgtctttactaaagtaatcccaactacttgggaggctaaggcatgagaaacacttgaaactgggaggtggaggttgcagtgagccgagatcacaccactgcactccagccaggggatagagcgagactctgtctcaaaaaaaaaaaaaaaaaaagggaaggattgattgatttactgagagaagtataaggaaacaaaatgccccaagacccttgtccggaaggaagggagggagggaaaggaaaggaaaggaaggaaaggagggagggagcgaaaagacagtaaagacagtatgaacatttactgagagaagtataattatcaggggaacccgcccccaatatttcaacggaggttctattttccataagtgttggccggctgagaaataaagagtacaaagagagaaattttacagcttggccaccaggggtgacatcacgtatcggtaggaccatgatgcccacccgaacctcaaaaccagcaagtttttattaaggatttcaaaaggggagggcgtgtatgaacagggagtaggtacaaagatcacatgcttcaaagggcaaaaagcagaacaaagatcacatgcttctgaggaaacaggacaagggcaaagcagaactcctgataagggtctatgttcagcggtgcatgtattgtcttgataaacatcttaaacaacaaaacacaggttcgagagcagagaaccggtctgaccaaaaatttaccaggatggagtttcccaatcctaataagcctgagggtactgcaggagaccagggcatatttcatcattatctcaaccacataagacagacactcccagtgcagccatttatagacctccccccaggaatgcattcttttcccagggtcttaatattaatataccttgctaggaaaagaatttagcgatatctctcctacttgcatgtctgtttataggctctctgcaagaagaaaaatatggctctttttgcctgaccctgcaggcagtcagaccttatggttgtcttcccttgttccctaaaaatcgctgttattctattctttttcaaggtgcactgatttcatattgttcaaacacacgttttacaatcaatttgtacagttaacacagttatcacagtggtcctgaggtgatgtacatcctcagcttacgaagataacagaattaagagattaaagtaagacaggcataagaaattataaaagtattatttgggaactgataaatgtccatgaaatcttcacaatttatgttcctctgccacggctccagccggtccctccatttggggtccctgacttcccgcaacatataaggaaacaaaatacccccagctccttaccccagacccttgtccagatagaaatttagacttattaatatattgaattgttcaagtgtccatatactaagaattacatcagcgatgtggaactatggataggcttccttgggttcctggctccacactataaccaccgccccccaccccttaaatttctgtatagcagacttaagagtgaatatcaccatatgcagttgttcatgtacttcttcccctttctcttctagctcttgacaaaattctcagggaaaactcttcagctctggatgtctccctttttgtggatcaaacacaaagggcatcattctaaaatatatacagaaccataaaagccccaaatagccaaagcaaccctgagcaaaaagaacagggctggaagcatcacactaccagacttcaaaatttactacaaagctctaatacctaaaataacatggtactggcatt

SEQ ID NO: 16743 - protein, 108 aa, Homo sapiens
MLLRKQDKGKAELLIRVYVQRCMYCLDKHLKQQNTGSRAENRSDQKFTRMEFPNPNKPEGTAGDQGIFHHYLNHIRQTLPVQPFIDLPPGMHSFPRVLILIYLARKRI

SEQ ID NO: 16744 - DNA, 1637 bp, Homo sapiens
  CDS (181)..(1485)
agcagttgcacaacttccagcaactttctcagccggctactaatgagctgaaagccaggaacatccgaggagaagagaaagcttccagccctcctcccttcaccctggaaatccagacacccccacccccaccctcagatcactttaagataatttctttattcgtttgcccgacagaccatggctccctttggaagaaacttgctaaagactcggcataaaaacagatctccaactaaagacatggattcagaagagaaggaaattgtggtttgggtttgccaagaagagaagcttgtctgtgggctgactaaacgcaccacctctgctgatgtcatccaggctttgcttgaggaacatgaggctacgtttggagagaaacgatttcttctggggaagcccagtgattactgcatcatagagaagtggagaggctccgaaagggttcttcctccactaactagaatcctgaagctttggaaagcgtggggagatgagcagcccaatatgcaatttgttttggttaaagcagatgcttttcttccagttcctttgtggcggacagctgaagccaaattagtgcaaaacacagaaaaattgtgggagctcagcccagcaaactacatgaagactttaccaccagataaacaaaaaagaatagtcaggaaaactttccggaaactggctaaaattaagcaggacacagtttctcatgatcgagataatatggagacattagttcatctgatcatttcccaggaccatactattcatcagcaagtcaagagaatgaaagagctggatctggaaattgaaaagtgtgaagctaagttccatcttgatcgagtagaaaatgatggagaaaactatgttcaggatgcatatttaatgcccagtttcagtgaagttgagcaaaatctagacttgcagtatgaggaaaaccagactctggaggacctgagcgaaagtgatggaattgaacagctggaagaacgactgaaatattaccgaatactcattgataagctctctgctgaaatagaaaaagaggtaaaaagtgtttgcattgatataaatgaagatgcggaaggggaagctgcaagtgaactggaaagctctaatttagagagtgttaagtgtgatttggagaaaagcatgaaagctggtttgaaaattcactctcatttgagtggcatccagaaagagattaaatacagtgactcattgcttcagatgaaagcaaaagaatatgaactcctggccaaggaattcaattcacttcacattagcaacaaagatgggtgccagttaaaggaaaacagagcgaaggaatctgaggttcccagtagcaatggggagattcctccctttactcaaagagtatttagcaattacacaaatgacacagactcggacactggtatcagttctaaccacagtcaggactccgaaacaacagtaggagatgtggtgctgttgtcaacatagttccaatggctcctttctgacctgctttcatgttttaatgtttgtttaatttaataggaaacctcattttaaatataacactcaaaaaaatgtaaatcatattgtagtattcaatagttaataaaaactcgagaaatgtgttgtttctg

SEQ ID NO: 16745 - protein, 435 aa, Homo sapiens
MAPFGRNLLKTRHKNRSPTKDMDSEEKEIVVWVCQEEKLVCGLTKRTTSADVIQALLEEHEATFGEKRFLLGKPSDYCIIEKWRGSERVLPPLTRILKLWKAWGDEQPNMQFVLVKADAFLPVPLWRTAEAKLVQNTEKLWELSPANYMKTLPPDKQKRIVRKTFRKLAKIKQDTVSHDRDNMETLVHLIISQDHTIHQQVKRMKELDLEIEKCEAKFHLDRVENDGENYVQDAYLMPSFSEVEQNLDLQYEENQTLEDLSESDGIEQLEERLKYYRILIDKLSAEIEKEVKSVCIDINEDAEGEAASELESSNLESVKCDLEKSMKAGLKIHSHLSGIQKEIKYSDSLLQMKAKEYELLAKEFNSLHISNKDGCQLKENRAKESEVPSSNGEIPPFTQRVFSNYTNDTDSDTGISSNHSQDSETTVGDVVLLST

SEQ ID NO: 16746 - DNA, 1721 bp, Homo sapiens
  CDS (808)..(1350)
tttagattgtccaaatggtttgcaagcatggaagtcacatctccctccttccctcccatcagccctccagctgcctgacctccctggggaatgccagtgttaaagcactcctattgcttcccgagccttagattgttctgtgaagtcaccaaagccgccattctggcctcccttggataaatggggcaaatgagactccgggagaggaatggctttgtctgtaggtgcacagcatgtcagtgacagagccgtgcctggaacccaggtctcctgactgggaggtcccagctctcgccgttgctctaatccaggccaggtcctactgtgctgacagaatgtcggctgttgggcggtagtacccatgctgccctctaaccacaggctgtctgtgtcatgtgactcaatgcacccatcagtggtctgtgatgagtgggtgggaggatattttggctggcctctggcccacttgtccacgtctgtcctggtgtgtcagtggctggcttgtgacctggcatgtccgtggcaggtgtggaaggagagcctctagtgagttcccagagtggacagagccctccagagccacaggatcccgaggctcccagctcctcaggcccaggacacctggtggccatgggcaaggtgagcaggacccctgtggaagctggtgtgagccagtcagatgcagagaacgcagccccctcccgcccggatgagcatgacactctgccccggcgccgaggtcgaccttccaggcgcttcctaggcaagaaataccgcaagtatgtggagcagaggtgagggtggggcatgcatgtggttaagccaccaaccccaccagacctttccgccacactctcatcctgcaggtactattacaagtcgcccaaaccacttttgaggcccttcctgtgccgcatctgtggttctcgctttctgtcccacgaggacctgcgcttccacgtcaactcccatgaggctggcgatccccagctcttcaagtgcctgcagtgcagctatcgttcccgccgctggtcctcgctcaaggagcacatgttcaaccacgtgggcagcaagccctacaagtgtgacgagtgcagctacaccagtgtctaccggaaggacgtcattcggcacgccgctgtgcacagccgggaccggtcagtgtgggggtgggagggacctgggcaagagaggccaggttgggtggggaagtggaggcccgggataaccatggttcccacttaccgtgctcctgctctgagccagccccatttgctgcacactacaggcatgagcagaaaggcagttcaccccagttcatttggcttagaacaggacagtaccaggccttgaggtccccagctcagcctcttacctcttgtgagctttagtttctcatcaaacggggacagttgttgaagggattgaaggaaattgtgtacctaaaggagttcagtaaatgatccaagatcttctggactccagatcctactcatctctcacagggctgagagtgcacctgagacagagaaacacaagttcttatgcacctaatgattgctcacaggattataattcgatcccgagcttcaggaaggagttcgcttcatgagaggtggtgtgtgagcagaggttggagacagatcccctgggacagtagctccagctgtgtgtgtggaaaagccagcccaagatactttaaggtttcttttttttaaatg

SEQ ID NO: 16747 - protein, 181 aa, Homo sapiens
MHVVKPPTPPDLSATLSSCRYYYKSPKPLLRPFLCRICGSRFLSHEDLRFHVNSHEAGDPQLFKCLQCSYRSRRWSSLKEHMFNHVGSKPYKCDECSYTSVYRKDVIRHAAVHSRDRSVWGWEGPGQERPGWVGKWRPGITMVPTYRAPALSQPHLLHTTGMSRKAVHPSSFGLEQDSTRP

SEQ ID NO: 16748 - DNA, 3113 bp, Homo sapiens
aacttccataaaatgaagcaaaatatgaaaacagctagttgatttatcaataatgtgaaaccctccttctgaatttttttggtaaaaattaccacactgaaaccaaaacttaaccttggcttggactctcagataaattgcttttgtattctttgactacaaagtattctcaaaaagaagaaattatttctgatggtagatcaaactctagccaagaaggtctagataaactagaggactgtataattatctaaagtaattcagggggacttttagaaaaattctttaatttttgttcctgtgtaaaaattattattaatggatggcagcccaaattactattcttcttttaaaatttgtttcaagtgtgtcaccaggcactcataaaattcatttatttgttatataactcaatgacctgaaataataggtgctcattgctttttcatttgatccttaaaaacaattttattctgtctaaaaaaaattctcctgctaaaatccaaatgattacctggctataggaggagtcccattttatgaacatgtatgaaatatttagttggattcagatgaaatgcaacttagagaaaggaatggataccagtagagaagatggaaagagacacaaaaatcagactttgcttacatcaaaattaggtctgttgtctaatcctgttaacctagaggcaagctgaaaatagatggtaaggataaatagatttttaaacacagtatttatatttaacagaatgtcataaaaatgacagaatgccatgaaattcagcatgtcaaaactttgataaaacaaacaagaaatttaataaatatgctaattagagtgaatatttaaagggacaaaaataacttgtcacatcatagatgtctccccagtgcagaatttattatctgctgggaaaatttggttttatgtcttcaatcaatatttgctgcattatctaattaaacattagtatattttttgtgctaatgagaaaccatgcaagagtccaaatatcaagtgtggtgacagcttgaatcagttgagtttggtgttcatgaataaaattcttgatgaatgtgaaatgaatggtttatatacataagttttatgtgcagtaaattaattaggctttaaaacttgttagcatgcttagctcctcttttttccattgaattatcttcctatcttccttccttccttcctttccttcctttccttccctccctctttgctttatttctttctagctcttataagataaatgacaatagtactttactatttgggctggagcctccctttttcactttcacatgattgaacactttgtggatttgtgagagaaggggaaagaagatgagcacgtagatgcagatcagttgaggatagaagtgactgagagaattgggaccttgacttccagagactgtcagtcaagagaaatgtgggtctataaaaatctatgtgtgttcattttcattgaatttaaacactttttcaagaagtatcagggtcaatctgtttggacaatctcctatttttacccccttacaaatgtcttaagttagaaaaacctcttattttcaagtagtcatttttttttatgtgagtaccacactgctaaagactgaaatagaaaaaaaaaatgctttttctgtttgtagggaaattgctttctgaaaactactcccaataagatgtatacatcaaatgcaacttgattttactggctctttatctagagataactgatgcactgtcttctttcttagatacccttctgtaattcagcttggcatagtatgatgttttgagttcttattgagggtttggaaacatttgtcatcaattttatgtctactctattgaaaaagcaatatacaatgtattccatatttcttagctctgtgtctttgaggttttaaacctatattcagatagctgtttttagctacaattttgagtattcaccagaatttacaaattgccattttattaaatacaaaaaaaaaaaagtacagcttggatcaagagatcaaacatttacaaatctcaatccaaagccattatttttcagggaaaattaaatcatttctagcagagtatttgactcctaagggaaaataagtcaaatatcttctttaagagtaagggcattcttccattgtaggtatttctaattgactttataataatttgaacaaatcttgaacaagatttaaagaatttataatctcccaaacttaaaattgtattctttctggttttttatttttatgtattaagattatattcaaaccacttaattatcttcatgacataagtttgtgttaatagaaaattatacagaaaaaaacatgatttgttcctctgtggaaagatatgcttcaatgagttaaatacccttgaattttggttctcatttcttatttggacttttctgttatgtacctcaggggtcttaaattctaacagatgaagtagtcaaaggggtataaaatacttgaaaaaaattaaaacttcaaaagggacgaatttctctgttaacttttgtttatcctatactgacttattttgaaattgtgaaaaaacaggcagctaccatataaattggtatctatgaaaatactgattactttcttcctgtgattttcactgttaagaaaacctttgtcttgaaatgatggacaatcttaatacttgttcagataaagaaatgtgactttcaatacctttaccatttgtatttctttagggaaatattttaataatgattgtaaaaatagaagaaatatggttgagaaaaatagaagaaattaagatgaaatttgaacagttgtaatccacagtcccatttttccctctattttattgccttctactaagttattgaaggcccagatctgcaaaatttacaagctactaattcattgtctcctttaagaatttggagcaaaaattattccgactatgcggaaatgaattcacatcatcatggcaggttttgactatgagggaattcaggttaggttcaaatagaataatggtccatggagaaaaatactttctgatttttcttcaagttggatggaaaggtttttctttattt

SEQ ID NO: 16749 - DNA, 2217 bp, Homo sapiens
gaggccaataaacactagatgttttggtgttttattttttcttttctacagacctgttaggttggtgtttcagtccctgctcaccactcccaagctcaagcccagctgcatttcaaaaaactgtaactgctaaactttcgcagcatatataacaggctcagcaaatgtggtccttgggttcaaatttctgtacttcataactttttcttccagcccctagcccagttgttttatactgtgctcttagttgaggcttttttttttttttttttgagacagagttttgctcttgttaccaagctggagtacggtggcacaatctcggctcactgcagcctccacctcccaggttcaagcgattcttctgcctcagcctcccaagtagctgggattacaggcacatgccaccacgcccggctaattttttgtatttctagtagaaatgggggtttcaccatgttagccgggctggtcttgaactcctgaccttaggtgatccacccgccttggcctcccaaagcgctgggattacaggtgttagccaccgcgcccagcctgcaagaactgtttatgtcttctgggcttctgttactgcttgaatcaaagcacttgtattgttgatcttttttcagtattgggttttgcttgagagtacattgcttcagagctcttcacaaattactgctctaatccacatgactaggcaataaggtgctccacctttgaatccttaaacatcagtgtggtattggagttgaatagctcatactggatggtctgcctttcctgacagcttttacttctggcggataaaatttatagccatctgaggaaaggaggcccatgagcagcatttaaaatctttattctccccttttttcttcacaccttgacttaggttggaagttgtggttgtattggctttagaacattcctcaagttctcattggaattgacttgactgttgtgagttaagagaatgcagtatgtagttataggagataagatcgataaaagtgacctagttatttaactatcagcatagcagacctagaatatactgaactttcgtcttaggcaccactatagtagcccagctttttatcaattttatatatgcttcctaataaaactgtctcaatagagagactaaaaatgtgtgactaagaattatattaaaaaattcaaactaatggaagtaagtcaaaaaaaaaaaaaaaaaaaagaaagaataataattagctttatgtattgagttgagactcttggcttgcagtacctgtcatttgatatgtgcctcctgttccaggttttattttagttcccactttcgcatctgaaaaatcactgccagttactcagtgagtgaagtaaagagatggcacttgacctccccaaaaatatatcattatatggattttaaacatagggaagaaaacataaggaagaaaaaatttcacaagctgagaagacctgttaagcatgcatacacaaatcatttttataaaaatgataaaacctgtacattgttaaatctccttgtccctattgtcttctttcccaggtggtttcctaattgttttggtttcttcctctcccaaacccaggctggctacagcaaacatcattcaagatgtccagcaaagggagcagcacagatggcagaacagacttagctaatggtaaggggccaaaatgaaggtgaagctatttttactatcaactgaggttgtcctcctccctgcaagatagagtggaggcctggattttagtggagagagggaaactttcctgtgttgttctgagtttaggaaactacacaggaaacaccttggactatattatgcttttgcttcttctgattttatctgatcattttcaaaatatcaataacagagctgtacttctaagaggtcaagtggtttggagttctataaagctataaggatgggcagaacctaggaaatgctgttagtaaaggagaaaaataaaatctaatggctagtaggaacaagggaattttagggaagatgagcttcccagttatattgagaggtccctttccacagtaagtagtagtttgatagagcgattacatggctgggcatggtggctcatgcctataatctcagcactttgggaggctgagacaggcagatcgcttgagcccaggagcttgagaccagcctgggcaacatagcgagaccccgtcttttt

SEQ ID NO: 16750 - DNA, 2152 bp, Homo sapiens
tagcattcagtaaatttcacaacacctttctgcctccctcttccctctcccctctccccttctccccacctcaccccacctcaccccctccctcttccttcctcttttccttccctcctcctttctttttaccctctcctgcccctgacccggtacctataccacttggattatttacagcaaatcttacagatgtcagtattgtcttgttctgaagctaaaaaggacaatgagttcccgctgacctcggtacaatggatctcgctggagcacaatatgtattttatacaggcagtgaaaagcctacaagtaattgagagagagagaaatgtcactgtagcatttctgttgacactgcactctgcgtgtggagggaagcccggggcctggcggcagaggagcagccgcggccgcgctgtgcacccaggaacctgtccttcaggagggaggcggcggtagaaattaatctgctcagattttccaactaatgaagtattcccaggaccgaaggggccacacagagacgtctgcggcgctgcttcccattcgcgcagatgcacacggattccgggcccagcgctaactcggatgtgttttccagctccgtttattgtcttccataatgcttagcgtactgtttgtatatgttgtccttgcactatattttgatatgctctcatatattttattcatctctggctttctacgaaggcaagctcgcagcaacactgagaataattattctccgccatcaatcaagagtctccgtggttggctcctcatgggatggccttgattttaagcatgaaatgtaactcttgctctttggggccatttcattctttgttcctggggcctgcctgtgggctcgtcgggacactagagagcaggcattcccgtggccgcgggagagccgcgttcctggctggccattcccgggccctctagaagggagcggctgagagctctttagccctacttggggtttaaaagtgaaaaaggagcagctcttcctggtggaaattgcgagcagaggctgcgtgagttccgtaactcgcacacagcctccatttggagccagaatgagcacgtgagggaccccgggcagaggggccagtgctgacattatgctccatgcaacctcccatcctgttgtgggagatggtgcagaccaggggagggagtcagtgtgtgaggggatgaggctccagtcctttcctgggcaccaaagccaaatcccccctgagcacaaggatcttccctgggtgactgcagaagcaaggagacctggcccaccgtccctgctggcttcctactgcccagccgcgtctctgcctccctaccccaaagcctgcagctcctaagtgcactatttgggctgtcttgtttgcagcggatgtttgaaagacagaccctcttctctagtgctggccttgagtcctcagagagctgctgtttcctgggtttctagctccatggaggcagaaagagaccccagggtggcctttggaggaagatgagccacctgggttaaccgagcttctgcagtggtgctcctgggtcatcactgttgccactggtcagagccagagtgtgtctgcctgtgctctcctgaacacagtggagctatttccaagttcaggtgaaggggacatggaggttaagcaaggccagaaagacagagacgtcctcttcccctggtagcaggtatttagcagatgggaaaatattagcagatgggaaatcagcagatacactcagctcaagatgcaaatttaaaagccgccagcccctgtactaaatatttacactgaacatctctactccatcatccgtcttttatttttgtgagcccgtacaactgctcttattacaaagtcatgtaaaagttgaggaaagaaaatttcacccttggaaacaaattcatgatgaattaaatttcagcatgaaaatagaaaaaaaaaattcaaatttctgttgacttttgggcttatgtcctgaaagagttaacatacattcttccatacataacttattcacgtaaattaaatggtacacccccaaaacttgtttccctaagctgatattgaaacttccattattgaacagtttttaaaaatgcaattctaatccctttttaagtttcaatacc

SEQ ID NO: 16751 - DNA, 1759 bp, Homo sapiens
  CDS (971)..(1306)
aattttatatgatggtactgtgatctggagagggaatattcatacactaactttctgctattactttaggaatatctctgaagtaaagaagtatggaataaagagataatattatgacttattattttccaagctggatagataagatgaaaagggaaacaaagaatactccaaatgcttctataatgcactttcaaaaatatacatctccagctaaaatttaatgtaaatgcttaatttgcttgattataggtattatgcagttatttacactatactgcgtaagctatagtgctctatagttttagctcatctataatgcattgataatgtaaatgtattcatacttttatcaccacaattatttgaaaaaatcttgcttttgtaaaatgaactgtttagatagaagtatccattacacttggcattgtaagaatgtattgactgcttagaaagggccaaaataaatatccctagatatgcataatttatatatgagattaagttatatgtattatgcgtctataaaacatgtatgtttttgctgtcgcagatttaatgtaagtatagattggtattggtctgtgcctacatgtatgtgctccatgagtacagaatcagggagttgtatataaaggcctcattgatgatagtgggaacaaagctgaaaagagagcaattgagagagaaagagggagaaggaaagagaatagtagtgattaagctagcattgttctatacagatcgctagctgcctgctattgttttccagcatttgaagatgaaacatattcatttagctttcagaacgaatggctttaataagggcagagcgggagaggtggggtaacactgatgactagagagacccatcaaggctccccctaaggccattccgtcagtgctgaggaccacatgaccattaactctgcaatcaggacaagttttcaacattccggggtatccttcaatggcagaaagagtcatttggagtcaagagaagatgtatatcagcagtaattggattctggccaaggctcttaagacagtattatctatggtgagggaacagggaggggctggacaaagcatgaggcatgtgattcaagccatagctgagagagcagtagccactacaggccacaggctgccggcacaaagagcaagcagtttgtttgctcaggagtcattgtggcttgtctatggatgtgagcaatcctccatctccagcagaaactggcttctgaatatcctgcaagtcaaaacgttgggctcaaaagatgaggccatcctggttgcacttgactagacaaagctattgaaggcctgaaagtgccccatccagcctcttcccactgcagcccctctcccctcccttcaccctgactacttcattacaatctgccttcaggccggaattgccctgcttaagcctcaaatcattataattaccattattagaaatagctgcgggggaggcattggaacaccaagtaaaaatgtgtgagtgtgtccgctggccctggaatcactctttttgagctcgggggaaccacaaggcatgagggttccaccaaagccagctaatgcgacggctgtcagctccactcaccccacctgtcaagagggggatgcagtggggttcatttttttaattgacaccttcctctctcattccacgctctctcgtctcaacctaattcctcctttcatcttccttcttttctctgagaaaaattcattcctctgttatttgaat

SEQ ID NO: 16752 - protein, 112 aa, Homo sapiens [sequence omitted]

SEQ ID NO: 16753 - DNA, 2015 bp, Homo sapiens
aatggctggatgcatgtcagtgcataggatttgagtcattagtgtgccacaaaacattttaccaagaaatggtgcgtcatcaaatagttgaattacaatggtagctgtaaacgggacccaatttacaaaagtaaatagtgtccccttttacaagaaagaaaattaaccatgctcattcagattctgaagtttaattagctttaacttgctaaaagaaagaaattgaacaagtaaatagcatgtacttcaccatatatagcaaatcctgaatcactgccattttttatataactgacccacatgggttctttgctttttcttttatctgtttacctcagattttttttttttaataaaggactataatttgattggcttgtaaattcttcccatttctaacatgctataagactttaagcctaatttcctttgagccttaatcctcttgctaattgatgtgactgagttgtctggaatcaacctccttggtgcaaatgactgagactgtgacgttctatggaagcagtttggtccgggaatgaatcctttcattcagcaaacaaatgccatgccagctgagtcctgaaagagcccatgggcacgtaaaggaatatagttgttttacaacatgtcccccaaaattatttgacactcttctcattagcaagtgggactctgccccttccacttggatctgagctctgtaactgcctgccaatagaatatggcagaaatgacgcattgtatcagtttctgggcccagaccttaagaacctagcagcgtccacttcctgtctccttgtatgctcactcttggaacccagctaccatgctgtgatgaagcctaaagacccaagcagagaggaaccaacttgtcagctgtatgaatgagccatcttggaggtggattctccagttccaggagagctgccccagttaatgctacatgaaacagagacaagtcatcagtcatccatccccactgtgccctttccaagtttgtgagcaaaataaatgactgttgagttaagccatagagtttaggaatgatttgttgctggaacaaggaggtagacacataaacaattttgaagcaatgtagattacaatgacagtgatatttactacgtatcacaggaacactgagtcgagacacctaatccttccttcatcatcaaggaagactccctcaatgaatgagatggcaactgaactgaatctcaggttaaccaggttggagaataaagggtggcgtgttctaggcagaggggacaacagtgtgatcacaagcagtgaggaaggaaacaacatggtgtgcagaaggaattatgagcacttaggtgttgctggagcttaaagctggaataggaagtactaattatgtagccagagataattggcaaaggttgaatcatgaaggcccgtgtttgccaggtgaagacatattgtgtacacacagcttgttattttcattattgttgtattgcattttggattgaagctgtctgatcaggtttgtgttttagacaaatccttctatcagcagtggggaaggtggatttcagggtatgaattctgaagcatgaagaccagtcagatggccgttgcagcagttcaggcaaggacaatgaggcctaaattaagactgcgagggtgaggatggggaagagaaactagagtcaagaaataggtggttttaaaaagaagtatttagagggtaaaaagaatactaactggccggatgtggtggctcacgcctgtaatcccagcactttgggaggctgaggcaggtggatcacaaggtcaagagatcaagaccatcctggccaacatggtgaaatccctgtctctactaaaaatacaaaaattagctgggcatggtggcgtgcacctgtagtcccagctactcaggaggctgaggcaagagaatcacttgaacctgggaggcggaggttgcagtgagctgagattgcaccactgcactccagcttggggacagagtgagactccgtctc

SEQ ID NO: 16754 - DNA, 1744 bp, Homo sapiens
taaaatctaggtgtgatgcagttcagaataaataaattcaaatgacataggttgccttgctttgttgtagttttcaaaaatggacacaacagagttcatatttgataatacaaatagcccttgtcggtggcatgatagctttatccatcatttatagtttatgacttgtggttattttaaaacattgaaagaattttgaaaaaagtcataaatgtctgtaacactagcacttttaaggcagataatagacatctaaaatcttcagggcatggctatggctttagaatcatctgaataagttgaaaatatttaagaaatataggtctgttcatccaaagaattaaataatttgcctttgtcacgatggaataaataaaatatcacaggttatttttgttgtggtagatgccttttaacaaaaggcaatccctggagactgttgtagaaaaggacaaagcaaaacgggtgttttggttttgctttattttgattgattgttgtttgttgtcattactttccttgtacaatcacttttccatggtcaccctcttttctgctttatactaattgccctgttgaggtgtttccatgtcaaatgcagctcttgccggaactgaaaatggcagtgccaagggagctgtgcaagtataatcaaagctggaagatttcctccatccacccgcgaccccaaggcttaagcattcccttaggaaccaaagctgactctttgggaaagttatcacagccttattaggttacaaccctgaaggtgttttgttgttttgaccttaaaattttgcgaactgttttgtgaactgtgtgtgtgtgcacacacatgtgcaaaggagttgcttgcaccttgagagagtcaatttttctgcctaagtgaaaggtcaggaactgcagttaacccagagtaaaatattggttgggtgaagggctcacttctagtatagtcagaatgggctcaagatcttaggaggatgataggtgatgaactgcttaaggtaggtactgttgtgtttgtgctttgtctcatgtggacaaattaccttgttgcatatgtgagttatgtggacataaacatatacagcagttactccctgactggctggctttcttaaagtgatagtcagaatatagcctgtactgtcagatatggaagatcaatataattgaatgaaaaagaaagctgaaggacaatccaagaataatataaacataagctattttaaaacattagagggagtgctttatgcaaaagagaaactgaatttattgtttcattctctcttctctcccttcacccctttcaagaaaacgcaaagccacaagtgagtggttgtatgtgtctgatggcttatgtaaacatagaagaagtcttcagatggctaaaataaacatgcgcgtgttaccaaaggatatgtttacacaaaccatttgctcagcctctgaaataatgaataaatgaagattttactaaaataattgggaggatttttgtgtttctgcggatgccataattgaatggcaccaaagagacttttatcagctattttccgtgttacatgtgttagcagttcctttctgtgggttgaatacttcattctgtagttactttacacatgtttttctaagaaattgtcgtttattactgcaattctagagagttgcttgatttctcaagagaaatttagcagccagtaaaggttatttggatctggttggtcaggagagggagggc

SEQ ID NO: 16755 - DNA, 1600 bp, Homo sapiens
cttataatgcatatgtatgtaaatattacaggatttaaggttgaattttttaaaaagaaagttatagtctgtaatttccatttgttataataatgacctttaatcttgtcatttggaaccataaagcatttttatcaggtacctctgttccaagggatttatgtcttagaccatagctgaattgaatgtttgcaaaacactgctataggataaggtggtctttagttttgaacgtgtgaaaggactgcacacttttcagccagggtttgagttactgcccagggtcatcgtttcaaagtaattcgaggagtgatttaacatcagcatttgaaatgtagtcttcatctcctgggatccataaaaaaatgtgaacagggaaatggtggctaagcagagcctgaaataataacttggcaaagaaatgagtttatcaggtcgagtcaaaacatggcatcccctgttacactcaagaaatgctttcttcatgtaaatgtttatacgggcatatataatcacaatgggaacagttaaaaccccctcccttcaaaaaaagaaaatctatatcagttgggtttggttttggttcttcattggctcaaggcagttaactgtctcagtatagcctttggggagatttaacctcattctagccatttttccatcctgaaggccaagaaggactattagaagggtttttgaggggtttcggaggtgagggcccaagacccccataatgacatcattaggtattcttgaaaggtgttaacagaccagcacgctcgatgtgttgtacccttcatttatttttttttctcagcatcccaagttgtccatcagtacattccccttcaccttacctgatcttcatttaatgcccagtctgtaactaatgttctgtttaaagctctcttaatttgttggctatgagtgatttgtgaatctgggatgtaaccctgagtgaggagaaaagggcattgagcccgcataaatctgaatgggcagaagccacaaacaaatgggagcagaaaagaagggcgagctcccccgcgccgcaccccgtgtataatccagtgttaacctctgaggaacacctcggctctcccaactgaggagagacaaaagagggattctttttacacccaggctggcgcattttcaagtgacaatctcgggctctagttgcctttgagatatccactctgctctttctcccaggcctcagaccaagaaaaacatgctctcaagattagcccataggcagttcttgtgacctggctgaagaaagaaaggagacctgtttgttttaaaagtcgggcgcaaagtgtcaggtggctttgatttatgacagaaagaggaagaagaaagttggagtaatagcactatccaaataaccctgcccaggaaacttgggggtcaagagagcttatcaagagccttttataggtaagctcttccgtgtgaaagagaaaaggccggaaagagggagagagcccagagagcaggctgcgaactcacttccaatgggattggagtctgttgtattcttaagagatagcctgatatgtggtttataggtgaatcaataaacaccaacaacaac

SEQ ID NO: 16756 - DNA, 1566 bp, Homo sapiens
ttctaatggtagattgaaagtccaaatgcactttttccaggtggcatctttggatcttctgtgtctcttcttttaagaacaatgcaaatgtacttattgattatcaaaaacgaggatttttttaagtattcataacacacatttaacaccttggtgtcctgggccccagagttcctttgaaggcccataccaatattttcaatgtaaaactcagtcttttcagaagaaaatacagtatatgaatgttttacgataacattaattacctgattttcaatacagttatgactgaggaatgatatttctaagggcacattttgaaaactccataaatcgtattgtattaacaccttaatagatacaatagtaaaacttaagaatttttctctgtcatgtgaccctctgttcctgcagttttggggttcattaaaagcacaaataaaacaatttaatctctttgaaataaagtaataaaagtaccttttagaagttttctttttcccttgtgtataaaacttctctatgtttctgtaatgaacacataaatttccatactttttcccttaactggttattttcttaaaagtcagaatttaatatggcgtatttcttttttgcccctcctgccccccccaccaactgatattatccattccataggccacagttatttctctaggcctgcatagcgacattttcatactactttaaaactaagtgggttgtgcacagtatcaaaaacctttctaggtaaactctgagcgagctatctaaactccctcccagcttgggaagcacatactaatggagaagaatttctgttctaattagaattgccaagggttaccagacctctccagatctgcgattgacctggttgcagaacatggcaggcaagcactcagaacgaagcaatcatgctgaagctgcacagtgtctagtccactcagcagcacttgttgctgaatatttgagcatgctggaggaccggaaatatcttcctgtgggatgtgtaacatttcagaatatttcatctaatgttttagaagaatctgcggtctcagatgatgtggtatctccagatgaagaaggtatctgctctggaaaatactttactgagtcaggacttgtgggattactggaacaagcagctgcttccttctctatggtagatgactcttgttaattcttttcccacagtttcatacctctaattatcaatgacatgtgtatttattctctctggcttatgaccctacttttctttaaagataatttattctggacccagtatggtggctcatgcctgtaatctcagcactttgagaggctaagacgggaggattgcttgaatccaggagttcaagaccagcatggggaacatagtgagataccgtctctacagaaaattaaaaattcaccaggcatggtggctcatgcctgtggtcccagctacttgagaggctgaggtgggaggattgcttgagcccaagaggttgaggctgcagtgagccatgattatgctgctgcactccagcctggacaacagagtaaaaccctgtctcc

SEQ ID NO: 16757 - DNA, 1554 bp, Homo sapiens
taatatatgtaatatttcttagctaatagcagtgactacaacctgaagcaccctcctctgttcctttagtttatttcagtcatagttgtcttgcaagtcccagcacaaaatccctcttccagaaagcatttccattgatctctcttgtatttgcacttttattgaatctacttacaatcactacccacccaatttagcacttaattgagcttaaattttatcatgtggattaattctcttctcagtttgatttcaaacacattcatttttagtcacaaaatggtgtgagttatgagggatgaaggtaggcaagaatctgacttgaaggagccccacagtttacttggagagtgatcctaatattgaattttcaataagaatgtctatggggggtactatttatgaatgcttttatgtgcttgggcacttatattatctgacaccctagtaatcttgtggtgatcattgccactttaccaatgaggacagctgtaattaataatggttaaggaacttgagggtcacccagcttctcagtgtcagaatcagctacgtttaacgttgctttttttgtgatacaaagtggcaacttaaatgccaaaagcatgttaggtaagacagtcatgggaaatcattgatttttgcaggtcttgaagaattattctcattattttatcatgtttaatgaaaaatgcatattgaaataatgccatctattgattagtagatagaaactgatttggttaatttaggcttgcatttccttagtgttggaaatgtacttcctctgacttattcagtgtttgtggtataaagaaaaatagcaacaagtactgctttccatttgtatataccccttgcataattgagagcacttacttgtgtgttattatttggtattttctcaattcattgagaagatggaatagagtattgtggtcaccatatatcacatgaaaacataatgatcacttgcttaaatctcagagataattgtaaccattgtgagattatcgcctagaacttctaacacttaacctttagctaaagggtttaactgcctgcatatttcaagtgcctgtatatagtttacggttttcagtaaaaactgtggatggacaagatccccagaaatcatcgtggacttaagagatagatgttggccaggtgtggtggctcacgcctgtaatcccagcattgtgggaggctggggcaggcagatcatgaggtcaagagatcaagaccatcctggccaacatgggggaaccccgtctctactaaaaatacaaaaattagctgggtgtggtggtgtgtgcctgtaatctcagctactcaagaggctgaggcaggagaatcacttgaacccgggaggcggaggttgcagtgagccgagatcatgccactgcactccagcctggtgacagagtgagactctgtctgaaaaaaaaaaaagagatcccagcactttgggaggccgaggcaggcggatcacgaggtcaggagatcaagaccatcctggctaaaacggtgaaaccctgtctttactaaaaatac

SEQ ID NO: 16758 - DNA, 1997 bp, Homo sapiens
tttacttctcctgaaatgtgacagatattacattaatcagtagagaaagagtgaactcattaataaatgacactgggtcatacctggttaaatggaaaaaaattcattccataacacataattcacagaaagtactcaacagattaaaaatctaaaaatgaagagtagaacttcaaaagaaaatataggagaacatatttatgactttgacataggaaggtttgttaacacatagagtaaaccagaaaggaagagattaagttttaaaacttctgttcaagaaaagacaccatagttataagggaagcacaaatgaatgaagttggaaccatgtaccatatccgaaaattaactcaaaatggatcaaagacaatgtaagatctaaagctataaaactcttggaagaaaacaggtctgaatcttcaatttggcaaaggatgcttagataatgccaaaagcacaagctataaaagaaaaagtagataatttggacttcttcaaaattaaaaaccgtgtttcaaaggacaccatcaagaaagcaaaagacagcctacagaaagggaaaaaatatttgcaaatgatatttctgataagagtagtattcagtgtatataacaaaaagataacccaatttaaaaatgggcaaaggatttgaatagatatttctccaatgaagatatataaatggccaacatggtacattaaaaaatgctcaacatcattagaaattagagaaatgcaaatcaaaacctctatgaagcctgagcaacatagtgagaccctgtctttacaaaaattagaaaatttgcccaggatggtggtgtgcacctgtggtctcagctactcgggggctgaggtgggaggattgcttgagcccaggaggttggggctgcagtgagccataatcacatgattgcactccagcctgggtgacaaggttagactccatctctaaaagaaaaaacattatgcagtaccacttcacatctactaagatggctaaaatttaaataaagggaaagtaacaagtgttcatgaagatgtggagaatttgagaccctcgtattttgctgatagaaatataaaacagagcaactgcttggcagacagtttgctggtttctcaaaaagttaaacagaattaccatatgatccagaaatttcactcctaggtatatacccaaaagaacaaaaagcagagattcaatcctatacttgtatgccaacatttatagcagcattattcacaatagccaaaagctgggaacaactcgcatgtccatcaacagatgaatggttaaattaaatgtatatggtaaatacattacagtagaatatacagtggaatataattcagcttaaaaatggataaaattccaatacatgctacaacatggatgaaccttggaaacgttatgctaataaaataagccaaacacaaaaggacaatattgtatgtttccactaatatgaggtaactggagtagtcaaattcatagagacagaaaatagaagttaccaagggttacggggaagaggcaatgatcagttactgtttaatggatacagagtttcagtttgggatgatagaatagttcagatctggaaatggaccgttgcacattgtctattaatgccacttaattgtacacgtaaaaatggctaaaatggaaattttcatgtgtatattttaccacaatataaaaaaaattaggccggacacagtggctcacgcctgtaatcgcagcactttgggaggccgaggcaggcggatcacaaggtcaggagatcgagaccatcctggctaacacagtgaaaccccatctctactaaacaaaatacaaaaaattagccaggcgtggtggtgggcgcctgtagtcccagctacccgggaggctgaggcaggagaatggcatgaacctgggaggcggagcttgcagtgaggccgagatcgcaccactgcactccagcctgggcgacagagcgagactccgtctc

SEQ ID NO: 16759 - DNA, 2624 bp, Homo sapiens
ggcctttttttttttttttttttttttttttttgagattgaacatctaatctcatagttgccaagacagtctctggtgtaaaagaaaataccaagcaatagtccttaactttgaagctgtcatggttagcatatattagtatttctagactcagattttagtttaaatttatgtctgtgctatagttacaggatgatttagcaaaattgcccgcaattaggtcatgtgtaacctagtggttagggtgttacttatgatagtcgtgatagccattctaaccctgcttatactgtctgagtgattagcacttcattggtatagtttattttatggctgtataaaagtactttcagcctttttcaagttatgtcacacagaaaatttcgtttttctaggactgtaaatggatgaggcagctgttaactggctataggctctgtcattcctgagggctgagtcaatcaatatttccacccatctataaaccactgttgcacattagtgtgccagtgcacattctttgagaaattgtggatgtatggtatataaggccattcaactactcaaatattaaatgctcaagttaatattctgaggctcttaatcaagagtcttgagggttagacaaatagtagaaactaaggaatcattttcaattgaagttagcatgatattaaatatctttgcctatattggataatgtgcaaactgattcatgaaactaaatttaataatactatttttctatttgaaaaaaatggccaagtatacagtatgataaacttaattgattttcttggtttaccaaataatctttgtgaatttatgagtaaaccagccaacagattatttaaaaaatatttttaagaatatggccgtgaacattttactattttgctttgtcatgggagtaatgaggaaaagccctatgcttcaactccctagtccttaggaccccatattgatttggtgagggggctgctgggacaggaagaattttgctagtgttttatatgaactgcattagaagaagctccactcctgaagatgtcagtggacagatttgcctcttctcttctttcccttggacccagagcctgcttctattgccaggaggggagccaggaaaagagctggacttggccaagtgattaggggagtatgagaggaggagtaggaggctctgagattgagctgaaaatgaggaattaaatcaccctatgtaaagatcaccttacacaatggtcactttactctgttctttacagaaggctgtcacggctgtgtaccttgaatgggaactttggactgccattgttggtagatacagtagctaggtgtttaacttttaggcagaaatatcttgaggaattggaaggcagagttacagacaatgctggtatgtggaatactgtaaaaccatcaggttgggttcgtttatactgttgtttacattgttactgcatgtacataatgatctctatagcaaagaaatttataagatgatgatagttttgtctcctttcccaaaattatcatgaagccactgttctgttttgtcttttattagtgtaagttaagagattttgctttagtggtatttttagacttgtcaatagatttgttcttctttgatttggttttgcagacagtttcctttatataacaatgatatacgatggcaacaacccaatccaaaccctactggaccatactttgcctatcccattatatctgctcagccgcctgtttctacagagtatacatattatcagctgatgccagcaccatgtgcccaggttatgggtttctatcatccttttcctacaccttactccaacacctttcaggctgcaaatactgtaaatgctatcaccacagaatgcactgagcgtccaagtcagctcggacaggtcttcccattgtccagccatcgaagcagaaacagtaacagaggatcagtggtcccaaaagtaagtgtctggtcttgattggcttttaaatttgatattacttatattagtataagcaatttgctacttgggttgattgaccattaatgctgaatttactataaaacatattgttcactattgtaaaatggtaaagggtatgtaattcttaaaataattttctttgtgttgtttgttcctcattcttaattgtgatatgatttataatcattttcacattcctttagagagttttacataacataaggcagaaatatttacaaataaatttagtgataaaaattgcatggtgacactaacatttgtaagtgattagtgtggatcttgtgctagctgtgttgaatggctaatgcacttcaagatatttcaatgggccaggtgtagtggccacacctataatcccagcactttgggaggccgaggcaggctagtcgcttgagcccaagagtttgagaccagtctgggcaacatgcgaaaccccatctctaccaaaaatacaaaaattagctgggtatgttagtgcatgcctgtagctccagctacttgggggctgaggtgggaagatcgcttgagcccaggaggtcaagactgcagtgaactgagatagcaccactacactccagcgtaggtgacagagtgacaccctgtctc

SEQ ID NO: 16760 - DNA, 3277 bp, Homo sapiens
atcgtattttaaacttgagttcagacttagaccttatgagttgaaggtgatttcctgccttactgagtctttctgttatcagacctataatttgtttacactatactcttctgatattattagtagtagccaagattttcttcactcttttcttggaaaattggatagaactgttaaggtacagccttctgggttcttactgtccttgaatcttttcatttcttccttcctccctttcctgttgcacactaatgaagatggacatgaaatggacgtgaaacattaggcaaggcaaggcctgacagatttggctggtaaacaactagtcaactttttgaatttagacagttattaattacttaggcagagaaaaaagtagtccaaggtgccatttctctgtgccccttgtctcacacttgaaaagagtgacaccgaaataaaaggggctagctaacgattgtcccttgaatggtgggacaccctgttgctgaggaatcattgttatactgcagctaagcctgtttagtctgcaaatgtaccctacaaggttgaggaagaaaggtctcatgtttcattagaacctgagaggagatgggaaactctcctgacagaagcatcctggggcaagagagaggtgagtggaaaacgtccatccatatagcaacttctcacaagcctctcttgtccatgttccaggatgattccatggccttctgccaagatagcttgcactgtgattcagaccttaacctctctgcgctctttggacatgtgcaaggtctccagagtgccatggctgatctctttcccttcagtggaggctcaagtagaagtactgtttcttctactaatgtcaccccctcatgctgagaaaaacagagtgagaaagggaaagagtggtgaagtggcataggcgataacatccttatctctcatcagtcacacattagtaccttaactctggaaatctagcctttgatgtttttaatttgggactcatatataaaaccagttttttttttttctcttttcgtagcatcttaataattatagcctacttctcttcacagtttcagctattttggaggatgactgtatgtattcctttttaaagtacctgttgggactccccactgagaatttcgtatatgccacattaagtgcattttaattttgattaaaatttattcatcacttttcatgtgatacagtaacagcatttaaatgtttaatttcacttatataaatgttcatgttagaataacatacttaaaatctttttctttagatcattgtatgttattaaatgagcaatagtactaccagtcatgtcattttacatattgcttttggcactcatactctttattgctggttttatattaagatcaataataatcaagaggtctctcttttcagtaaatttcatgcagactcggtggcagaggctaaactttagtttgagagaccagtgaaaaaacctggaacctaaagttgagatgatgaagtcttacataatggccttggaaatagagagggagggctgaatctagatgggatatcacagataataaattgacaatatttgggaaaattatttgttgttagtagacctgtgcggtgatctggaagatgcaagcaaggctttagggtctgctggctttttcctagagtgtcaggagcatggtcagatctccatcattcttggagaaagctatgttggaggagatccttgcaattcctcctgttattaacccttccccttacccccaagagtagcagtgttttgctactgcaagctactagttggcagaaaggttattgagtaagtaggtggcagtcttccttaaccctgtacatgggagagcattagtctttgcagctgaagagactaagcagtagagaagattcctctcattgtcttgatgagggactgacagcttgctagcaaaaatgttgcttgaccacaggaatgagacttccatgcaccctcatcttgccattattaaagctatccagcatttgggtccagccttaagagaaggtgagagtcatgactaggccagtgaatataacagtgcatataaaagggacctagttaccagggagaaaacagaagtagaccactgaaagaggcaaaacctagtgaaaatagaattattgaacaaaatattgaacaaatacacttgaacaaaataataagggcacataagcagattgaattataacaaattctttagagctagaaaaaaatgacattaagttttaatgtttagattattgaaaaaagaggacacgtgctattaagttccaaattacgggcctagaaaatcagggggaagaattatgtcattaaatggaatgaaagtactaacagataaaatcaagagaagacgattagagacttacaagaagttctgaaggggaaaataaaaaaccaggtggacaagcaataactaaataatagatgggatgaagaaagacttgagactgcagatcagaacagctggctgttgtctagccaggagagaagtgagggaaacacacaaacacctatgcagagtctggcaaaatccctgaattccaaggaaaaagtaaaaatcctctaagcttccatatgaaagaccaagttgcatacaaagaaaaagaaccaaaccgacaccaggcaatcttccttaccacacaagcagaagtagaaaaaagtggaatgacgctacacagttgacaaagaactgcaactcaggaaccttgtactcagccaaaggaccctccacatgtcagaatgaaaaggagatactagtttatcctatctgaggaaaactaaagaaacaacctgtgaatcaaaatagagacctttatacaggggaagataaagaagacagagaacagtttaataaagaaaacagtagatcagtctcactaatataaattcaaaagtaaaaataaaatattagcaaattgaatctgccattgtatcaaaagaattctagactatcaacactagagtttatttcagacatgtaatgatgattttttaccaggaaatctgtcaacataatttattctatcaaagggacaaataatcatagaagctattctcatgagaatttgaagtaaaatgggtataagaaggcagttatgcgtgtaatcccagcactttgggagggcgaggcagttggattgcttgagcctggtaggtggagtttgcaatgagccaagactgtgtcactgtacttgagcctgggcaacagaatgagactcagtctcaaaagaaaag

SEQ ID NO: 16761 - DNA, 1894 bp, Homo sapiens
ggcctttttttttttttttttgagacggagtcttgctctgtcgcccaggctggagtgcagtggtgcgatctcagctcactgcaagctccgcctcccaggttcacaccattctcctgcctcagcttcccgagtagctgggactacaggcacccaccaccacgcccggctaatttttttgtgtttttattagagatggggttttaccatgttagccaggatggtctcaatctcctgaccttgtgattcgcccaccttggcctcctaaagtgctgggattacaggcgtgagccaccgtgcccggccgggtgtatcatttttaaacagagctgacaacaacagtaccttccttctagttatgctgttgagaatgaatgtcgcatgtacaaagcacttcgcaacatgcctcacatatagtaagtactcaataaatggcacttatgacatttatcaacatcaaatttttgtgaattaccaattttaaaaagcataaggttcaaaatatcatatagagcatgattattttatatgatgtatcctagtatttgaatagtcatctttgggtgacgggttgtagtgaatttcattctttgattcttacctgtattttctaatatttctttaatgaatgtgatttgcttgtgtagtcagcattttaattagtgggatatgggggatcagtgagcaatttgtcgtaggaacaggagtcaaagcaggggagaaagctttagttctgttttctcaatttctaagtcattcatccaccttaaatcaaatttaaatagacttagtttttttctctgttttgctcaatcttggcctgaacaataatgcctataaaaactggaaatttgtcaagtgatttatacttacgttttttctctgagacagggtctcactctgttgcccatgctggagtgcagtgatatgatcatagttcactgtagccttggattcctgggctcaagcaatcttcctgcttcagcctcttatgtagctgtgactacaggcacatgccaccacacctggcaagtttttatttttattttttttttttagagacggggttcttgctatgttgcccaggctggtcttgaactgctggccttaagcgatcctcctgccttgacctcccaaagtgctgggattacaggtgtgagccatcatggctggcctgatgtatacattccctggaccctcacatcccctgagttttctcacttgtaaaatgaagcctgagattcgatggagattctaagaaaaccactgaagcccaccacaaaagcagggagaggttgagcaggtgagcctggatctgagatcatccccaccttgccacccacatcagagcagctccatgttttccacttgcttcattacatttttgtgtaagctttgaataaggggttcccaggctttaaaacatgacttgaaatcattagtttacactttaaatcatctctaaaagtggatttatgagtgatggattttgtcctattttttcatttaatttttactaatattctgtatagcatactttaggaaactctacactagacaaatgtattttccataaaaaccagaatattaggcatgtcaaaaaatgtatacaagcaattctgatgatccatattatttcagatatgatgatgatatttttaaaaaattaccaaagaataataagaagggaagtttcccaatggtaagaaggggtgtttaatgtaagtttcacctctttctctctccctcattctctccctagtgggtcaagggagagggaggggttaaagatgacttcctccaagattgttccagatctattgaggcctgctctgtctaaatagtgcttccaggaacagcagggtctcaattatctcaccgtgggctgtgaaattgt

SEQ ID NO: 16762 - DNA, 1398 bp, Homo sapiens
  CDS (125)..(436)
gactttcacatttactagtagggctgagagaggctttagtgaggaaggaatattcagaataaaacggttgagaaagctgagaagaccattgagttttgatcagttgtgaatagagtgcaaagccatggccaagctgtttttggaaacgctggccggcgtgtcttcagtggaaaaagcaaatcaaaatggagcgagagcaaaggggcgtcctcagtcctcgacctacaatcactgtatggaatcggtcctggcagctgaacataggaggtcactggaacaagtgatagtgcagattggctttcaaacatcctcctggcttgagttttatcagctacagtgtgggtcctcttttgaagccttaattcacaacagcagctttttgggggtggggctgggcgggtgttgtcattgttctttcccttcctgtaagtgtcgctagttgctgcctcgtatctcaggtttttctctgtttttgagaaatggacagttttttgaccaggatgtgacttcatgtttcctatggtgacttctaaaaccagcacagaatgatatgactcaacacagaccgacttggttatggggatgatgagccgcacagacctcactagttgtgcacaaataatgtgctatgatggggtgtaaagtgaaggcagaagagggtcagccgcattgttatggtactgggaaagtgctggtcaacgatttgagttagtttttagatatacattgaaatctttaatcagacattctcaagtttcacacagtagtttttgatgttatgtacacacacaccaaatgtgtaacagttcaccacttccagagtgtggtcatgcccaaaacatgtttaagaaaggaaagcagtagctccttgctaacgatgtttcaggaggtttgggggacttggttttaatgagcttctgtcatttagggcttctcttggccatggtccccttccttctggaactgtgatgtagtcacatcctacagcctttagtgctggttcactagtgtcagataatcagttcttggaatcgagactgccgtggcgaaggggtggcctcggaggcaggctctggagctgcttggatgtctttaggtggggtggtggctggctctcttcagcatgtaattggggaaaccctcgtttctactaggggtgatacagatggtgattttaaagagcaaaactagacttctatgtgagaagtgctggaaaatgatttaggacatgtgtaaagttagatggaaagactgtaaatgtttaatatgaatatagtgttcttttgaagtaaggccagctgttgaacggttaaactgtgcatttctcattttgatgtgtcatgtatgttaatgtatgaaatgattaaataaaatcaaaactggtacctgtttatacat

SEQ ID NO: 16763 - protein, 104 aa, Homo sapiens [sequence omitted]

SEQ ID NO: 16764 - DNA, 2234 bp, Homo sapiens
  CDS (196)..(1035)
gaattgggtggcggttgactgtagagccgctctctctcactggcacagcgaggttttgctcagcccttgtctcgggaccgcaggtacgtgcctggcgacttcttcgggtggtccccgtccgccctcctcgtccctacccagtttcttgcttccctgccccatctccgccgctccccgcagcctccgccgagcgccatggctcctaggaagggcagtagtcgggtggccaagaccaactccttacggaggcggaagctcgcctcctttctgaaagacttcgaccgtgaagtggaaatacgaatcaagcaaattgagtcagacaggcagaacctcctcaaggaggtggataacctctacaacatcgagatcctgcggctccccaaggctctgcgcgagatgaactggcttgactacttcgcccttggaggaaacaaacaggccctggaagaggcggcaacagctgacctggatatcaccgaaataaacaaactaacagcagaagctattcagacacccctgaaatctgccaaaacacgaaaggtaatacaggtagatgaaatgatagtggaagaggaagaagaagaagaaaatgaacgtaagaatcttcaaactgcaagagtcaaaaggtgtcctccatccaagaagagaactcagtccatacaaggaaaaggaaaagggaaaaggtcaagccgtgctaacactgttaccccagccgtgggccgattggaggtgtccatggtcaaaccaactccaggcctgacacccaggtttgactcaagggtcttcaagacccctggcctgcgtactccagcagcaggagagcggatttacaacatctcagggaatggcagccctcttgctgacagcaaagagatcttcctcactgtgccagtgggcggcggagagagcctgcgattattggccagtgacttgcagaggcacagtattgcccagctggatccagaggccttgggaaacattaagaagctctccaaccgtctcgcccaaatctgcagcagcatacggacccacaaatgagacaccaaagttgacaggatggacttttaatgggcacttctgggaccctgaagagacttcttcccttcaggcttattgtttgagtgtgaagttccagagcaaggagccatgttcctctaagggaattcaggaattcagacgtgctagtcccacaccagttaggtagagctgtctgttcaccctcccatcccagctgatcccagtcactgcttgctggggccatgccatggaagcttcccatcagtctcccagctgaatcctccctgctctctgagctgctgccttttgcctcctgcaactcaacatcctcttcaccctgccctgcctgcagttgagggggcgaagaagaaccctgtgttctcaggaagactgcctccaccaccgctacccagagaacctctgcatctggcatttctgctctctatgcttgagaccgggaggtttaggctcagataagtgagctctgggccatgagagggtaggtccagaaggtggggggaactgtacagatcagcagagcaggacagttggcagcagtgacctcagtagggaacatgtccgtctaccctctcgcactcatgacacctccccctaccagccctcctcttcctcctcctcctcctcctgtgggaggtggtcagtgggacttagggatctttcacctgctgtgcccagtagttctgaagtctgcttgtggagcagtgttttatgtttatccctgtttactgaagaccaaatactggtttggagacaacttccatgtcttgctcttctacctccctagttagtggaaatttggataagggaactgtagggcccagattctggaggttttatgtcattggccacagaataactgtctctaagctatccatggtccagtggtccctgccaagtctgtagacttcagagagcacttctctcttatggggttcatgggaacaggggtgggtgtgacttgcttggtggcctcattccatgtgtgcctgtgcctggggcatggactttgttaagcagagtcagcagtgaggtcctcattctccagccagcctctctgccctggagaatcatgtgctatgttctaagaatttgagaactagagtcctcatccccaggcttgaaggcacatggctttctcatgtagggctctctgtggtatttgttattattttgcaacaagaccattttagtaaaac

SEQ ID NO: 16765 - protein, 280 aa, Homo sapiens; identical to SEQ ID NO: 11420

SEQ ID NO: 16766 - DNA, 2467 bp, Homo sapiens
  CDS (26)..(1351)
agtgcgccgcgctgcgctgggcgccatggcgctccccggagcccgggctcgcggctgggcggcagcagccagagcggcccagaggcgccgccgcgtggagaacgcaggagggtccccgagtcctgagcctgcgggccggcgcgcggcgctttacgtacactggccttactgcgagaagcgctgcagttactgcaacttcaacaagtacatccctcgccgcctggaggaggctgccatgcagaagtgtctggtgaccgaagctcagacgctgctgcggctcagcggggtgcaacgggtggagtctgtgttctttggtggggggacccccagtctagccagtccccacacggtggctgctgtcctggaggctgtggcacaggcagcccacctgcctgcagacttggaagtcacattggaggctaatcctacttcagctccgggctccagactggcagagttcggggcagcaggggttaacaggttgtctataggcctccagtccctagatgacactgagctccggctgttgggacggacgcactcggcctgcgatgctctgcggacgctggcagaggcccggggcctctttcccgggcgcgtgtctgtagacttgatgctggggctgccggcacagcaggtggggccgtggcttgggcagctgcaggaactgctgcaccactgtgatgaccacctctccctctaccagctgtccctggagcggggcaccgcactcttcgcccaggtgcagcggggtgcccttccagcccctgacccggagctcgcagctgagatgtaccagaggggccgggctgtccttcgggaggctggcttccaccagtgtgaggtctccaactttgcccggaatggggcgctcagtacccacaattggacttactggcagtgtggtcagtaccttggcgttgggcctggggcccatggacgatttatgccccagggggctggaggccacacccgggaggctcggatccagacactggagcctgacaactggatgaaggaggtgatgctgtttggccatggcacccggaagcgtgtccccctgggcaggctggagctgctggaggaagttttggccctggggctacgcaccgatgtggggatcactcaccagcactggcagcagtttgagccccagctgaccctgtgggatgtgtttggagcgaacaaggaggtgcaggagctgctggagcggggcctactgcagctggatcacaggggtcttcggtgttcctgggagggtctggctgtgctggactctctcttgctgaccctcctgcctcagctccaagaagcctggcagcagagaaccccctcccctgtgccaggaggatgacaaaaatgttcctgtgttccagggtaatgccaggtgggttttgagagctgggtcggtactgcagacatctcttctccgttgtcgggtgccgtctctgctccttgtggttattgctcagccctggcatccccaggggaatggcagcagtgaggtagatgggaggacatttctggtcagggaactggcatcccattcagcatctcaggactcacaggccaacatgtgttccatggctgggaattgcctaccacccacatcagcttctgtttacctttttggcatcaaataatgaacagtgtttggaaatctttctacaggcaattacctccccaagagaagccttccttattttggagtaaggtcctaagatagctggatgaatcaggaaaaccatgtcccctctaggtattattaatataagcaggaagggatctactataggaatgaagtatttataaaccactgaaagggatagagaagtgaacattggagaaagccagtagcaactgtgagaaatcagcaacttgcaggaggcacagaaaactcctgctgatggtctcagcttccagcagcacaaaagcagatgatgtactggaaaatgctcagaagatgctacaaaacctcatgcctactgtctgccactgctggagaaggaatcatggtttctagaagtgcctctcattagtggactttaaagcaaatcctggctggcaggaaattctgaggaatatagctcttaggcttccagcctctaccatgcaggagagaacacagaaggactgatgtatgttggtggatccatgtatgtgtccagcacagcggcctgctggactctgagaactgggaaagatcagagcaagccttgcctcttatcttcgggaaaccagaatatgtttggggtggtaggagccacacagactcttctgagccccctcactcacttccttccccctgtgcctttcctttgagagtgaaggtgggtggagttgaccagagaaaggggagagaattcgggaaagacccaaagtgtttgtaattcttctttgtccttttacctacagaaatggtcacatggttctatttaaatagcctaataaacacatctggagcctg

SEQ ID NO: 16767 - protein, 442 aa, Homo sapiens [sequence omitted]

SEQ ID NO: 16768 - DNA, 2902 bp, Homo sapiens
cttgatgattgggttagatctggggcgtacatatatatattttgttgttttgttgtttgtttgcaagactattttataggcctattttttatcagaagacatataatatcttttttttttgagtgttcagccattgagccattggtgatcattacctagatccattaattcattaggggttacaaatagtgccattccacctggattcatttatttgttgaaatacttctgtgaggagaaacttgacttcatctgtttggttgattctttctctttattactggttttcagaataaagagttggttatctagcattctccaaagatgaccaatttttttttaatgtcagaaactgcagcctttaaactagttactattttttaatccattgcagttaccattcttattgatgcttaaattgttacatctttggccagtgcaagccttttcaagttggctcccaagtccctttgagacagtctggttattagtctttgatggcttccttactaaccatccttactaggtggtatggcagtaggttccaggggttgttctgtatggattaacttattctcacaagaaccctgtgaaataatacttttgttatccccattttatgggtgaagagaggaacctgagagattgtgacttacctgtatacctctctagaagaagtacagggatgtaaattcaactactcattctagtgctcttttcacttttccaatctgatgcctcttaaaattacttctgtttcatttttttaagtaacttgattgactagctaaaattcatcctactcagtcattgaagattagttattaacttattaaacatgaatttcaaggattgcctaacagtaggatgaagataatagaatagtattctcagaattattctttcaagtattccagtcattcgtcttttctacaatcctgcaaaaatacaaagtttgatgaaatatttaagtagttaaggaaagaacagcaaaagtgaagtgtttcctttgtttcttgaaataaagtctctccaactatgagtaactgtagttacatttggtttttttaggaaaatgggaatttgaatctggtgctattttaaaattgaaaggggctcattttgttatgtaatatccatttattgtatatatcgtatgtcaggcattgggtgtacaaggttgaagaccacaatccttgctcatagtcaaggagattctagggtatccacgcagaggaaataacatggcatggtttatggcagagtataatgcctttgggaccagtataactagatcagtgcagtttttttaatgcataaatgacctcagggtcagtggtgagagttggagagatagatatgaattggattattagcgtgccttatatgttttactaaggagctgtcctttaagcaattctaaactgttgtaggattaagtagacaggaaaataatcagatttttagaagtatctcttagagaaatacaaagatagattataggtgggttggaatggaggcagagatctggtgaagctgttgccaaaatctgagcaagatatagtgaagacctgaattaaggcagtgacagttaagaatggagagaaaaacaggatgtgaatttgagagagatttaacttgtagaatcaataaaagcgaatgactggataaaggtatcttgggcttctgggtggcgtaactggaggatcccttgctcttcactaagatccagaatactaaagcaagagcagatgtttgtgggtagataatgagtttgaggtgtcccttgggtagttgtatatatttatgaaagccatcagaacgtaagtagtatttaaagtggtagatatggatgatgtaatttaggagacctgattccagagtaagaggagagtactagaacaaaactcttagaaacactaacacttaaatgctgccatctcctatccccaagccaagtaggattttgaccataaattagcgagcagcattgttaggaccactgcttgtcctatctcagtatagagatgcccgtccatgtatccatgtattcctcttacttattagctcccttttactaatcacagctattcctatctcagttggcaatacctgtgaatcaaggggaaaagtcacatttgactttgtgacaaccgccagaagtcctttccaagccaaagcatggattattgaggatccttcagaagactgttggatctttcgacaactgatactttctgctctgttagctctttctgtcttcactactctaactagcttagattccatggccttccatttctatatctcttgccaatatgctaaacttccttgtttttgtgtcacatttgcctgaaaaaaccccaagcctttgtaagcccaactgtctgtgtagatattgcttgagaaagatcacacattatggaagaggggataatacctctctaaattcttgatcaccaacctcaggtctcaatgttgcctggtaatcctgtgaaatttctactttcaacttattctcccgctttctatagcagtaattttaaacctttattctcttcaaatctcaaatttatctgttcttacttttagcagatggccttgactgctacttccaagacaaaaaagggctgagcgcagtggctcacatctgtaatcccagcactttgggaggctgaggtgggcggatcacctgaggtcagagaccagcctggccaacatggtgaaacccatctccactaaaaatacaaaaattagatgggcgtggtagtgcacacctgtagtcccagttactcgggaggctgagacatgagaattgcttgaaccccataggcagaggttgcagtgagctgagatcgcaccactggactccagcctgggtgacagagcaagactctgtctc

SEQ ID NO: 16769 - DNA, 2771 bp, Homo sapiens
atataaatggattgtgcctgacattgtgtgggaaattgatgagtatatcgattttggtttgtatcatgaacattaaaatactttttttggtcatctcgaggaaagagaaatagtttattgagatagtttcttaacttatgaacctaatatatcacggttttattttaatgatataagtaatagaatatcaatgaaaaaatctgtataaaagaaatacccagtagcccataattttaccacagctgccactaactgtttggagcattttcttttaattatacttactatatgtggttagtatctttttaacttatcgattgagacaggatcttgctctgtcactcaggctgaagtgcggtcttggaatcataactcactgcagccctgaactggctaaagtagtccttccgactctgcctcccaagtagccgggactacatgtgtgtgccaccatgcccgactgattttttaatttcttgtagagatgaagtctcactatgttgcccaggctagtctcaaattccttagctcaaacctctcacctcagcctctcaaagcactgagattacaagtgtgagccactatgcctggcttgagtttttttcttttaatttttttcttttcatgaatactaccacagaatagtattttagttccctttttaaaaattatgtaatcatggtgaatattcactttggtattttgtcttttgctacctaacatattttgtcagcatttccatgctgccaagtagcctttctattaataatatcattttctgcattatgtaatgttgcccagagcatatttattgtgacccacctagctagctccttttgattggataccttggttatctctaccttttgtagccaagttctttaaaagtctgttagtatccagggtaatttcttttcttagttggccactgccctccctttttcaataggtggatgagaaaaaagtatattggatcgctatgattgccagtaattcatggtgatctttaagaaatatattttcatcaaatttttttaaaacctttgtcagatttcttagtttaggtgtatgtggaggtggaattaatctatacttgcacttattcacagaatttataaagataaaactgttctatgttgacgaatccatttgcaaaaaaagcacactttcaaattgttcttctaatattaatgaggagagctttcaaattgatgtatttgccagtaccacagcgtagtggctgagagcctgtattctggagctggactgcctgggctggaacccgggctcctccacttccttgctgtgtaccttagtttctcatctgtaaatggtgttgatgatagtagctgttttgtagggttgtcatgaggattaaacaagttaatactttagccctttataagaatagtatctgacatattttcttagtttcatactctatatgttttgatcttttccagagaaaattagaaaagcccttcctagttcagaagaccttgtaaagttagcaccagactttgacaagattgttgaaagccttagcttattgaaggacttttttacctcaggtaaggaagaagctgtttgatctaatttaaaaatttaagaaccatggaggaaaaatacatggattatttgtttattcctatttttttaaaattaaaatatttagtaccaatgaaaaacaggacattttttaaaaagataaacacaaagttttgttacacaatggttttaatctttgtgtagcccagtaaaatgacagttcctaagcacttaaacatacttggcttttagtgaggggaaaaaatgtatcacttgttcttgacaagtagatgagacttcctatgtatttgcttttcataagtggttggaccaatttggtggttttaaaacaaatttaagtatgatagaccataatgagtagcatttattaagtttaatcctggcatatttgcccaattattgccctatcgtaatatgaaatctgagatctcagacatctttgtttgctcatttctgttaaattttacatttctatttccccttttgctgatttttcacaggtcacaaattggttagtgaagtcataggagcttctgacctacttctcttgttaggtgtgtaaacagacatttttgctgaccttaacatgccttttaaatgcttctaataaactagttgcaaataaaattgcagaccaaatttataatgctgcttatgctgaattttaaaaccccagaactatattaggcaaactcattatcctttaggtggaaataataaaataattattttgtgataacactaaaattcttaaatatgtatgtgtattataagattaaagctattaaaagaaaatttacttagcaaaaatattttcttgaaatagatctaattgtttttgataattgaaatgaaaagtaattttagtttgtctcatctgccctgtcatggttgacatttaaatttgttttccggccgggcgcggtggctcatgcctgtaatcccagcattttgggaggccagggcaggcggatcatgaggtcaggagatcgagaccatcctggctaacacggtgaaaccccatctctactaaaaatacaaaaaatttgccgggcgtggtggcacacgcctgtagtcctagctactcgggaggctgaggcaggagaattgcttgaacccgggaggcggaggttgcagtgagccaagatcgcgccactgcactccagcctgggcgacagagggagactctgccccccaccccc

SEQ ID NO: 16770 - DNA, 2378 bp, Homo sapiens
  CDS (1856)..(2350)
atgtgtctatgagaatgtgctgggtcataatcagttgctctgtgaccctggcagggttttttttgtgtttttttgttttcggaagcggtataattctgcagtggtgtgatcatagttcactgcggcttcaaactcctgggctcaagcaatcctcccacctcagaccccaagtacctgggactacaggcacaaaccactatgcccagctaattattttattttttggtagacggggtctcgctatgttgcccaggctggagtgcagtggcatgattatagctcactgcggcctgaaactcctgggctcacacaatcctcctgcgtcatcctcctgagtagctgggaccacactcacgcactgccatgcctggctaattttaaagttttttgtagagatggagtctctctgtgttacgctggccgggaactcctgggctccagcgaccctcctacgtcagcctcccaaagtgtcgggattacaggcgtgagccaccgtgcccagccccctgggcaagtttaacttctctgtgccttggactccccagtgttaaatggggtagtagagggagacagccctccgagagccttcctgccctgtgcctggcccagagcagcagtgctccgcacgtgttgcctgtttctccatctgaactgcgctcctggccgcccatggcctcccagtcattctgctccactcctgctccacacaggtcatgaagaactcccccgtgaagacgtttgctagtcccaccttcagctccctcctggatgtgtttctgtcgaccacagtgtttctgacgctgtccaccacctgcttcctgaagtacgaggcggccaccgtgcctcccccgcccgccgccctggcggtcttcagtgcagccctgctgctggaggtgctgtccctcgcggtgtccatcaggtaagcgccgcgtggactgggtctccagctctgagccgttagctccctcttctggctccatggcttatggctgagcggttggactggtccccagccagctgtccctgctggctgatttctggagatgggtccccgcgtcctccccgagccctgtgccccagcatcctccctccctgacgttggcccagatgcggggggaccacctcgctggagggggcggggcctccacagccccaaccgctgccagcttgtccccagatttccaggttcagagactgcaaaggagaaggtgagaagataggaaacaatctggaggaaggaaaggaaaagacatgagcgggggtagtgggcctgggacagcaggcgcctcttcagagtaccggagccaaacagcatctccacgcacttgcctcaggcagtggtctcttggatgtgacgccaacagaagaaagaatagacaagcccaacttcctcagaagttaagctgttgcgctacaaagaacaccatcaagaaagcgaaagaacccacagaacgggagggaacacttgcagatcaggcctcagacaaggtctaacatctagaatggataaagagcacacatagcctgataataaaaagacagctcattttaaaggggacagaggctccgagtagaccacaggtgcgtcttgggaaagctgggccctcgggaccagcctggctccctgagggggctcgcagcggctctgtattcctgagcaggcaggtggccctgtgtggtccccgtcctgggcaccacaagccccttgggtggtcctgtcaccctcaacaggatggctgccggcctagcagagtcccactagcaacggtgccccggagctgggcttcaaacagacatggggaggcagccctgaccttgagcgtctgctgcccttatccaacatcccagggcagaaatgaatggctttgagtctggcgtgaggcgccggaatgctggcttctcccatctggggtgggcaggctgggattcctgccccctccttcccacctgcactgtacccaggaccctttcagcttcctccgaggccgccatgggccatgctgtctgtggcgtgtgctcagtgtttcccagaactccctgtgggctcatgccccatcacccccagcgagcagccctcttcctggcacagcctcccctcctgcctcagtgccctcctgtgcttctggggacccctcccaaaggagccgtcgcctgcaaaccctttcagggtccacttccccagaacccaaaccagacatcctcaggcccctggttggtttgtttttcctctttaaaaagatcagctttaggctgggcatggtggctcatgcctgtaatcccagcactttgggaggccaaggcaggtggatcacctgaggctgggagttcgagaccagcctggacagcatggtgaaaccccatctctactaaaaaatacc

SEQ ID NO: 16771 - protein, 165 aa, Homo sapiens
MNGFESGVRRRNAGFSHLGWAGWDSCPLLPTCTVPRTLSASSEAAMGHAVCGVCSVFPRTPCGLMPHHPQRAALFLAQPPLLPQCPPVLLGTPPKGAVACKPFQGPLPQNPNQTSSGPWLVCFSSLKRSALGWAWWLMPVIPALWEAKAGGSPEAGSSRPAWTAW

SEQ ID NO: 16772 - DNA, 2841 bp, Homo sapiens
gaaaagatctccctgcacactgtagtcactgtatttgtacagcaagggacttgttccccaagcctggagcttttggaactgaatggagcccagaggcaagagtagtgaaatgaggctgacctttgcttctggttttgcttgctacttgccagtatgtgggttccctggaggaacacacaggtgtcttggctttgccactgggcattttgggtgatttcgttaactttgcctgttttgaccagaagagagcctgatcgtgataggaggaggcgggggactgacggggttatacaatcttcacatatatatacactcagtcccatgccttgagtctagaggctggggagagggcccagctgcacgttggttgaggccagcagtacatggcccttgaggctatgctgatagcaacttgtggcacactttgtacttcatactgtgaggaacatgaaataagccagagccaggcctgatcttgaaagaaccctctgtcaagtgggaaggcctgttgcagacatgcatcaactggcccagctggcttatccatggctgtccctgggcctcctgtgaatccagaggaggctgctccagcattgataaggctgggatggggcaggttccacaaggagggaaagctcaccccagtgtaaaaggaaggagtgggggataagtctatctcatgaataacctgagcaaaggcccaaaagagtgtggctgatagattgggggaactgagagtagtctgggggtggggggcacctagaggacagggcacctgtgagagagtgagggagatgagactggaaagatggaccagggcaaaccacgaaaggccttgaagaccatgctaaatcatttgaactttgttacaagctttggaaaccttttaaaagccatggaatttaaatgtttgagatgaggggagtaacattatggaaagatattttggctgggtgtggtagctcatgcctgtaatcctagcactttggaaagccgaggcaggaggatcacttgagctcaggagttcaagaccaacctgggcaacatagtgagacctcgtcactatttaaaaaaataaaaaataaacaataataaagaaagataatttgagtgactgggaaggggtgaactgaaagagagattaattaaagacagtcaagagcaatttgcaaaggtttagttgaaagaaattgaagcccacagttttgtaggccaagacctggcccttctgcgtgcttcccccatgcccacgtgcacttggaggctggcctctctcctcctcctttcaggcctgcattgcaagtgtgggggcgactggccacgtcttccatttcggtgagggcacaccagaggagccagggtttctagtgatgcgtcaccataacagcaagtctcatttcatgaagtctcactgcatcatcaaatgcttaccccttatccctaaactggcaaaacttactcttagaaaaaagttacatacaatttaacattggaaaagaaaatcttatatttgatttttttgcattagaaaatattttgacaaccctttttaaaataatttttatcttcatcaaagtagcctatggtttaaatgtcaaaaagaactaaaaggggcctctctgggtcagtttctcaatacagtgggtgaacctcagaggcccagtcagcaaaggtctttgggtctggatgttggggttggtctaatcaattaaattcaaactttccactcattctcatttttagcctcatccctctttctgccgtagctaggcctctatgtgctgagccctgtgtgagcataggagttgccccttccacttctctgttcaatcagaaccatttcacatttgctttgcatcttcccaaaaaacgttgacatccctcggttatatccttttttcctcattcactgtaattctagtttcagaaggaagagagattgatgtatatgttagttactgccttactgggaatccttttttttaatgtattatcagctttccctttttaggcaggactacctttatggaggttatgtgcttcttcctttaagccatcctttctactctgaaataatagtgatattagggagtagctggggtctttttttttaagttgaccccaaaatgtgtttttacattttactggtgtgtgaaatctagaaatcaggaaacaagtgacctaggctttaaaagtaaataaataaataaaataagcttgactatgaaggaaggcacatagacggagcagtggccagaagacaggataggagagggacaagatttttcttttcaagctgagagagacttaagcataggcagaaagagggttgaagaaggcagtgtagccaaatatcaaagaaaaataatggtggcctgttctgagagggagaagacaggccggggacattcacacctgacgggcctgtgcttcctagatgcggaggcaggcagggccctctcacggcaagctgggaaggccctaccctaaggcatgtttccacaatttctctaaacttttcttttctgatagtctgttttaaaaaaatcaaaatggtcagggttggtggttcacgcctgtaatcctagctattcaggaggccaaggtgggaggatcacttgaggccacgagttcaagaccagcctgggcaacacagcaagactccatctcaaaaaaaaaaaaaaattatattagccaggcatggtggcacacgcctgtggttccagctactcaggagaccgaggtgagaggatcacttgaatccaggagttcaaggctgcagtgagctgtggtcacgccactgcactccagcctaggctacagagccagaccctgtctctt

SEQ ID NO: 16773 - DNA, 1805 bp, Homo sapiens
gtgaagatgtttcgtatggcaaattcagtaatgctacctcagtatatagttctgtatacgtatttggaccaaagttattagataaaccaaaaatatttcatgaagcatcttctgcttcagagtccatatccagccacccagctatgaatgtatttagaaagatatttggtggaggtggaatttctaccagaggtcaagaggatttgtagggatagcctcaagaatgccagatgagtgtgtcagaaagcctgctcctacctctcgccagctgcgtgactttaggcaagtcacttaagtaccttatttcagtttcctcacctgtaaattgaacaggggttgaatggaataaaaagccctttgcaactctaaaagtcaattaacacacttactaaggtgttttaagtgaccaggaaggaaatcagaactaacctggattgttagcgaagaaaacagaagccaccaacaagcctatctgtcctttgcaattttgctccaagagcctattagcaatttgaattctgagcctctaagaaaacttatgctcaggtggcccctccaagtgttggtgccagagcactcttgccttgtatcctcacctacgccttccatgaactcatagcagtgctgtggcactgcaggggtgttttatgcattcacgttaggagcatgagcagaactgcatatgccagcaccacatgggcagcagagactccccactgccagatggatgataatggagctgcactgggaacaaccaggactgtcccagtcaacatgatacagatgaacatcctgccttaagtcactagctctctccaaagccagataaagtgggtttcttcacttacatctctctaatcttggctgccttattcaacctacagactctatgtcagtgctggattttctccccttgccctttaggtaagcagagtaggcaggaggagatttgaaagcgtgtcatacatattgccttgaaagaagggacattcaggtgtcccttcggggttctgtaacaattaggctatgtgtgctgagagagggagcggagtcatttgctgatgtgctgctacctgtaactcaaatgcctcataggaataccagcggacaaacacatagaggaaaagttgaatctttcctatattggacaatcttccttcagtcttgtttctgcatcaaaaagtctgggacacagagtgctacaggatgcctgggctaaggactgtaacagaaaaatatcaacatcagagcctggcacagtggctcacaccggtaatcccagcactttgggaggccgaggcgggtggatcacttcaggtcaggagttcgagaccatcctggccaacatggtgaaacccccatctctactaaaaatacaaaaattagccgggcacggtggcacatgcctgtaatcccagctacctgggaggctgagtcagaagaatcacttgaaaacaggaggctgaggttgcaatgagccaagattgcaccactgcactccaacctgggcaacagagcgagaccccatcttaaagaccctgtctcaaaaaagagagaaaaagaaaaagaaaaatatcaggcatcacatgaaagagtattcagctgtcgttcttgtgaaaaaggaaaaggacaaaatcaaatgcattttaactgtggtaactaattcactgacttgaagtttgctttgtttgttttctttggtgcgtagagaagaatacttcatactaactcctgatcatcttacagcagacataacaacagagtgttagagactggaataaatatgaatttggctgaaatgtgcc

SEQ ID NO: 16774 - DNA, 2100 bp, Homo sapiens
ttcatcctgttgtttttgttatgatacataatgctgctgtgaacattattgtacctgttctttggtgccttgtgcatatatttctattgggaacacaccaaatagtgaaattgttgtagatgtaatgccatgtatgagagttcctgttgttttgtatactctccaaacttagaactgtcagtctctttaattttagccattctggcatgttcacaggagtatcacattgtgggtttaatttgcatttccctgattacttattactaataatcttttcatatgcttattttcttttagaacgtgcctatgcaagtctcttgtccatttttcaactgttttctatttcttatgaatttgtaggagttctttgcagcttctggctatgcatccttcattaattttgtgtgttgcaaatatattcttccattttgtgacttgtctttttagtctcaaaacagaatcttttgatgagaagaatttcttaattttgatgtaacctcatttatcactcttttccttcatggttggcacttgttgtgtcttgtttgacaatgttgcctatcccaaagtcatgaagattttctcttatgttaacttctaaaagttgtatcatttgtcttttatatttatatctacataatgcacctggaattgagttatatgaatgctgtgaatttgggaggggcgtgtttcctttttttcccacatggatatccaatcaactcagccacatttactgggggaagacatctttttttctaatgcgctgtagtgttaggtttttcaaaacttaggtgtctgtatatgtgtgggtctgtttatgagtctgtctattcttttccactggtctgtttcctacacttgtgcctatgccacactgtcttacttatagctctataagtcttggtattgttaaggaaaaatatttgtaacatttgttaaaaatggcagagaagactttattcaaggaggggaacattgtgataggtagagggactgctgcaacgaggtcttgctgtggtgaggagagagattgggctggagtccaacttctacaaggacaagaggggatttatagtcaagcagcagggtggggtcagtggatggaagaggaaacatcagagacaggggtattcttgctagaccaactcaacagaattcttgctgaaggcaggccagggtgataagatatcaagagttaggggtgaggacagataccaagggtggagaattttcactaaaactagtaggattcttgcttaaactggattctataagacagaaaaggaagcccaaggtcagggtctagtggaagagaaggctccggggagcccgacctgagtttgatctaggagagtctttgtcaatatcctgtagaatatgaccttcacctcattttcttttcctcaagtgtatctggactgtatttggccttttgggcttccaggtgacttttagagtaagtttatcaagatctacaaaaatagctactgagattttgatttgaatagtatttcttcctgataatttctgagtaaaattcattttaaggaagtaggaggggcagtggcctgatgaaaagcaaaaatgaagaaaagaataaggaaagacacagttttgccatcaccagccagtgtttagtgatcttaaaatagctgcttttgtttttgagcatcatttgttgggtatggagttgcagaagttgggttgagggacactggcttctagaatcaaatattggcctccatagagtgtttctgtacagtgagttgggaggatgggcaggggccactgaggactgtggcgtgtccccacgttagagtgtatctcacacagagcctgtcctgaaaatatagttatttttaaaaagtgtttccccctccttttcattggccattttctcttttactactctttacctagcaaagggtgggcatgagaaacctggtcagtggaagagaaagccattttgcaacagtggttataggggtgggagagtaaaatttcctggttcctggggaagctaagcccattggtaggaccagacttttgtatgtgtgtttcttcctttagtcatctactaaggttaataaatacctt

SEQ ID NO: 16775 - DNA, 3215 bp, Homo sapiens
  CDS (1044)..(1370)
ttgtatatttggattgctgctctaggttgaccctcagctaaagaaaaatgcttccttatttagttttattctgcctgcctgttagtttgaaaggtaccacttgtttgcttcatgcagttttttttttttttttggttaaactcagcctctatatgtgtttatatgctttcatattttcttcaagtcacttctggattggtaattcacgtaccagagtggccgatgccatatttcttgtttattcttttttttcaatttcatggccttccagcagttttctgggaatactttctgccagttcttgtttacttctctgtttatatgcgtcggtattggaatgctagaacgttaaagtacaaaatatagaaaatataaaatttctgttcatacttttacatcttaaactggaaagacatatctcacattttttaaccatttatgtgttaggtgatatgctaagttcattattcatgttacttaatcatttacaacaactctttggcgtatagatgccattttactggtgaggaaactaaggcttacaaggcgatgtagttcttttttaagggtcatacacttagtgaaagtgaggctggaattttaaccctgacagggtgaccctagagtgcagttacccgggtatactctctgaggagtcctgtatgaatcacgtcctgggaatttttccaaagtgaaatgaatgcttctggaagaactcagcacaattggcttgaattcctgtggaaattttgggcaaatattggaaccagctggaaatatagtaatggggtatcacatgccaaatctggacctgaccattttagcctgatagtcgacgggtattagtaagatgtgtcttcaaacccttatttattctcattggttacaataggtactatgcaggatgcactgtggaaagtaagactggatatgagattgataatgctcagtaaattgtgatgatatgtaattaacaaatgtaagagatatgattttcagtattgtagcattgtgtccaagtggcaatttttttttttttttagatggagtcttgcactccagcctggcaacagagcaagaccccgtctcaaaaaaaaaaaaaaaaaaaaaaaagtccgagtgtcttcctacctccaaatgacagcattagtgtcttagcaatggtttttaaccaagctaaaatggctggaatgccagatgtagaattcacaatatggataggaatgaagaacattgagattcagggaaaagccataacccaatccaaagaatctaaggaatacaataaaatgatacaagaactgaaagaagaaatggccattttaataaggaaccaaactgatatgataatgctgaaaaacttactgcaataatttcacaatagaattgcaagtattaacaggcaaagtgaacaagcttaggaatggatctcagagctggaagactagttctctgaattaactcaatccaataaaaataaagaaaaaaatgaagaaaacccaggagaaatatgggatcaagtaatgagaaaaaatttatgacccattgacattcctgaaagagagggagagaaagcaagcaacttggaaaacatatgtgaggatgttgtccatgaaaatttcccaaacctcactagagaagccaacattaaaattcaggtaaggcagagagcccttgtgacatactatacaagatgacatccccaagacacataatcttcagatttcccaaggtcaaaataaaagaaaaaaacgttaatggcaaccagaaggaaggggcagatcacctacaaaggtaaccccatcaggctaactgcagacttttcagcagaaactctctgagccagaagagagaaataatagtgggaggctttgccattccactgaccttattaaacagatcactgatacagaaaactaatcaaaatattcaggacctgaactagacacttgaccaaatggacctaacagatatctatagaactctccactaaaaaacaagagtatacgttcttctcatctgtacatggcatgtactctaaaatcggccgtaaaacaattctcagtaaataaaaaaaatactgacatcataccaagtgcactattagatcacacagcaaaataaaaatagaaatcaacactaagttcgctgaagaccatacaattacatggaaattttacaatgtgctcctgaatgacttctggataaacaataaaattaggccagaaaacaagaaattcttcgaaactaatgaaaacaaagacacaacatagccgaatgtctgtgacacagccaaagcagtgttgaaaggaatgttcatagcacaaaatgcccacttcaaaaagttagaaagaattcaaatgaacaacctaacatcaaacacagagaaactagaaaaacatgagaaaatgaaccccaaagctattaaaggacaagaagtaaccaaaatcagaactaactgactgcaattgagatgtgaaaaaccatacaaaaaatcaatgagtctagaagttggttttttgaaagtataaataagattgatagactgctatctagataattaaaaagagaagttccaaataaacacaatcagaaatgacaaatgcttctagacttgataaacaacttcagcaaagtttcaggatacaaaatcgacataaaaaaatcactagcatccctgtataaaaagaacatacaagctgagagccaaataaggaacaccatcccattcacaatatgtacaaaaaaaaataaaatacctagaaatacagctaaccagggaggtgaaagctctctataatgaggattacaaaacactgctgaaagagatcagagattatacaaacaaatgaaaaagtattatgcagccataaaaatgatgagtttatgtcctttgtagggacatggatgaagctggaaaccatcattctcagcaaactatcacaagaacagaaaaccaaacactgcatgttctcactcataggtgggaattgaacaatgagaacacatggacacaggaaggggaacatcacacaccggggcctgttgtggggttggggtcgggggagggatagcattaggagatatacctaatgttaaatgacaagttaatgggtgcagcacaccaacatggcagatgtatacatatgtaacaaacctgcacgctgtgcacatgtaccctaaaacttagagtacaataaaaaaaaagacaaaag

SEQ ID NO: 16776 - protein, 109 aa, Homo sapiens [sequence omitted]

SEQ ID NO: 16777 - DNA, 2016 bp, Homo sapiens
gaatcttggcccagaatctcactctcccagccccatggaaagatggggaaaagatttcattctgctgatcaaatttgttagaagacattctttagagtctgaaaaaatatatttcattagcagttctctaggtagtggaatttttagtgatgtttactcttttttccttgttctaattttcctctaataaacagaaaaaaagcaagagtaacccaccaaatttggataaagggcttctgcttttcatattctcttcaaccagaacagcttaacttttctccatttatttatttaagtatttattcatatttgaaacaggctggggtgcagtggcatgatctcagctcactgcaacctccacctctcgggtacaagtgattctcctgccttggcctcccaaagtgctgggattataggcgtgagccaccgcacctggccttaatttgatttttattatccacaacactcatatctctttttgatcctactgtaatatcacattatcctacctaaagatgaattgttccaaccctgatgctttggtaatcatcttttctaaattaaaaattgaggccaggtgcagtggctcaggcctgtaatcccaacactttgggaggacgaggcaggtggatcgcttgagatcaggagtgagagaccagcttggccaacatggtgaaaccccatctctactaaaaatgcagaaaaattagctgggcatggtggtgcatgcctgtaatcctagctacttgggaagctgaggcacgagaatctcttgaacccgggaaggagagattgcagtgagccaagatcatgccactgcactccagcctgggtgacagaacgagaccctgtctcaaaaaaagaaaaaaaaaaaagagagagagagatttgtaatctagcaaaatatgttatttacttattttctttccaacttttagtgtgggcccaagcgggtacctgtgcaggtttgtttcatgagtaaattgtgtgtcatgggggtttgttttacagatgattttgttactgagataatcagcataatatgtgatatttggtttttaatccttaccctcctcttatctccaccctcaggtaggccccagtgtctgttgttcccttctttgtgtccatgtgtactcaatgtttagctcccacttataagtgagaatatgcagtatttggttttctgttcctgcattaatttatttagagaatgacctttgttatggaaaaacaaagaaagaaagaaatcaggtcttttttggaaaatctgggacattgaattgttacacgtaacatgtgtccccctagggacataggtcactttcagtatttgccaaagcattaggtcagccagacatgtgaaacatctcggagcttaataactgagctgcttcaatgtgttttgataaaagtttaaattctctggccccaatttattgaacacatgcctttgacaatacagcatttctttcttaggctattagtgaaagattaaccatctactcagtgattgttattgtgcctgtatgtgtgcagtatgaacagttatgtaacaaaacttcaaagattagagacctttaaaaggatctggggaaataggaagagtctataatcttataggaaaggaatgaattatgcaagcaactaaaagtgtgtcaatattctctgcttcacaaacaaattggaaaccagtggtaaactttagatcagaaacagaaactcaaaaaatgaaagaactggccatgagcagtggctcaggcctgtaatcccagcactttgggaggtcgaggcaggcggatcacctgaggtcgggagtttgagaccagcctgaccaacatggagaaaccctatctttactaaaaatacaaaaaattagacaggcatgatggcagatgcctgtaatcccagctacttgggaggctgaggcaggagaatcacttgaacctgggagatggaggttgcagtgagctgagaatgcacggtagcctaggtgacagggtgagacgctatctc

SEQ ID NO: 16778 - DNA, 3142 bp, Homo sapiens
tggcgtaagaggcggcggtggaggcgctacgctggcgtaagaggcggcggtggaggcgctacgctggcgtaagaggcggcggtggaggcgctacgctggcgtaagaggcggcggtggagacgtttcgctggcgtaagaggtggaggtggagacgttacgctggcgggcacgatacaactgcagctgcaataaactggtccttatacctgttgggttctaacccagaagtccggaaaaaagtggatcatgaattggatgacgtgtttgggaagtctgaccgtcccgctacagtagaagacctgaagaaacttcggtatctggaatgtgttattaaggagacccttcgcctttttccttctgttcctttatttgcccgtagtgttagtgaagattgtgaagtggcaggttacagagttctaaaaggcactgaagccgtcatcattccctatgcattgcacagagatccgagatacttccccaaccccgaggagttccagcctgagcggttcttccccgagaatgcacaagggcgccatccatatgcctacgtgcccttctctgctggccccaggaactgtatagtaatttgaaggtcaaaagtttgctgtgatggaagaaaagaccattctttcgtgcatcctgaggcacttttggatagaatccaaccagaaaagagaagagcttggtctagaaggacagttgattcttcgtccaagtaatggcatctggatcaagttgaagaggagaaatgcagatgaacgctaactatattattgggttgtgcctttatcatgagaaaggtctttattttaagagatccttgtcatttacaatttacagatcatgagttcaatatgcttgaatcccctagacctaatttttccttgatcccactgatcttgacatcaagtctaacaaagaaaaagttttgagttttgtattttcttttttcttttttctttattttttttttttgaaaccgtgtctcactctgtcgcccaggctggaggagtgcagtggtgtgatctcagctcactgcaacctccacctcccaggttcaagcaattcttctgcctcagcctcccaagtagctgggattacaggtgcctgccaccatgcctggctaatgtttttgtatttttagtagaaacagggtgtcaccatgttggccagactggtctcaaactcctgacctcaagtgatccacctgcctcagcctcccaaagtgctgggattatagtcgtgagccaccacgcctggccagagttttttatttttatcaccaccatagatgttacagttggctgtggtcacaaaagtagttaattgtgtcagcacccaaataaacatctaacaggtttctcaacagaggaatccacagtccaattccacttcaattgatagacccaaaaaatataatttaatcaaagttctagagtttttgtttgtttgtttgagatggagtcttgctctgtcgcccaggctggaatgcagtggtgacatcttggctcactgcaacctccacctcccaggttcaagtgattctcctgcctcagcctcctgagtagctgggactacaggcgcctgccaccacgcccagctaatttttgtatttttagtagggatggggtttcaccatgttggccaggatggtcttgatctcttgacctcgtgatctgcctgcctcggcctcccaaagtgctggcattacaggcatgagccaccatgcctggcccaaagttctagaattttttaaaggtattcatggtgactcaggaatacacacatacacacacacacacacacacacacacacacacacacacatacacacacacatataatttgaaagaggtgagtatgtactctgacttcagctctcaggttttaaaaattatattagtgggaccagttatgacaagaataatcattatagtacttttcagattttataacctggagcagattattttaagttgattagtaggttctgttacagtttttcttttgttcgtgcacttatagtcttcatttaattcctcatagaatcccagtcacctttatatatcatattattggaagagattcatcttcataatctccagttttttcacagtgcctcacagagttaatcatgccttttggagctagaaggactttagaacttatctagttatgctcctttatattataagtaagggaatagaatcaataagacagtttctgcccaaagtcatgttaccagttggtgacagagctggaaatacgtagagatctacacccttaaatctctccactcacatgctgatatactttctactacaatatgctatagctttatggaactcagggtgatgatcagacgtgtcattagaacatgagtcctctgcttctgattcaggcatacttttgggattcttccatctttaaaggaaaaaggaagccattcatctatatttagtaacccagtaatatctcacttagtttagggttagatctttagttaattcaaccttatagatcatacttatgaaggtgataactgacacgtgttccctgaattttaatttgataggcaatacatctacccactccattattttttaaaacttcatttaatagtttaaacaagattggttttgttttcaatttttattcactcttcatagaatcacaattacctttatatatcatatgttattggaagagattcctcagtaatctccaatctctcatagtgcctcacagggttggtcaatggcttttggaactggaaggaccttagaacttatctgttatgctcctgatagccaatagcagatagaagcttgcaatcaagagggtaggacatgtgttcttcaatggatatcaaaggaagaggttgcaaaccaaagccatttggcaagccctgtagcctgggccatttaagacaggggcggtctcagccaaattgcacccatttaactatcccaaagagccacagtgcctacaacccaggccctaagttgatgaagaaaaagtcaaggaaggaggtgatacaattggaaatattcccatcaaatggttaatcttatttagaaaatgggcatattagaaaaagtccttccaagatgattttggataataaaagttgtatttgtgg

SEQ ID NO: 16779 - DNA, 2059 bp, Homo sapiens
agttgtttctacattttctccaccaccgctctggtttcctggaggccttgatcttgcctgcccaggcacccctcaggaaagtcatagccctgtggctggggagggtggagtgttgtgggccatcaggaaataaactggcagtcacaaagttctgaagggcatagccaccccttttctaagaatatttaaaggaaacagggcttggaggatcctaaaattagctggccttccagtcacatccctaaagagcagaggcactgggccttccctcttcctgcccaagcccagggtggaccctgagtgccctcaggcaccacactttccactgcttctctttccctccattggtgccaggggaagggaatgcctcgtgcctggcatgcctgctttagaaggcaggggccacaaaacactttgtgactgcctggcatcctagtgttactgggtacaactgacggtttaggtggccccctggccaagagtgggcccaagactccgactgggccaaccacgcccctctcctggggctctccatgctgggggatggggatggctggagagggtctttctcggctgtggctcttggataagaggcttgggacactcccactgtctcaaccctgtcccattcctgaggttctccagctgctagtccattctgggatctgcccactagcctgccataaatttcctctctgtgtaagctagccagattggcttctgcagcttcccactaaacttaatttgtttgaaagaaacaaaaccagagaagagaagggagaatggagtccttagagtgggaaacaaaatatacaactcttacatcagtccaacccgctgtgtggctttaggccacacactcagcttctctgggcctcagcaccagcctcggggagatggagtagttgatcctgccacctggaaggctgggagaggccagcaaagtgagcactgagccccttctctccccaggcagagttgcagcagaaggtggaagagaatgagcacctgaggctggagctgcagatggtagagaccgagagggtgcggctgtccctgctggaggagaagctggtggacgtgctgcagctcctgcagaggctccgggacctggtaggctcacgggagagctgccacactcagggaagggaaaggagctcttgggagggagccccacttgtgtcaggcaccaggctctaggctctccttacagtaggcagctgttatcccattttacagatgcagaaatggaggctcagaagaaccaaccaaaaatagggttggggggctccccaggtcattttaagaagctaataaaactcttgtatgtatccttttctggttctgttctcaaaaccagaaaaggataaatggaagaaagacaagaaaggaaaattataaactaatgtgacatttaaacatggatgcaaaattattaaatacaatactagcaaaccaaatctggcagtgtttaaagaaatgcaacatgaccaagttggacttatcctacaaattcaaggatgattccacatcaaaaaatctattaccaaaatacaccacattgcagattaaaggagaaagaccaaatgatcatctcaattgatgcagaaaaggaagtcaataaaattcaatctcctttgattataaaacccctcagcaaattaagaatagtagggatcttccttcaccagataagggctctcaaccaaatacttcatgcagatctcacactgactggtgacgtgttcagaggaatccccctaaaatcagatgtggctgggcctggtggtgcatgcctgtaatcccagcactttgggaggcctaggtgggtggatcgcttgagctcaggagttcgagaccagcctggccaatatggtgaaacccccacctctacaaaaaaaaaaaaaaaattagctgggcatggtggtgtatgcctgtggtcccagctacttgggaggctgaggtgggaggattgccaaagtccaggaggcaaaagttgcagtgagctgagattgtgccactgcactccagcctgggtgacagagtaagaccttatctc

SEQ ID NO: 16780 - DNA, 3294 bp, Homo sapiens
  CDS (1402)..(2034)
ggaaggaagataaggtgcctcctgtctgggggataacagtgctctcttacctcactcagagtgaatacaggcatggaacaaatgagtatgtgcgagcagggatgcactcaggagaggagcaggcagtggctggactggctgttatgactaggggcggggctcactgccaccctcccacaccagactatcagcagcagcaagagcgtctcctgggcagctgaccccaaaagtgctgagcatgtgctggcagtaaaacaccccaggcttctcattaataaggatgctttctgtttgtgtctcccctgaaacattctcaaagggttttcccttctgttacatcattagctatcccagcagccttcagggtgggaggcacaagatcattcctgttgtacatggggaggaagcaggtctaaggatttgcttggagcctcatagcaaaccagaaacagggctgggctgagaatccagtctctgccacatcccgtgcataggtacagtggcacctgaggtaggaggcatgggagagagtgggatgaacagacctctctccagccctgagatgtccatggtttggctgtttcagcccccagagttgttgggggtccttgtgaagcaactccacacaggtgttgagtggggcacagggtactgtcagcttgttagtaagagggattccttgggcccagataatttgtcagcagctccaagagtgggaccccaactctgtcttctctctttagaggtaactgaatagcaccagggaggagcgtggcggcagcaccaaggcggaagccatgctcttttgactctggcttccgtcaagagctgtcttggaaggagaaaggagctcctgagttgaatttcaggtggacacccaccatgctaaatagaattccaagccactagcctctagccacacaggttccatcccaacactcctgtctgtgggacttgatctgaaaagccacactttggttgggaaccttgcccagggctggctggagaggggcctgttgtgccactcagggaaggccttatggttccctcatcctgggtgggcttcaggctggggctgcagactctggcccagctccctggtgggccagtcaccagcactgctggctctgagtcctgatttcttactttggctttcctggtggcacctggtttgattctggacagctcatttcacatctagcatggcatataatccagccagacctgggtttgaatcctgccactacagctcactagttagctgtgtgcccttgggcaagcccctgaatgagtcattccatggctgctgttttctcctctgtaaagcagggaagatagcgcccactttccagggctgtgctaaggagggaagcctgtgaagagcacctgtcacaacaggaaatgcagacgtgggagtcactattgttaccaccctcttgttctagcaggagacagtggctgttaccagaccctcccttcagggacagcccgatgactcctctgggccaccagagtgggttctccaaaagggtgcaggagaacggggagccatttcccagagctgcaaacctcccagggagtgctcaggctccatctccctcagcccccagctgcccgccagccataactgtaggatatggtgcccaggggagccatgaaaggcgaagcttttacctccatctcctgcacttcaggcccccaggccccaccctaggacttgctgtgggatgggctggaggaagggctctggagtctgcagaaaggactgccatgttcctggctctggcatccttctctgtgctcttggtgccaggcacagccatcctgatgtctcatgctcagacaccacagactggaaatggtggcatctcctcctcatcaattcccccaagtcccatcagtcaggtgtccccagcgtctcctccaccaccgctgccttcatcttgcctgcccatgtgcagccttgttccctctcctctgggcacgggcccctccctctggctgctcctctgcaactaccagaagactctgtggtagcccttccatagcgctttatctctagggagaacatctggcttggcctggcatccaaggcctctggtgagcagcctcacctgtccttttccaggttgctctcatgtggtcccttccccctcctacccattccatcctcttcctgacaccaaacttctccctgttcccaaaccctgcctagctcactgctgttcctctgcttgcactgttgtcccaccaccctcctcctgacattccttcctttttttcccctttaagtggtttaacaactgacttcatgtcagggagataatcaaaaattccctgctcacattctctggaagtgggccagttttgtagctcagcgttgaaactacccctaaaaacagctctcctcttccacgacaaacagaagagttgatttggtatacttactcttttaaaatcgcctttaaatgtttcctccattgtgaggccttcagatgtccccaggcaagtaagtagcttccttcatctgtgtgtactgtcttacgctgtgactgttgtggactctggacttggggaccacctgttatctctgtccccagcctctatctgtgaggcagttccaacacaacatgaaggcaacaacaagtgctcagcagggtctcaccttacagcaacttgtaaataccccaagaaatccgcttttaaatgtggagttctggccgggcccagtggctcatgcctgtaatcccaacactttgggagactgaggtgggcagatcatttgagcccaggagttccagaccagcctaggcagcttggcaagaccccatctctacaaaaaacacaaaatttagccaggcatggcaacgtgcacctgtagtcctagctacttgggaggctgagatgggaggatcatctgagcctgggagggtgaggatgcatgagccatgattacgccactgcattgtagcctgggcaacagagcaagaccctgtctcaaaaaaaaaaaaaatggctgggcacggtggctcacacttgtaatcccagcattttgggaggccaaggcaggtggatcacctgaggtcaggggttcgagaccagcctggccaacatggtgaaactccgtctctactaaaaatagaaaaattagctggccatggtggtgctcgcctgtaatcccagctacttgggaggctgaggcaggagaatcgcttgaacctgggaggtggaggttacagtgagccgagatcacaccactgcactccagcctgggcgacagtgagactttgtctc

SEQ ID NO: 16781 - protein, 211 aa, Homo sapiens
MQTWESLLLPPSCSSRRQWLLPDPPFRDSPMTPLGHQSGFSKRVQENGEPFPRAANLPGSAQAPSPSAPSCPPAITVGYGAQGSHERRSFYLHLLHFRPPGPTLGLAVGWAGGRALESAERTAMFLALASFSVLLVPGTAILMSHAQTPQTGNGGISSSSIPPSPISQVSPASPPPPLPSSCLPMCSLVPSPLGTGPSLWLLLCNYQKTLW

SEQ ID NO: 16782 - DNA, 2010 bp, Homo sapiens
ggtctaagtttcctgcatcagcaacagaatctagtaattgttacaaaactcttgaatagctgggagagatgcaaactctaagctgcctgccctcttaaaacttggtcttttgtattttaaacagttgagttttatgtcatttgtctcaaaattagtcttgggtcattatatatttctatctactgatttatacattcaggatcaggtcttgacatttagtacatttaagatggttatcaggttgtagtcatcaagcacctatttctggctgtggccacccagccagacccatagagggtagaaaatttgtagatgactgtcatggccttactgacctctgaacccctatgtaatacttgagtgaaaaggacttggaggcttaaccagatgactagctgacatacctctggaagaaggcaggcatcggagccctcttccagagcatcagagaagatcaaagagctcagatctcccctccagaaagtttcattcaaacactcatgaccatatcaacacttatatgtcaataatatctctttaagaaaatgcgaatgtcattgctgtactcctctgtgttgcctatggtggttcaattgtgtgagtcaaaactccaagcctttgggtcacttgttcactcatgcctctatcaataaaccctgagcacctgggaggcagcctgacagagggaagaacaaggactttggcatcaacgcctcctaggtccaaatcccagacaggcaatttgcaaactacagcttggccaagtaatttaacctctctgatcaaggtgcccacttgtaaaactggaacattcacagtatctacctttgagggctgtagtgaaggtaaataagattatgtaaatgcccagcctggttgcagcagcaacagtaagcactccaggggtacctgttagatgaataaatgaaagaaactgggaaagacggtgaggagctaagtgttaacactgatatgcagagtctttgccctcattttcagttctgatgggcgcctgacataagcaccttaccctgagcccagagccatgcgcagtattctaaggggccttgaatatgctgtgatttttggccattccactgcaatagaaattgggttggacttaaggcttcttctactgcactgaagagctacacttcttacctctttcagagtggaaaaacaatctgcgtaagacaatatgatgttaaaaacaaatcaattagtactacacattttcaaattatcagccacgttaatgatgttgaataaaaggtaaccagaaggccagccacctccttagtttttgtttttgtttttgtttttgtttttaaccttggtttattccactgctattttattgctcagtcattgtgccttcaacagaatgccttagcattcgtggcttcctccctgtatggattcccaatcattcaactaccccgcaaatgcttcctgtccatcttctgtgtgcctagcactgcgtgtaagtccatgggaaataccaggaagctgaagaccctgttaacacttccagggagcctgtaattggagagatatgatatatgaatcagtatcacaattaaaaattaaatattcctttttgctggacttatcatccatagaaatttcatataacaattcatgagttatataaaagtgcagtaaaataatactctaagagctgccacaaggcatataggatgaagtgccagttgaatgtaggcctatcctgtaagtgctgtgaatgtacagaatggagagatccttgtgaactggagggtcaagaaagcctttgggccaggtacagtggctcatgcctgtagtcccaacactttgggaggccaacgtgggaggattgcttgaggccagaaattcaagaacagtctgaacaacatagctagaccccatctcttcaaaaaaagaaaaaaaattagtctgatgaggtggctgaagtgagctgtgatcgtgtcactgcactccagcctgggtgacagagcaagacttagtctc

SEQ ID NO: 16783 - DNA, 1686 bp, Homo sapiens
  CDS (15)..(674)
gttccagccccgcgatggcctccgcgggcagcaccgctcggcgggcgggctccggaagctggcactcagaaaggggagaagggagaggtgctcggccgcagccaactccaagtggctccatgcagcaggcgaacaaagtctccttgaaggccacctggactgacgcggagtccaagcagcccaggtgggtagcgggagaaggtgtcccggctgcggggagcgagaacccggcccagcgcctccctggtgggcagggcctggagcgggcgggggcggaggctgcggcccgagaagcccgcagagacaggctggggccagggatcgcctcccgagaggtgcctaggccgtggcccagagtcgcttccccactgccccgcccaccagccaggcgggggccagggatcgcctcccgagaggtgcccgggccgtggcccagagtcgcttccccactgccccgccctccagccagcccctgcccgacctcgcagaccacctcagtgcgcaggcgactgccctcgccaggccgcgccgccctgcctcgctcaccccgccccgcgctgaccccagccccagcaaggagtccgaccagacggcaatcgaccagacggcgatcgggagctactaccagctgttcgcagcggctgtgggcaacgtggaatggctgcgattctgtctgaaccagagcctcagggaaatccccaccgacgacaaggtaaggtcttgagtgttggggcaaagaccgaggtccctctcccgctacgctgctcggagtggtcacccggagaagagatatccttttctgggtagatcttcctaatttaactcatcttctggctgtggaaggaccattttgggggcagggaggttgggtgggctgatgaacacacactggttaattagcaaaagggtgtgagcattcctggggacacagggaagaaagtgaaggtaaccccaataaatttatataaattgtggaccctgggacctcagtcccactcagcctcctcctgcctgctctgaacctcacagggcttcactgccatccacttcgccgcccaatggggcaagcttgcatgcctgcaggtcctggtagaggagtacaagtttcccgtggacctgctgaccaacaatagccagacacccctgcacctcgtcatccacagggacaacaccaccgtggccctcccctgcatctactacctgctggagaaaggcgcagacctcaatgcgtgagtccagcctgcttcaggagggaggcttcgggcacaggcacgggcacagccctacttccaggcaggcaaatccatgcaggacaagcagaggggttgctggaggtgacaaggattgggtcccacataaagcagtcaggaatccacatggtgtaataaagagactgggctttagccgggcatggtggctcatgcctataatcccaacactttggaaggccgaggcaggcggatcacctgaggtcaggagttcaacaccagcatgaccaacatggagaaccccatctctactaaaaatacaaaattagcagggcatggtggcgcatgcctgtaatcccagctattcgggaggctgaggcaggagaattgcttgaacccaggagatggaggttgcggtgagctgagatggtgccattgcacttcagcccgggcaacaagagcgagactccgtctcaac

SEQ ID NO: 16784 - protein, 220 aa, Homo sapiens
MASAGSTARRAGSGSWHSERGEGRGARPQPTPSGSMQQANKVSLKATWTDAESKQPRWVAGEGVPAAGSENPAQRLPGGQGLERAGAEAAAREARRDRLGPGIASREVPRPWPRVASPLPRPPARRGPGIASREVPGPWPRVASPLPRPPASPCPTSQTTSVRRRLPSPGRAALPRSPRPALTPAPARSPTRRQSTRRRSGATTSCSQRLWATWNGCDSV

SEQ ID NO: 16785 - DNA, 1963 bp, Homo sapiens
  CDS (586)..(1068)
ttttttataaggatgaaaatccgttgcagaagattttgccttgagtcccattggctaaaactgggttccatgcctgtgccctagctgcaagggatgctgggaatctgagtatctagcacttcctcctggactgtgggaagctgactctgccagggtgacaatgggtgttcatagacagcttgcccatgtacagtggggaatggaagagtcctgtactctcctcctcaatgcctgtgtctctcccacggctgcaggtcagaggattcccagctcccaaccccgcagctagccaacccagagccaggagacaagagtaatgaacctgaagatgctgggaccagagacccagaccccactccagagggagcctggcagtcagacagcagctctggaagcagagccctggatgaagtggacgagcagctgttccgctccgtggagggccaggccgcctctgacgaggaggaggtggaggaggagaggtggcaggaggagaagaagacgccggcagccgaggccaagacactgctggcccggctctccagctgcagaggcaggtgtgatgaccagacggcggagaagctcatgacttactttggtcacttcggcggtgccaaccatgcccataccctgggggagctggaggcctgcattgccatgctggtggagcagctgaggactcaaggctgcggtgggaggaccctggggacctctgaggaggaggcagagttgcagcagaaggtggaagagaatgagcacctgaggctggagctgcagatggtagagaccgagagggtgcggctgtccctgctggaggagaagctggtggacgtgctgcagctcctgcagaggctccgggacctgaacatatcgaaaagagccctggggaagattttgctgagcacgctggacgctttcagggaccccacccacgagggaaggcccagccctgcagccatcctggatgccctgcaccaagccttggctgcctgccagctgttgcggagacagccctcggcaccagcctctgcagcagctgcgctcaccaaccccctcctcgtctcctgctgaggttactggcccaccctgtgggcaccctgctcagcctgactgcctttggaccagcctccatgatcagcccaaccactgacagctggtctgaccaccgtcacatcatcagaacttgagtctctgctggctccttccaaggttaagcccgagcccagagcctcccattgcagcacctggcagccaccccttcctcgggctcctccacattacctcgcagcccctgcattcctgccaccagagtccacattaaagccctgcagttgctggatcagcctgcacctgatgccgtatctttcccctgccctcagggcagagatgcccactttctgactgagtctgaccccaaatctcttccccagagtttcaggatctcctcccctcccagcactgtctccttcctcccactggcatgcctgctgcaacggagactgggcccaacctttgggatacctggtctgtaggaaagcactccacaccccaggaaatgttgatgactaggaaaggctgagggaattccaaggaaggaacaatcactgtaggctccctggtagaagctggccttgaaccagctctagaggacaggtaggatttagacaggtaaagaaaggagggaagggcatagaatctaaggtaatggcaagagcaaaggtgtggaaccagaggggggccccaggaatgcagtgcttggagcccctgctcctgaacacgcattaactcctgaactgcgagcccctcctcctgaactgcgtcatggggttgcaggaaggagtaggccaagatacccagtctcacctaacttagactgtcattagagagaaagatccattgccaaacagtgccatgggggtgaaaccagtgctaaatggaggtaaaataaagtttgtaagagccc

SEQ ID NO: 16786 - protein, 161 aa, Homo sapiens
MTYFGHFGGANHAHTLGELEACIAMLVEQLRTQGCGGRTLGTSEEEAELQQKVEENEHLRLELQMVETERVRLSLLEEKLVDVLQLLQRLRDLNISKRALGKILLSTLDAFRDPTHEGRPSPAAILDALHQALAACQLLRRQPSAPASAAAALTNPLLVSC

SEQ ID NO: 16787 - DNA, 1901 bp, Homo sapiens
  CDS (725)..(1120)
ctacagtttaaattctgatttttctggctacaagtttctaaaataagttgtgcttccttaaagtcctatgaactgaaaactagatgttttatcaggcgctgcctctaaaccccccaaccatcacagaaggaaatctcttcactgctggcattgacaactaataactgagggtgcccggaatccttcaccccatgtctagtgagtctacggaaccagggtaattgagacaatatctgttacaggaatcaactcctggatacatcacacttgagtcaaagcctggaaagctgaggaagcaacccctgagagcccaaaggaacgtcctaaatataatggaaattatttactacgccttgtgggaattgctttactctactatttgcagtaggactatatactatagcaccttcagggtggaatatctgacagggaatctcaattgctgtagcattttgcttaattattatcctcatagcaggaataactgttactaacaaaagataatatgtgggcctttccaaacatgtgcctctgcctctcattaggtagggaatgttgtttctatctcaaccaatcaggcctagtaagagactgctgaaaaacttaaaggtctaaaaagctaagggaataccaaaacaaccagacagattcttggtttgggagcagaatcatagcatgggtcaccccattcctgggccctctcctaataatatgcctaggactaatgttcttaccctgcctaattaacctttttcaaagatttttagctgacagactcatgaccatttcacacacaactacccaaaaacatctacagtgttatttctgcagtcaatccaagacccaaaaactgtctgtccccttgtcagcaggaagtagccagaaagaacacactgcccctcgtcatttttataactacagggtctggattgacagagcaggagcatcaccctcttcgacttcgacgaggaccatcattttaagtttcaccttgatcaaaacccaccaaaatccaaagggcatcagccttgtggttaaggtcagcatgaacataaatcacacaacatctctgaccagaaacattcgaaacccctcccggaccagagacatgccagccccgtgataaccttccccctggctggagagatgtcagccccaagataacctcccttctgaccagagacattccaaccctaccataagcttctcccccatgcagaaacattccaaacctgtaataagttctgtcaccaataaatactgtaagtctgtaagagagagctttcctgactgaaatcagccagaagcctctctcaggtttattctccaaaacaaacctgtctttgactgttgagccactttgtatttctttcctctttaacttacactgtgaccttacaaaacactcttattcaaaaaccctccaaaagtcttgaatttgagtgaatacctttttatagatccaaagagatgttaacgtgcttgttccttttcagtctttcttttctagtacttgggtagactttcctttggttggggagcggggtgcttaccatataacttgtaaaccaaagcatgaaatatatgtttctgtttaagcatcaaaagtcttttgctgggcacggtggctcacacctgtaatcccagcactttgggaggatgaggcgggtggatcacctgagttcaggagttcaagaccagcctggtcaacatggtgaaaccccttctctgctcaaaatacaaaattagctgagcgtggtggtgcatgcctgtaatcccagctactccggaggctgaggcaggagaatcgcttgaacccgagaggcggaggttgcagtgagccgagatcatgccattgtactccagcctgggcaacaacagcgaaactccgtctcaaaaag

SEQ ID NO: 16788 - protein, 132 aa, Homo sapiens [sequence omitted]

SEQ ID NO: 16789 - DNA, 1840 bp, Homo sapiens
gcaaagaaatattatagaggtttttttttcattccaagttttaagttgtccttgtgcatgaaatatgcacatgataaaaagggggttgccatcaatgcatattgtcttgaaaagccaagggctctttttcggtttttctctataatgaagactgttagactgaggactctataattatgctcactgaacaaataccttgaaagggaagtaattccaagtcatgtatcaaagattcaatttgacatgtatttactaaatgcctaacatgcctatgcattttgtttattcatttatagtaacaagatatagtgagttcatattctgtgccagcactgtgctcagtattgaaaaattggagtcacaagattcccactttcaagaacttacagtccaatggaggagaaagaagtatgaaaggatcaattgcagggtgacaagagagtgttccaatagtgcagatccagagctgtgattttaaaaagatgatgcaaaccagttatctcttgcttcatggagtggatgggctacaggaaatttgacaataaaacaaagcttaaataaattgcaacatttgtctacaactctactgtaaaattggaaatgcttttccacagaaaaacctctcaaaatgctgaatgcaaaagttgggatcacagaaacattgtgcctatttttggtctgctggaaactgtatttttacaaggtaatccctgttttcaatatagttcctgtcttgccactggcggttttcttgtagcatttttctagttctgagattgctactacccaaagtattcatttctttcttactggggtgtcctctgtcttcacagcctgcttctggattgtaggttttttcctttctttctgttgagatatttatggcatttgatagagtcaaaccagatgtattgcagccggacatacttatgtggcttcagatgtgtaaaataagtaacttcctatctttgtctgtctagctcaagagttgactgtggacgaggaatgcctgtattgattcattaatgtaataactatttactgactgcctaccatgtacaaccagaaacacagttcctaacctcatgaacttaccatgtaacatgggaagacaagcactaagttcttatttgtttgtaattgtgataaggctcagagaacaaatacagattcctatgaacccatgtatagggggaaatatttaggttccatttaatactgacatggctaagtatctcagtatttaagctgagatctgaaggataattagaagattcctcaggcagagggaagagcaaaggctgtgtgtggggcaggaagaaatgtggtcgtttgaggaacttcgagatcagcgtggccactgatgtgctgcagtgtagcaaagagagcaaaagaaagagagaaacagggaggaatggaattcagctcacgggctctggaatcagagtttcaagttggaatcctgacttcctagctgtatcggttaagaatttttttttgtggcatccaaagaacagaaagcctaccttactgaggttcatataaaaaggggaaattggccaggtgcggtgggtcacacctgtaatcccactactttgggaggccgaggcgggtggatcacctgaggtcaggagttcgagaccagcctggccacagtggtgaaaccccgtctctactaaaaatgcagaaattggctgggtgtggtggcgggcgcttgtaatcccagctactcgggaggctgagggaggagaatcgcttgaacccgggaggcggaggttgcagtgagccaagatcgcgccattgcacttcagcctgggcaacaagagcaaaactctgtctc

SEQ ID NO: 16790 - DNA, 1989 bp, Homo sapiens
  CDS (58)..(546)
gttttttttttggatgtggaagccgagacctaaagttggggggtgatctctgaggagatggatcggtacctgctgctggtgatctggggggaaggaaaattcccgtcggcggccagtagggaggcagaacatgggccagaggtgtcgtcgggtgagggtactgagaatcagccggacttcacagcagcaaatgtttatcacctcttgaaaagaagcattagtgcttcaattaatccagaagatagtactttccctgcctgttcagtgggaggtatacctggttccaagaagtggttctttgcagtgcaggcaatatatggattttatcagttttgtagttctgattggcaagagatacattttgatacagaaaaagataaaattgaagatgttcttcaaacgaatatcgaagaatgtttgggtgctgttgagtgttttgaagaagaagacagtaatagcagggaatcattatccttggctgagtatgcttatatggtttttgtattatcattaaaatacttaatattagacagttattttaatccatgagaatgaagattatatattttagcatctttactgaagaaactctagttaattgaaatttttgactctcaatttgggccttttatttgaataaaattctttaaaatgcatgtttcttaagcttacataatgtcaagaatcataaaaagtgatattttaataaacatgttcctttcttgaagataaattctgcctaatattttattttatttttgaaacagggtcttgctgtgtcacccaggctgcagtgcagtggtgcagtcacggcttgctacagcctagacctgggctcaagcgatcctccgacctcggcttccagagtagctggaactgcaggtgtgcaccaccacacccagctaatttttgtatttttttttgtagaaatatcatttcgccatgttgttcaggctgacctcgaattcctgagctcaagcaatctgcctgccttggcctcccaaactgctgggagtacagctgtgagccaccgtgcctggccaataatgtattttaaaagcttgaatagaaatgttatttaatgttaatagctagcattcataccaaagtatcattttcattttgctatttgaggctgaaatatgtgacttctttaatttatgtgtatttgcagcatttcaggtaccttttaaaatccatagagtttgtgaggattatatgtacatgattgagttcacttttaggtttttttcaattgtggtacaatatgtaagttgatccaggtgacataagttgtgataataatttttctcttgatgaaatatcccacctcttatagttaataccttttattttagtctttcataacatttcatgacaaaactgctcttattttagtattcacatattatatctgtaagtagctgtagacttaaaaattttcattttcctttttccagatcatatttgtttgtactgattaataaaaggagacctttccaaaccagagaaatatcattgaaccagggattagtagaggtaactttatttacacaatcttaggccagtcacgtaacttctctggtcgtttgttttctcatccataaagtattgaagtacttttagataatttcttaggtgctttcatttacccttaaaaactcttatcatcccatatgttttcctaccactgttaaagacaagtatagccaggcacagtggctcacgcctgtagtcccggcactttgggaggccgaggcgggtgggtcgcaaggtcaggagttcgagaccagcctggctaacatggtgaaaccccttttctactgaaaatagaaaaaaattagccgggcgtggtggcaggtgtctgtagtctcagctactcgggagcctgaggctggagaatcgcttgaacccgggaggcggaggttgcagtgagctgagattctgccactgtactccagcctgagcgacagagcaacactccgtctc

SEQ ID NO: 16791 - protein, 163 aa, Homo sapiens
MDRYLLLVIWGEGKFPSAASREAEHGPEVSSGEGTENQPDFTAANVYHLLKRSISASINPEDSTFPACSVGGIPGSKKWFFAVQAIYGFYQFCSSDWQEIHFDTEKDKIEDVLQTNIEECLGAVECFEEEDSNSRESLSLAEYAYMVFVLSLKYLILDSYFNP

SEQ ID NO: 16792 - DNA, 2190 bp, Homo sapiens
  CDS (261)..(563)
ctcataatttatttccatgcatctttgctttggatcctagctttattggtgaacatttatgcctttctatagcaatctgggttttcttagccaattgaaatgggcatttattagatcatttaagcatcatatcaatatagtatatttggcgactttatgataagttcttatgatagatgttcaaaactctgctcaggtgacatttttatggatccacatagtttttgtcatatatgaaaagaaagcattgagttgtgcagatggttaaatgtgcattgagttatttctctggaatttgcatgagaatggaccgacttgtagttgtattaacttttctagtgcccaggttagaaagtttgatctgtgtagtttttaaaggcagcatccaaatcacttatattcagaagaaaatggtaacagatttagaagctgtctatattttccccattatccataatacatattattggcaatatggttttcactctttgttgttaacgtatcaacaatgtgcaatagccactaataatcatttgttaatgcatgcttccaagttctgtatttgaaaatctcagacttcatatatggtaagcgatggagtaatttataacttttatgttgaattcttgctactttaaaaaattgtgcttctccttttttaaagcatatgacttacttaacagctgatagtcagttacctggatttttagtatttttttacatcacaaaaagatttctctgaagtttgcgcaggggtctatttgtaggcagtttccaacttactaataagtaaggttctgaaagttataagttagctgtctggaatagatagtctcatagaaaccaggttgtagatggtgatttggttccttgggcaacctactgaaacccatttactatataatgtggctgaataatattattgatagtgctatagtatttagcaactgtctgtcaagtgattttgaactctcattttgaaatctaactttcatagcattattctgatgaatttttggtagtgcgatttgactttttctacctccattctaccagttcacagtgcattctagcagtggaaatcaaaaaacctattgagatggaatttgggaggaaaggaggacttactgatatccctagctgtagaaagaaagtaactgggtatcctgtctgaaagaggaaggatgtgatgatcttcatggctctgttgtggagatgtatgtctgcttatacatggcaggcaaccaattggaggtttatatattttaaaaataaagaaggggcggccgggcgccgtggctcacgcctgtaatcccaacactttgggaggccgaggcgggcagatcacggggtcaggagatcgagaccatcctggctaacacggtgaaacactgtctccactaaaaatacaaaaaattagccgggcttggtagcgggcgcctgtaatcccagctactcaggaggcggaggcaggagaatggcgcgaacccgggaggcggagcttgcagtgagccgagatggctccactgcactccagcctgggcgacacagcgagactccgtctcaaaaaaaaaaaaaaaaaaaaaagaaggagcattttataattttacactgattagccaaaggatggagaaacccaatacttctgctcgttcaccatgcctcacagtatattccaagtattttcattgtatatcttctacttactctaccaccctatgccccacaatttggactcttggtttttaaatggtagtacaggtaagagtagttaagtttctaataccagaatagttttgaaatatattattgttattatcatcatcatgtagagacagcatctcattctgtcacgtgggctgaagtgcagtggtgtaatcatagcttgcactgcagccttgaactcctaggctcaagggtttcttaagccttagtcttaatatacagctttataagtgtgcattactgttcacagctaactttaaaattgttttttgtaaagacaggatcttactatgttgatcagactggccttgaacccctgggttcaagggatcctcctgccttggtctcccagctactcaggaggcggaggcaggagaatggcgcgaacccgggaggcggagcttgcagtgagccgagatggctccactgcactccagcctgggcgacacagcgagactccgtctc

SEQ ID NO: 16793 - protein, 101 aa, Homo sapiens
MVKCALSYFSGICMRMDRLVVVLTFLVPRLESLICVVFKGSIQITYIQKKMVTDLEAVYIFPIIHNTYYWQYGFHSLLLTYQQCAIATNNHLLMHASKFCI

SEQ ID NO: 16794 - DNA, 2429 bp, Homo sapiens
  CDS (320)..(637)
tagtacgtggatctctttgtactcttgccctgggcccccaaaatgtaagatgaagggctggttcatagtgccctaggctcccagttttctctgagcttcagaagctctagaactttggagtggcatgtaaacaggcacagtaagtggtaagtataccctaagagtttcgtaccaagtacaaaaggacaagagttttctggagtggttgagaaaggctttcaccaagaaagtgatatttgcactgagtcttaaaggatgagtaggcctttgctaggaagagcaggtcattccaagtgaaaggaacagcatttgcaaaggtatgaagatgtggaaccctgtgtattattggggtgggggcagatgggagggcgtgggttgcaagtgtttgctgatagaggaagcattcattcaagcacccataactatacccatcccatcttccatctctcacaggctctcccctacatcattagttttctgcttttctgtaggtgacacaggccccaggaggctgggaagtcctggctgttgtggtccctgtgcccccctttacctgcctgctccgggacctggtgcctgccaccaactacagcctcagggtgcgctgtgccaatgccttggggccctctccctatgctgactgggtgccctttcagaccaagggtctaggtaagggatgcatagagcagagcgggtgggcagggctggagccgggaagggggccgtgttggctggagttctgaatggtgctggtagagatggaggttcaggcatcattcggcaaacatttactgcatataactacataccaccttgtaagtagttcttgtaggtggaacagataagcaaactggaaaagatcagataatgtggttgataaagagtgtccccaggtggttaaggaaaccccccctaaaaaggtctgaaggataaagatctgaaggatctgggatctgaacgataaagaagaagccatgtaaatatctgggggaaaatcactgccggaagaaggcacagcaagtgcaaagaccctatgacaggaacttgcttggcaattgcaaagaggctggcatagctgtgagaggggagtggtaaggggtgaggcagaaaggcagtaaccatggtgatgaagagcaacactgccgagctggggtgctgcctgtcctgcccattgcttacccctcccccagcacagtgggtgagagcagtcagagctgggaggtgaacccttccccagtttgtgcctctcagagctgtttagttcttgggagttgattccaaaggtctgcatggaattatgatggtgggaagggcaggggtcttagcaatcttctctctttggctgcagccccagccagcgctccccaaaacctccatgccatccgcacagattcaggcctcgtcttggagtgggaagaagtgatccccgaggcccctttggaaggccccctgggaccctacaaactgtcctgggttcaagacaatggaacccaggtaagacagaaccctcccctctctccactctcctggagtataagccttcagggttctaaggcctttaagaatttcaaaatgattgtctttggtgggcctgggtctcccgcagccccagggaatcctttcctcctcaccctcctctgcaagctccacttctcaaaggattatgtctcctgttagggttgcatcctgtgtgcactttgtaaataaagcaggaagcacattcctgcttgagctgggggagggcacagataaggctttgtccccagctcagttcgctcccatcccccacctgtgcattccgggactgagccttgtttgtgttctggagaggcccctgcagccgggaacaggaatgtgattactcccagaaggttgtgttcctgcagcccctgaacccacagtgcccctatactcccatgttcccagctggacctttttctgtcctcaggccccagctggaggccttctccccaggctcactatggggtgggggcttttcctggctgcaggatgagctgacagtggaggggaccagggccaatttgacaggctgggatccccaaaaggacctgatcgtacgtgtgtgcgtctccaatgcagttggctgtggaccctggagtcagccactggtggtctcttctcatgaccgtgcaggtgaggcttgtaggtggagaggggcagaggctcaggggatcaaggttttcaagggcaacctagactgatgggaggagcctagtagcatctcccctcctagtagacccacagacagagtgaagaagttgaggccagggctgtttaaactatcttggctgggcatggtggctcatgcctgtaatcccaacattttgggaggttgagggatcgcttgaggccggcagtttgagaccagctctggcaacatagcaagactctgtctctacaaaaaaatt

SEQ ID NO: 16795 - protein, 106 aa, Homo sapiens
MKMWNPVYYWGGGRWEGVGCKCLLIEEAFIQAPITIPIPSSISHRLSPTSLVFCFSVGDTGPRRLGSPGCCGPCAPLYLPAPGPGACHQLQPQGALCQCLGALSLC

SEQ ID NO: 16796 - DNA, 3204 bp, Homo sapiens
  CDS (375)..(1574)
acagagctgggtgtgtccctccgagtgccccccgctagggactgtgcaggccggagctaggcagggacagcggggcgaaccgggctgatagagtcggtccctgctcctgtgaggctctcaccgaatccctgctgtttccgggcagctgaagagcgctgggccctcgcgtcgcgggcgtggctgtggccgtgtctcctggtagtctgagcccactgtgcgtgtggatccacgtgggagctgggttccagagcctggtcctgaggaggagccgagccggggcttccccttctcagaatcctgctcttcctccagagagattcccaggagaagagggaacaaccaattcattcctgaaagccaggcctcgggacctgatgacatttgaagatgtggctgtggaattcagccagtgggagtgggggcagctgaaccctgctcagaaggacctctacagggaggtgatgctggagaacttcaggaacttggccattctgggccttctagtatccaaaccatatgtgatctgccagttggaggaagggggtgagcccttcatggtggagagagaaatctcaacaggagcccactcagactggaagagaaggtctaaatccaaggaatcaatgccaagttggggaatttccaaagaagaattattccaggtagtatcagtggaaaaacacattcaagatgtgctgcagttctcgaagttgaaagcagcctgcggttgtgatggccagttagagatgcagcagataaaacaggagagacacctgaaacaaatgtcaaccattcacaaatctgccaccacccttagcagagattataaatggaatggatttgggagaagcttaggtttaagatcagtccttgttaaccaacacagcattctcatgggagaaggatcttataaatgtgatacagaattcaggcagactttagggggaaacaactctcagagaacccacccagaaaagaaatcttgtaaatgtaatgagtgtgggaagtcctttcacttccagtcagaacttaggcgccatcagcgatgtcacactggagaaaagccgtatgaatgcagtgactgtggaagagcctttggtcatatttcatcccttattaaacatcaaagaactcatactggagaaaagccctatgaatgcagtgaatgtgggagagccttcagccagagttcgtctcttgttctgcactatagatttcacactggagagaaaccctacaaatgtaatgaatgtggacgagcctttggtcacacttcatcccttattaagcatcagaggactcatactggagaaaagccctatgaatgccgggaatgtgggagaaccttcagccagagctcatcactcattgtgcattacagatttcatactggagagaaaccttacaaatgtaataaatgtgggagagccttcagccagagttcatctctcactcaacattacagatttcacactggagagaaaccctacaaatgtaatgagtgtggaagggcctttgctcatactgcatcccttattaaacatcagagaagtcatgctggaaaaaaaaccctataaattcagtgaatatagaagggctttcagctggagtgcagacatcactggaacttaaagaattcatatcagagagagatcctaaaggtgtaatgtatgtgggaagaccacatcttgttccacatcaggcaataattactaaagagaatccctgtcaatgtcaagagggggtgggcttcccctctcttaccaaacatgggagaatccatactagtgagaaaccacgtgaatgtaatgaatgtgggaacgctttgatcagaggatgcatattattcagcatcagacagccgacactggggaggagccttatcaatgcagtgagtgtggcaagccttcagttacatactgattctttaagaaaatcagataacttgtactggagagaaatcctacaagtgtggtaagtatggaaaaatcttcagttgtatctcttcctttactaagcatcaagaacacatactagagagaggccctatgaaagcaggaaatagaggaaggccttcagtcagggctcatcccttattaagcatcagaaaattcatacctgagaaaaacctgtgaatgtgggtaatgtgggagagccttcagccaaacctcattgctttataaaccccttagaactctccctactagctggaaactctggtgacgtgatgaatgtgggaagggctttggtggatgttccaccaaaacacgttagagaatttgtacattagagaatttgtgctagagcaactcttcaaatttagtgaaactgggaaaacccattagtagagttcaagcttcagtattcatctcaaagagaaaccttgggaacatgatgaatgtgaggaaagttcctttccaacttgagatgtataaaactagagctgaaaagaagctgagaaatcaccttgtctggtgattttctgcctggtggggccatttgtataacgacacttgtgcattgcctcctcatgctgttactgacggggcagggtgtcatgcatgggtgcagaggatggaggctgagaaaggtagacagctacccatgatctagcccagtcgtattttagagctaataaaactgatgttcagaaagtgacatgccttggcctatagtcctaactgggctgggcctctttcctgtggttcacagctgtagtatggagattaatagacaggatctttgcagtacaacacctctatgcacttctttctctgtagcacatgttacctttctttgtgaggcaatggagtggtctaggattgagcaaaaagcaatttttgttacatctttatgctaatagatttggaatttttgaaatgaaatgaaaccttgtttaaacattaaaattactaaaataggctgggcgcggtggctcacgcctgtaacctcagcactttgggaggccgaggcggacagatcacgaggtcaggagttcgagaccatcctggctaacacagtgaaaccctgtctctcctaaaaatacaaaaaaattagccaggcatggtggcgggcgcctgtagtcccagctacttggaaggctgagacaggagaatggcgtgaatcggggaggcagagcttgcagtcagccgagatcacgccactgcactccagcctgggagacagagtgagactccgtctcag

SEQ ID NO: 16797 - protein, 400 aa, Homo sapiens
MTFEDVAVEFSQWEWGQLNPAQKDLYREVMLENFRNLAILGLLVSKPYVICQLEEGGEPFMVEREISTGAHSDWKRRSKSKESMPSWGISKEELFQVVSVEKHIQDVLQFSKLKAACGCDGQLEMQQIKQERHLKQMSTIHKSATTLSRDYKWNGFGRSLGLRSVLVNQHSILMGEGSYKCDTEFRQTLGGNNSQRTHPEKKSCKCNECGKSFHFQSELRRHQRCHTGEKPYECSDCGRAFGHISSLIKHQRTHTGEKPYECSECGRAFSQSSSLVLHYRFHTGEKPYKCNECGRAFGHTSSLIKHQRTHTGEKPYECRECGRTFSQSSSLIVHYRFHTGEKPYKCNKCGRAFSQSSSLTQHYRFHTGEKPYKCNECGRAFAHTASLIKHQRSHAGKKTL

SEQ ID NO: 16798 - DNA, 2047 bp, Homo sapiens
tgatgctgtttgctgtagggattgacttaaattggagtcagttcttctaggacagtacgctgtgtgtgtgtatgcgcgtgcatgtgtgtgttgcagataagggcattatcattcggtcttcaagctccttttgtccactaaatttttgtgccctaggatcaattactttcactatttttgtgatccaacctttagcttctgacattcatttgtattgaattcctactctagctggcactgtgctacatattgagaatacaatggtacatactatagactaaattccaagagtttatattctacaggtttagagtaagttggaattccagatattgataagtgccctttaaaaaaaaatgaaacaaggtcctgagataaggatggcctgtttagagcaagaagaaaatccagtgtggctggaggagtgtggacaaggcagggagtgggtagaaatgtggtcagtgattggggctagtgccaggtccaggtcttggtgggtctcctggggcacagaaaagagcttgggttttactctaattgccgtggaagccaatagaggcttttaagcagggcatgacacgatctgatttagttttcaaagaaatcttgttggcagttgtgtagcctttctattcgaagcctggtctgtagatggactggcagcatgagcatcatctgtgagctttttaggaaggcacatttttgggacccactcaggtttcctgaagcagcatctgcatttttaatagaatccccagtttgagaacagctcttgtagagaatagatggggtcagatgaggaaaaacagctttacaagcccccacccttactcttttctcaggtgtagaaagcagattgttatagacagatttctagacttatctcagtgggctgacccaagcttgcttccaaattccactcttttttctttattttttttagataggttcttactctgttgctcaagctggagtgcagtgatgcaatcttggcttgctgtaccctcgaactcctgggctcaagtgattgccccatctcagcctcctgagcatcttggaccacaggcatgcactaccatgcccagttaagttttaatttttttgtagagacagggtcctgctatgctatccaagctggtctacaactcctgggctgaagcagtcctcccaccttgaccttccaaagaaagtgctgggattacaggtgtgagccactgcacccagccccaaattccacttctggttggactaacatagttttttatttgtttgtttatttccctaattcctaggtgactctccttcttgccttttactcagcagctgaactactgatttttcttttggtgttccatttatttatctttctattgattctgtaacttcatagaccctcaataaatgaccactatttccatcataattccaagtagcaattgcataaaatatccatatcttaaaagaaagataacaggacttcattataaggatggtataagtttgacacgcatatttgtaggcaggccgttattactaacttggtattatgaccactttaccatgaagggctttctgaatgctgttggcatgtgtgtcagttaggattaggtttggcttaagcttttaaactgttaataatagtttacacaaaatagaagtttatttctctctcatgtcaaaatctggagggtagactggaattgctttaaaagttctatttcataaagatctcaggtacctagactttttctatttcttttcactgtgtctagcctccattctgaagctgacctcatggtccaggatggctgctttacttcctgctatctcattaaaattccagccatcagaagagatgaagagatggtgcaaaacaagcactgcagcagacctttcagaaaggctgttagaactgctgcatgggccggcacggtggctcacacctgtaatcccagcactttgggaggccaaggctggtggatcacgaggtcaagatattgagaccctcctggctaacacagtgaaacctcgtctctactaaaaatac

SEQ ID NO: 16799 - DNA, 2626 bp, Homo sapiens
ggccttttttttttttttttttgagacggagtctcactctgtcacccaggctggagtgcagtggtgcgatgtcggctcactgcaagctccgcctcctgagttcacaccattctcccgcctcagcctcccaagtagctgggactacagaagtatgccaccatgcctggcttggttttttttgttttgttttgttttgtttttgtttttgttttgtgtgtgtgtgtgtgtgtgtttgagatggggtcttgctgtgttgcccaggctggtctctaactcctgacctcaagcgatcctcccttctcagcctccctagtctctgggattgcaggcatgagctcctaagcccagcttcacatttattttcaaaagctctttgctggagggtctgcagagccccaccttggggtatcattgcctgcacttaggagactgtaatgtaaatggtgccttctttatttgccttccaggggcacttccttgatggacacataatcaggtcaactttgacctcttgtccctggttgagtggggaaatcccagagagaggatcacgtggttgtaggaagacaaacttccagataactctttaatagctttaagcttaattcacttaccatcttttttgtgggggtggatggcagatcttgttcattaaatgagtatttattgactttatattaattaagcacctactatatgctaggcactgttttgaactcagatagcccccatgtgtctgggcgtgggggagatagatataatcacatgaatgcataattcttcagacaaggaatgttattggattttaaaattattggggaataaaataacacacaggacccagtgttggtgaggatatggagcaattagaatcctcacattgccgaagggagtgtaaaagggcagagtcactttggaaaactctttggcagtttattaaaaagttaaatagatcctttcatagttcataagtgtgatgatggggcgtacagggaaaaactccaaccccatttttcctctagcctcacaccaccacaacaatcaccaacacagaagacttatgtgaccaaatgtgtggggtgctttccccacacaccaggcaccagacaccagctgggtgtcctccggttcaattccaaaaccgtctacctagagatagtgtcagatcctgcaggttgggggctcagcacccaagactgccctccacatccccagacaccagttgcaagtgcaggcctctggaacttctgactgaccggcttcaagctggggttcccatgaccccctctttgggttcagttaatttctggagcagttcacagaacttagggaaacacttgcttatatttactggtttattataaagaatattacatgggatacagatgaagagatgtgggtagggcgaggtacaggggaaggtcgtgcagcttccatgccctccctgggcaccaggaacctccagtgttcagttatctggaagctctctgaaccctgtcctcttgggttttatggaagttttatgacatcagcattccttcccccagggtatagggtgggaccctcgcaggggagggtcttaagactcacagttggaaggtgggggaagattagagtcctgccttgtggcaggtgaaaggaggacaggagagagattgtgtttcccgatacctgcccttggggcctaacacacccaacattataacaaaaaactataacaagggctgtgggagttaggaaacaagaactgtagacaaaaacctatgtatcatatcacattgggttttcatgctcatgtgtgagaagtgcctctttcaaaccttgttctgacacattatcttacatgcaaggaaaaaaagctaaacatacacttaccatcccacttctaggtatttgcccaagaaaaatgaaaacatacgttcacactaagacttgtactcagctgtttctagcagctttgttcatgacagccccaaactaggagccacccagatgtccaccaccaggtgaatagaccagtaggtccatccatctgatggaatacttctcattcattaaagggaataagtacgctgtgtgtaacaacagtgggatctcaaaattatgcttctgagagtgatggaagccagacacacaagaccatgaaccgcggttccctttctagaaagttctggaaaatgcacactaacctactaatgtgaagccaaccagtggtagcctggaagctgggatggcaagaagaatcgattgcaaagagacaatagaaaacttttgtgggtggtggaagtattccatattttaattgtgatcatttcactcatgtattacatatttcaaaattatcgggccaggcgcggtggctcacgcctgtaatcccaaaactttgggaggccgaggcaggtggatcacaaggtcaggagatcaagaccatcctggctaacacagtgaaaccccgtccttactaaaaatacaaaaaattagccaggagtggtggcgggcgcttgtagtcccagctactcgggaggctgaggtagaagaatggcgtgaacccgggaggcggagcttgtagccagccaagatcgtgccactgcactccagcctgggcaacagagcaagactgcgtctc

SEQ ID NO: 16800 - DNA, 2708 bp, Homo sapiens
  CDS (1526)..(1975)
ttttttaaaattctgacagttttgttgactttgcactctgatgaaagcgtaaaatcctaggatgaaaagctctacctacatatcaaataataaaatagttataccctagaagaagagaaactcactgtctcctgctaaagaaataccttctgtctatgcaacttttctttccccctttctatacctctcttataagggcaaagcatttatagcctctgagttctaagaaaccatgggagcacggtgatctgctggtgagataaccgagataacagggcccatggtccaggtgccaacaccgaggacccttgttcctttatgtgagcccctgcatctggcccactgctgggtttcaaacatagtattattgaacaacctcaaattgctatatttaaatcaactctttatcaactagtcctgaaaattaaggcctacagacatcaacaaaacgagcgacagaagaaaggcatttccaagtgatgtaactgggtgactcatctcacgaaagggcactcggaggcctaccagtagaccacctttctggcttttggcatgccctgacatcagccttgctccctccattaatcatactacgctcacatagaagccaaaacatgtcacgcttctgtttgaaagctgtctttttgttcttagcaacatgtcatgtttgggggaagttataatatactggccagtggtgtcagtaagtcgggaaggctaaggagctttgatgtcaggtctttaccatttaatgtttttcaaagtattgggaattctgagaatattgtggtcaggtgtaaataagatttgcatgtcggttctttttttgtgatttagatcagcataaacttctccctccaaaaatcctttcagataataccaacttctgttctttcgcctgtccctgctctgggtgcttctccctccatggctagacttttttcagccgctcagggtcccaggagggggtgggggcaggctgggtccatttcacagtggtcagaagttgtacagaatctgttggggttggggttgaggcagcgtaggcttgggagccctacaacttgagagccagaggttcctggttaaagttttcagctgggacacattacttacccattcagaaacctcaaatgagggcagcccgtctgactgttgttttctggttaacttgaatccttgagctaaggtattccttctatttttactttcttaaattatcctggcatggatgtgtttgctagttccaaattttgtttaaataatatgtcttctacttatgttgtgaaactcaaagtgtggttgttcgttggttacgtcttccgatgtcttcagggtgacctaagtcttagagaacattggttactaacaagaaagttgagtttgctttgggaacaagaaagcgctttagggttgactgtccttccattccacctgtttttgccttttgtaagaaattgaagctgtgggctcattactacgtatttggtagctcttcagcaatgtgtggatcagcttttcccaaatgggtaagagtctaaacttttattttctcttctgcattactgttctttcagcttggtaccccaaaaaatggccagtggggtgtcccttatcctcaaaatcagtcattccatttcagaaacaaagtgaaagaactttgctggttgtaagttgggcttcccagggttcttggtggctggatctttattatgtgtttggatttcacagggcccctgcttccaagggagcagcagttccagctcacagctctgatcagggtcaaaacccgacttacatgcatcgtctttatatggtttttttcaagaccaagttcattcatttgctagtctttctttctttcctttctttctttctttctttctctctctttttcttctctttctttctttctctctttctttttcttctttctctttctttttttcttctttctttctttttctttcttttgtagctttgaggatatttaggacttaagtttctgggcagcttatttcctttttcattctctgctcttgtaagtaaaggtaacttctgagtagctcaaacatatgttggaactatggatctttagacctgaaagaagcacggcagctttccaatccagttttcagacattatgtttcatcatggtccccgttcttcaaattaaatttaaccacaaacctcgaaggatgactgataaaatcagagctgcaattagtagtgtgcgtgggtgtcagttctaatggaagcctgctaatccactgatgggaagcctgagaaccagaactaagtgagttagccagtgttactggggcaggacagggagtacagccaggaggagaaattgggctcatttaggtagaaatcagattagtggcagctggggacggggctgtagggagggagtaggcagcaaaggggcccgagggaactttttttgggggtgataggaatgtttctatcatgattgtagtgtggttgaatgactgcctgtttgtccaagctcactgagttgtaccctggagattggtgacttttaatgtctataaattatgcctcaagagaactgacaaaaagaaaataataaagtggctcaaaagttgtaaggaacctcctaaaacattcaggtctttcattaggggaggggggagcattttctatggttttaaattcagtgtaactgtatgaaatgattcctt

SEQ ID NO: 16801 - protein, 150 aa, Homo sapiens
MGKSLNFYFLFCITVLSAWYPKKWPVGCPLSSKSVIPFQKQSERTLLVVSWASQGSWWLDLYYVFGFHRAPASKGAAVPAHSSDQGQNPTYMHRLYMVFFKTKFIHLLVFLSFLSFFLSFSLFFFSFFLSLFLFLLSLSFFLLSFFFFLL

SEQ ID NO: 16802 - DNA, 2358 bp, Homo sapiens
aacagggaatgaaagctgagtgtagtggctcatgcctgtaatcccagcactttgggaggccaaggcaggcggatcacatgaggccaggagctaaagaccagcctggccaacgtggcgaaatcctgtctctattgaaaatacaaaaattagccaagcgtggtggcacacgcctgtaatcctaactatttgggtggctgaggcttgagaattgcttgaacccaggaggcggaggttgcagtgggccaagattgtgccactgcactccagcctgggtgacagagcaagacctagtctcaaaaaaaaaaaaaaaaggaaatgaaagacatgcaatagatgatttggtttatttctttaaaacctggatattggctctaaagtgtttatttaaataaatcagatttagaattactgatggaaattggccattcttctatgccatgactctaggatgagtgtcgaagaaatagcagtcaactttaattcagtagacagggcaagaagaatcaaagggactcttaaattaaaccctaagtagtagaacatggaatcaggctttaggaggtcaagtaagaggtgggagaggaggaattcagttctaccaatatttgagtgcctactctttaacacactttctaaaccctggcttcaatagtaacaaaaacaatagctttcctgtctttctagagcttacattctagtaggggaaacaggcaataaagaaaataaaacttgcagcatttcagaaggtggaagataccctgaaagacagtaaagtagataatggtgaacaggagtgaaattttaaaacagggaagttctcactgataaaatgacatttgagtaaagatctaaaggaggtaaggtagtgaattatatagctatgtgggaaaagaacataagcagaaggatgactaatatgtttggaaaatggcagggcagccagatggctacaatgaagagaggcaggggaagagaagcaggagaaaaggttaaataaataggacccaggaagcaatataatacaggactctagggattatagtatatgattgtattgtgattgtaaaggccattgactttaatttgatggaaatggggaaccacatgggattctaatatacatttgaagactgtcactctagctgttatactgaaaatggactccttgggggcacaggaagagcaagatcggttaggaggctgttgcagttatcttagctgagatgatagcagcttatagcaggacagaaatggtaagggctgtgttttttatactgactgtagagtataggatttgctgataagttagatgtgggagttagatgtagagagagagagaactcaaagatgactccaaggttttagcctttgcaaatggcaagacgttgttgtttagtgggatggaaaaggcagtttccccagggaagatcagatgtttagttttgggtatgttaaatgtgagatgccggccaggcatggtggctcatacctgtaatctcagcacttggggaggccaaggcaggaggatcacgtgggctcaggagttcaagaccagcctggcaacataaggaagcaccatctttacaaaaaataaaaattagtgacttgtggtggcacacctactcaggaggcttaggtgggaggatcagttgatccccaacaggttgtggctactacagtgaactgtgatcacatcactgtcctccagcctgggtaacagagtaaagaccctgtctcaaaaaaaaaaaaatgaggtgcccattaagatatcaaaatgtaaatgttgagtaggtagttacatgagtctggagttcaggaaaaaagtctggtcctcagcctcccaaagtgctgagattacaagcatgagccactgcacccggacagaaaatatttttaaatgacggaaattacaacatgtttgtatactaatgggaatgatccaaacagcgaagttaatgatgcaggagataagagcgtcctgcaggtggcattagtgagcactgtggaccaggatttctcaaccttggcattattgacgttttggacctgatcattctttgttggggggcagggggagctgtcctgtgcattgtaggatgtttagcatcattcctggccttgactctctaggtgccagtggaactccctcagttgtgacaatcaaaacgtcttacacacgccaattataccccgggtggcagaaaggggcaaaattgcccaattgagaaccatggttacaggctgacaacatgagtttcaaagctagttttaggaaagagggcaagtaaagagtctgggagtagcaaggaagacacctaattccagtctcagatccagtggtatgagctgtgagaggtt

SEQ ID NO: 16803 - DNA, 3676 bp, Homo sapiens
  CDS (276)..(1082)
attttgttgaccccaacacagaagatgtagcagttcctgaacagggaaatgcacatattggatcatttgtatcattctttaagggaaaagaaaaatgttctgaaaaatctcggaaaaatgaagaattaggagatgaaaaaagacttgagaaagaacagttactggcagaggaagaggatgatgatttgaaggaagtaactgatttgaggaaaatagctgctcagttattgcagcaagaacagaagaacaggattcttaatcattcaacttctgtgatgagaaacaagccaaaacaaactgtggaatgtgaaaagagtgtctcagcagatgaagttaattcaccattatcacccctcacctggcagcccttagaaaatcagaaggatcaaatagatgaacaaccgtggccagaatctcaccctataatctggcagagtgaagaaaggaggcggagcaaacagattagaaaagaatatttcaagtataaatcaatgaggaagagttcaagtggcaatgaaaatgatgagcaagacagtgataatgctaatatgtcaacacaatctccagtatcatctgaggaatatgacagaactgatggtttttcacacagtccctttggcttgaagcctagatcagcttttagccgctcatctcgccaagaatatggggcagcagatccaggatttacaatgagaagaaagatggaacatttacgggaagagcgagagcaaatacgacaacttcgcaacaatcttgaatccaggttaaaagtaattttgcctgatgacattggagctgcactgatggatggggttgttctttgccatttagccaatcatataaggccacgttctgttgctagtattcatgtaccatcaccagcagtgcccaaactgagcatggcaaaatgtcgaagaaatgtagaaaattttcttgatgcttgtaaaaagttgggtgtctcacaggaaagactttgtttgcctcatcatattttggaagaacgaggacttgtgaaagttggtgtcacagttcaggcgctccttgaattaccaacaaccaaggcatctcagctttctgtggcttaatataacattttaaaattctaagtgtatagtttcatttatttgaagtgatttcaaatatttcaaattcatgaataagaatattccgtcaaaaatagtttgccttaggtcacgccttaggattttaaaaaaattacattgaaacatcaaacttaaacattgaattgcccgaacttctttgggggaaaactggattaacttaataagagtatttgataaactcaaattctctttttactaagtcagttgataatcttgattatttttcagaaagcagactgatactaaatttaaaatgtagtttcaatttaataatcacattaggtttaatttttttacatcatagcatattagtaaacatctggataaaggtaattttttttagcaatttagagcaattctatatttgagttatttaatacacttctaattctagtttatacacaatttcttcaatctttggtcttagttttctagaaaaaaggagtagaaaaaacaattctggctttatattaaattcttttagtattataggttggtgccaaaatattttcagttgtactgtagattgtttacatgtgaagtgcctgtgtaattgatgactcttacatagtcttaagcatttttgcaattttttaaatgtattaatagagtcaatggaactttaaaatattttagtagattttgtaaagtcagtaatatgtgaggatttaaatgagcctcacattgtgacatttgtggctttttagttagtccattgcagtttcccttaaattggttatttcatgttgtcaaaaataccaatgttaatatgattaatttatgctatttaattttgtgaaacttaatcatcttttaaaatgtattatttgaagagtattttatttctgtattgaaaatgttacacaaagcagtaaagtttttgagaactagtgaagtactaattatcaaggacattttgataaaactgccaaagtttgggtttatatcttccctttgagcagcattctatcagtgctgcctttagctatactcagagagcagcagttgaggaataggtttttactcaaaatctggccatttgtgaatcctgtaaaccttgtgatcttcaattactttgatgttaaattaaacacagactcttctataaatattttcatgagatactgtgttacacaaagtccttgttttaacttaggtatgggtaaatttacatcggtggtattgcaggaatttttcaaaaacattactgtaatgaataactgagtttcctatagaagaacctgaataattacttttgtagtaaccaagcaagcatcatatcttaagtatgtgatcatttgcacttgttacctcttaatatggatgcaacttattaaaaatgttggcctgggtatttcaaagggtatatataaaaggtaaaaaactagtgtgccaaatggtataggaacaactgtactttttttgatcagttggcatgaagccatagaattaaattttggctttagaatacagatgtgttcattacattccccaagggtcaaattggagcttttaaagaattaaagcttctatgagtatatggtttaagaattaaattattagtaatttattattttaaatatttgacctcattagttgttaattttttagttggataaaaaaaaaaactcgctgacataatctccctagtgaaagcttgggtaatatatgtaagaaatggcaaataaataccttagttaatgactttttatgtagaaatttgacagcattacaaattaagtgaccattaaaaacacagcaatcattcatactgctttcataggtgttatgatagtctctgattaatcaatctagtatgaattattttacaagtgttgtcctgtttcatatctttgaagtagtagtgaaattgtaggccattttcttataacatttcagttacttttcagttaattattcctttaaaaagaaaatacagcagaacctcactgtagcattctttactgcagagcaaaattcaatttaagatgggcttctctgaggtccacatcatggcagttcatttactcttgtgccaaatggcaacaccacgtctaaagcagtttcacagcatggtcccctacaatgttataccaaggctctgatgtatttcttttagtagtttctaagtgtaaaatttattctaaatgtttttatggctattatctatttcatcagttattgaattaagaatgattttcatcacttgagtgggatttgtgatttaatgacagttgaataatcaaaaatattttattaggcccccaaaatttaatagatatctatttctgttacattttattactgtatggcacaagaaagaagtgacgttgggtatgttagaaatgaaataaggagtaaaaatgcattaccatttgtttaataattatctttacagaatgctagtttaatgacttttttaactgaattttttgaataaatcagaaatgtttgtattggtcacagatctatcataattgcttttctgatgcatttaaaaataaatggaacacttaaatgtatattaccgatgcaaactgtggataaagttg

SEQ ID NO: 16804 - protein, 269 aa, Homo sapiens
MRNKPKQTVECEKSVSADEVNSPLSPLTWQPLENQKDQIDEQPWPESHPIIWQSEERRRSKQIRKEYFKYKSMRKSSSGNENDEQDSDNANMSTQSPVSSEEYDRTDGFSHSPFGLKPRSAFSRSSRQEYGAADPGFTMRRKMEHLREEREQIRQLRNNLESRLKVILPDDIGAALMDGVVLCHLANHIRPRSVASIHVPSPAVPKLSMAKCRRNVENFLDACKKLGVSQERLCLPHHILEERGLVKVGVTVQALLELPTTKASQLSVA

SEQ ID NO: 16805 - DNA, 2064 bp, Homo sapiens
caaacatggcaaaaactatctgataacagccaggcatatagaaagcacaatctaatatatgagtctgaattttactgtgtcccttgctgaaaaaaattcagccattaaaataaccaaaaaattcataatcaagaaatatgtttctgtcatgaatagttgttttttactttagagtgtaaagcatgagatgattatttggagtggataattattaactaatactgacttggggtggattatttggggtggattattgttaactaatactgagttcttgctctgacaatcaagaatttcaaatacacattagcaccacagaaattaccaaagttgaggaaatatatgttacgtgaaatgtatctttgaaattttaataagtgtgtgaacttaacttccttacacatatttgctataattttgacctaagcatattttctactaaggcatgatgctgttaactgacatgatagtatactgtaaaacatggctgtataattagccaaatgtatgaaaaataaacactactttactgacaagtgtaattaaaggaaattggtaaattaagtacattgtaattatattgtaagtagttaatattaaaaatagtcattcttcagctgggcgtggtggctcacgcctgtaatcccagcactttgggaggccaaggcaggtggatcacgaggtaaggagatcgacaccatcctggctaacacggtgaaaccccgtgtctctactaaaaaaatagccgggcgtgatggagggcgcctgtagtcccagctactggggaggctgaggcaggagaatggcgtgaacccaggaggcggagcttgcagtgagaggagatctcgccactgcactccagcctgggcgacagagcgagactccgtctcaaaaaaaaaaaaaaagaaagttataaaaggaacttaagtgctttctaacaaaatattattcagaatcacagtgtaaaaaacaaagacccattttattaacagacattttcaaataaattaatacaaacaaaaagcgtttcgaggcacacaacaatttttgatattagtttgtggatggctttggcattgttatactagcttatgaatgatttttgtcatgttatattagcttcattatctaacttttattgtattttgttgtagatacatagttgtgagaaaatcctaacccacacaaataggtcattggatattataaccatgttttcacagttcccatatagtctcaggttgaatttcaacaaaacagagatggcggtgaagctttattttgagataaaatctacattaaaacaaataaagaaacaaataacaacaaccaccacaatcccagcaggtattacaagttgtttccagcacatttaattttggtctataaaacttggaatgtgcaatttattatatatcataattattccaaataattaagacatgaaaattgatataaaaagtgtgtggaatccttcaaacagatgaggaaaattttaaggtgtcatttgttagttctgtcaaaaatatgcattgagcacctgtgaatctgtgaaggttctagcagaaaacagatggtaaatgtgagattatttaactgaaaaataaatcagtgaagtgattatttaacaggtgtaaacagcgttaagaaaacaagtaggaatgtgagaaattctgagtttttaaggaccgtaaacagggaaaaccctttgctacccctaagtcggaagggacaaggggaagacaagtttgtgaaagcacagatgatagtgtgagctgtggaggtaggtccattatgaaactcgtagagttggaggaagcagagcaaagccagagggttgggaactgttgacacaacctctctcctcctgctttatgatcttctgccagggaattaattaccatcgccaactggaagcaaaggaatacaatgaaatctagagctgtcagccttctacacacacacaatagaacaggaaaaaagggggacagaaaagagaacaaaaatacagctacctatttactacattccagacattattccaagccctatagacgtagcagg

SEQ ID NO: 16806 - DNA, 1931 bp, Homo sapiens
  CDS (75)..(1700)
atgccgggagttgcagtaccctcaggaaggtagcgtcttgatctgcgtggcgtggttctgtgccttgggaagagatgaatgggaagcggccagcggagcccggcccagcccgggtgggaaaaaagggaaagaaggaggtgatggcggagttttcggacgctgttacggaagaaaccttgaaaaagcaggtggctgaggcctggagccgcaggacgccgttcggtcacgaagtcattgtcatggacatggacccttttcttcactgtgtgatcccaaacttcatccaaagccaagacttcttagaagggcttcagaaggaactgatgaacttggacttccatgagaagtataatgatttatataagttccagcagtctgatgatttgaagaagagaagagagcctcacatctccactttaaggaaaattctgtttgaagatttccggtcctggctttctgatatttctaaaattgacctggaatcaaccattgacatgtcctgtgctaaatatgaattcactgatgccctgctgtgccatgatgatgagctggaagggcgccggattgccttcatcctgtacctggttcctccctgggacaggagcatgggtggtaccctggacctgtacagcattgatgaacactttcagccgaagcagattgtcaagtctcttatcccttcgtggaacaaactggttttctttgaagtatctcctgtgtcctttcaccaggtgtctgaagtgctatctgaagaaaagtcacgtttgtctataagtggctggtttcatggtccatcattgactcggcctcccaactactttgaaccccccatacctcggagccctcacatcccacaagatcatgagattttgtatgattggatcaaccctacttatctggacatggattaccaagttcaaattcaagaagagtttgaagaaagttctgaaattctcctgaaggagtttcttaagcctgagaaattcacgaaagtctgtgaggccttggagcatggacatgtggaatggagcagccgaggtccccctaacaaaaggttttatgagaaagctgaggagagtaagcttcctgagatattgaaggagtgcatgaagttatttcgctctgaggcactattcttgctgctctccaacttcacaggcctgaagcttcatttcttggccccttcggaagaagatgagatgaatgataaaaaagaggcagaaaccactgatatcactgaagaagggactagccatagtcctcctgagccagagaataatcagatggccatcagcaacaacagccaacagagcaatgagcagacagacccagagccagaggaaaatgaaacaaagaaagaatcaagtgttcccatgtgccaaggggaactgaggcattggaagaccggtcactacactttaattcatgaccatagcaaggctgaatttgccctagacttaattctgtactgtggctgtgaaggctgggagccagaatatggcggttttacttcttacattgccaaaggtgaagatgaagagctgctaacagtgaatccagaaagcaattctttggcattggtctacagagacagagagactctgaaatttgtcaagcatattaaccaccgaagcctggaacaaaagaaaaccttcccaaacagaacaggtttctgggacttttcattcatctattatgaatgacagcactgggcaaagctgaacaaaaatgtgacccttcgtaattactgggaagtctgaaagagctaagcatggagtcaaggagaactacatggtagcttgcctgacagtgttcttaaaactggttgtcttttactaggactcataatgattgtcctcaaccgagaccttgagcttgcagctacgtacttatctcttgattaaaaaaaaaaagttggctttttttttttt

SEQ ID NO: 16807 - protein, 542 aa, Homo sapiens [sequence omitted]

SEQ ID NO: 16808 - DNA, 1320 bp, Homo sapiens
  CDS (21)..(1025)
ttctgtctggcggcggcagcatggcggcgggggcggctgaggcagctgtagcggccgtggaggaggtcggctcagccgggcactttgaggagctgctgcgcctcaaagccaagtccctccttgtggtccatttctgggcaccatgggctccacagtgtgcacagatgaacgaagttatggcagagttagctaaagaactccctcaagtttcatttgtgaggttggaagctgaaggtgttcctgaagtatctgaaaaatatgaaattagctctgttcccacttttctgtttttcaagaattctcagaaaatcgaccgattagatggtgcacatgccccagagttgaccaaaaaagttcagcgacatgcatctagtggctccttcctatccagcgctaatgaacatcttaaagaagatctcaaccttcgcttgaagaaattgactcatgctgccccctgcatgctgtttatgaaaggaactcctcaagaaccacgctgtggtttcagcaagcagatggtggaaattcttcacaaacataatattcagtttagcagttttgatatcttctcagatgaagaggttcgacagggactcaaagcctattccagttggcctacctatcctcagctctatgtttctggagagctcataggaggacttgatataattaaggagctagaagcatctgaagaactagatacaatttgtcccaaagctcccaaattagaggaaaggctcaaagtgctgacaaataaagcttctgtgatgctctttatgaaaggaaacaaacaggaagcaaaatgtggattcagcaaacaaattctggaaatactaaatagtactggtgttgaatatgaaacattcgatatattggaggatgaagaagttcggcaaggattaaaagcttactcaaattggccaacataccctcagctgtatgtgaaaggggagctggtgggaggattggatattgtgaaggaactgaaagaaaatggtgaattgctgcctatactgagaggagaaaattaataaatcttaaacttggtgcccaactattacggggtctggctctgtcacccaggctggagtgcagtggcacgattatggctcattgcagcctcgacttctcggggccaagcgatcctcctgcctcagccttctgagtagctgggaccacaggcgtgcaccaccatgcccacctaattttttatttcttgtagagatgaggtctcctgcctcagcctcccaaagtgctggaatttacaggtaggaccaccacacttggtccacttacttataataaacattgatttggtcgttc

SEQ ID NO: 16809 - protein, 335 aa, Homo sapiens [sequence omitted]

SEQ ID NO: 16810 - DNA, 1510 bp, Homo sapiens
aaagtcgtgtctttcgtgagctggtggaaacaccggagcgcccgctcctggaaagccccgttctcatagcgctcatggccaaacgctccccgcttggcagcatccgccagctgtaactggaggaacaggaccaggtcgggtttgggaaggcccacgtctggctgtttacaccaatctagggaaaaattctgccaagaaagaacccaacagttaaagcttagtgtagtctaggtttttgtttcgaaagtcgtaaaaacaggaaaaaatgaggggacatttggtgaggtaccaagatgtgagactgtttatattgtggctcgtttaatttttagaacctcaaacgtgtcggtttctccagtgtcacctttgtttttcctttgtaaacagacaagtggacagaaaagtaggtagatagaacggctgccagtccccgccacccacagcccaggccccatggaggccctcccagcgcagctacaggcctgctggccaggagcaaacagtctatgtacagaacccctggagacccccggcctagaacgcctgcagcacagagcagctgggtccggacacaggcacgaggtccttggcagtgtcttttctgccacacacacgccagggtctcctctcccgtggaagagcaggaagaagacaggcactcctagagcctgttatgtgccagcctagtctcatccactggcccttcttgccagggctgtgccagcaccctctctccctcccttactcatcccatctccctccaaatgctgtcctgtttccggaggaaaggtaggaccagaaaggctgtgactgcaggccacacatcacacaacagcacaatgagctgagggaaggcgtccacgagaacctcccacagagcctgcggctctgtcagctgatccgcacagcaggaagaagcaaaggaatcatgagtcttgtcctccttattatacaacgtaatacttcagaggggaaggactcaagctaacacatgaagaaatggcagaattaaaaagtgagggcgtggccgggcacggtggctcgcgcctgtaatcccagcactttgggaggctgaagcgggaggatcacttgggcccaagagttgttatagcgagctttgcttgttccactgtactccagcctgggcaacagagggagacgccctctttcaaaaaacgggggaaaaaagtactacaaatgaaccatctttgaaaatgcatctggaggctgggtgcagtggctcatgcctgtaatcctagcactttgggaggctgagatgagtggatcacttgaggtcaggagtttgagaccagcctggccaacatggtaaaaccccgtctctactaaaagtatgaaaattagctgggcacggtggtgcatgcctataatcccagatactcgggagactgaggcaggataatcgcttgaactcaggaggcagaggttgcaatgagctgagatcgtgccactacactccagcctgggtgacagaatgagagactgtctcccc

SEQ ID NO: 16811 - DNA, 2061 bp, Homo sapiens
ttaggatctttttcttttaactactttttttttggtgtcgtatacaaacagcctctggttctaattactttttctaataagtcaagcagaatgcttgattaaagttttttccatttactattccacagtttaatatagatcttagttattttcttttcccatttaggacacgtgttttagtaatatagactgcatgcattgatccctttagaaattttactgatgatttatatttatagccacagatgtctatattcaaacaaagtttatttttctatgataaaaataatacaagtgtcctaaagaaaatttggaatatataggtaaaagaagaaaaaaaaaaaaaaaaaaaaaagaaaatagatgactgcttgaagaatttagtaagagaactttaagctatagaaaaagagttgaatggacataactagaaaatgtaacaactgaaattagaatttaatagatggcttttaaaggaggttaacatggctgaagagaagattagtgaattggaagatagaacaatagatgttatcaagactacttcatctgatgagtcatagtgaaaaattagaatacatacaaggaaatccaatgagaaattacacatgcaataatagatggaagaatcatagacatgataattggaaagaggctttaaaataaacatacatatttaaagagatgcaaaaaaggaatattattaagacaataggatatgaggagaaaaacaggtagatttgaaaaataaccaaataatattttctagaaacaaaaattacaatctgtgaaataaaaagtcaacagatatagtgacccagtcgatgttttcgcgcaatatgtcaaatacagctgaagagagaattagtgaattggagataggtctgaggaaatccccaggatatagtactttgattagattgtgttaatcgaaaatgtctgattaactttggtatcaggtttaaactttactcaaaaatttaaaaacataattatagcctgatatttgatgacttatggaaatgatgcatctcttaatattttatgaagttgatactttggataattggatattattggacttcataaacattaatagaacagcacgtagaacagagtctcgcacattatagatactcaatatttgttgaatgagtggaatgaatgaatgaaatgtaagaataaaatcatagctacaaccttttgatttcagaatggggcagaggctgctcggattcacatatctgatactaagttcctatttttcattttaatttatggatatttattttagaggtcaacccaataatctagcaaaatatcactattaatatgccttgcttaagaaatattggcttctgaataactacagatacacatgtataaatgaggtagttttttagatgtctatatatagatataattatctatatatcaaattatatctctagctaaattagttaattttcctccatggttctgggagaattgaacaaaggtattgtgctaagtttacattcaaaggcagcttgcacattttagacttgtcagtattaagaatgtggtgaggttttaaattgtagatctatttataagagatttatagcagttactataaaggatattattagaaagcaggtatgagctattaacaaatgaattttacttattttgcttaaaacaaaaagtgaaggacacaacccaaatttaaaatttaaaattattcttaacttctaaagttttttttatcattgatttcctaagtgttgtagtaggtgaattttgttggtgataaactggtgattcaattctctgcacttgctcttttctctgagcaggtgcgggcattctatgtgaacgtgctgaatgaggaacagaggaaacgtctgtgtgagaacattgccggccacctgaaggatgcacaaattttcatccagaagaaagcggtgagtctttgtaagctgaagggtgtcctctgctggctaaggaagacagtgcagctgtgtgggagaaccctaaaaagaaagtgccatttctgttttacttgacttaagagaactt

SEQ ID NO: 16812 - DNA, 2567 bp, Homo sapiens
  CDS (995)..(1375)
agaacagggacgcaaagttgagtaattagcaaggagaccagttagaaggccactgcagtaatctaagagagacaactctagcttggaccggtgtcatggtgatggggatagtggaaaggagttgaattctagatatattttgattgcatccacaggatttgctgataggtagcatgtggaatgtgagagagtggccaagagtgactccaaagtttttggcaagtgggcaggtgaatatatggatttggagctcaagggagcaatccagcctagagatacaaatttggaagttgtcacagtgcagatggtacttaaaatcatgagaccagatgagatcaccaaggaaatgcaaatagatagaaaagagaagaagaccaaagcctaagccctggggccctccaatgttaaaaggttgaaagatgaggcagaactagcaaaggacactgagaaataaataatgagatataaagagaaacaagattagtaagtatgcatcatgtgccagacaccatgctccagacaaaggatgcaaagacaaacacaaccccgtcctcatcatcctcatgctctaatgcagcagtcaggtactacaccttgaaataccattgtgattggttcagggataggtgtaaaatgtcagggacagtgagaccacaaccttgttacttctgtgaatgattacacacacacacacaatcagccatacttgcctcttctgagtgattctttttgtttatttattcttttgtctctaacaggcaattggttaccaaaccttgaagaatctacctttgtaatatctcttatatgtgacacctcctgtccattttctcagccaccagtctagatgaagccctcattaaagatcacctgcagtgttgcagaagctcctaaacatcctcgttccctccctttaaccctctaatcctacttttttcattactcttcttcctcgcagttaactctcctgagcaaaagtctcaccacctctaggatgcagcccaggtgcctaaacccgttattgaaggtgctccacaaaccgatactaccctgccccgccagcagtgtcttcactcttcccagtgttctctgtttcctggacactcacatccatgcttggtatcacactttagcctgtgacacagactcccacctggaatgcctatctctattccaaagtgttcatatgccatttccttcacaaagcttttcccctgctgtagcctgcatggttgtctgtgtctccaaattgctgtatcacttggagtctctgacactcatttttgtatgtaggtatacgatggcacgagtagtcactaaaatacattcatattcactacttcattcactttcatttaaatgtgcctcctccttttaaggataagcaactttccgtgcaaggcatgatactattctaataatagattctaaatgaatagatgttagattttttttaaaggtgagtaaatatataaagtataagactgtaataaaacactttgtcgtatgcaagttctaccaagctccaggaatatagtcatgaaaataattcaaataaagtatttactcttttaataaatagttattaagttttatgtgccagccatgtgcaagacactaatgattcaaaaataagtcataattccaaggctcaagaaacctgtaatctaatgagaaagacatacagatcgttataatataatctgacacctgtagttgtagatatatctatgagtgcatggaagagaaggcttcctggaggaggtgatacatatggtgattctcagaggatgagtagtagttcgatacagtggaaattgaataggaggaggaacagcataggcagagggcacagcagtggaggtgagaaaggcatggtgtgtggagatggggaggccagatgatggagagccatgtatgtcctgttaaggtacttgaattttaccctgtgggtgatgccaacgatgtccatatagaaaagccttggaaggattttatgtatagaaagagcatgatcagatttgcatgtttgaacacttggacaacctaaaagatggatttgagagagaccagagttggatgcagagagacaaattatgcgccattccagtagaccaggtaagagatgctgagggcttggattaagtgaaggcagtaagagttgggtggggaaaaggagataaattcaagtatcacttatggggcaaaattcacaggatgcagtgatacagtcactgtggcagcctaggggagggtgtggaaagagccaaagatggcccttacttctgaccttgaagattgggtgagcagtgggccaccccttgcagagagacaggggaagacggcttggtttatggtggaaatgatgagttcagtttgagccatatggagtttgaaatgcctctggcattccattcaaagtaatccccttaaatggtcattgagtgactcaaatagtgctactgttcttggaacttttcagagacttctcgaaaaaccattaccaaagacattttatcagctacataaactagtcatgcattttatagacacaactctccttttgg

SEQ ID NO: 16813 - protein, 127 aa, Homo sapiens [sequence omitted]

SEQ ID NO: 16814 - DNA, 2430 bp, Homo sapiens
  CDS (109)..(459)
acttttttcattcccgttgttatggaggtaggctctctaggaatctgggagtagtagctggggggcaagagcaaataaagagctcgagcttctgtggtctctggggagatgttcccgggaagcctgtctagagggcggagggcagctgttgagatggcgtggctccccggctcctgcgcccgcgtggctttcgcggcgggcgctgcggcccggtattggacagcctggcagggcagcgcggggccgaatccggctgccgtggctgaggctcatggatcactcttttgtggtagggccacatctgccagagcctggagtctgcgaaggccgggacccggttccccggcccacagtgggggtgtgcaaacccgagagaactggattgcgtacccactgcagagtgctgaagacggggtagccacgaggttgcaaattcgtgaagaaccagcctgggcaacatagcaagacccctttatctataaaaataataataactaggtaccattgtgaaaaataataactagggattgattatagtatctttactctgtattcacaaatatctgtattcctggacatatttaatcctttgatttacctctgactaggtttgtcattgtaatccctgggctgcttaggaggataccatttggtttgatgaaaaagctggaatgataatagctcaaactcttttgagcatttagtacatgcttggcactgttctatatgtcttaagttattcactcttgtatttaaccatcaacactcttatgaggtaaatatcccgcaattacttttgcgccaacctagtaccactacagacaaggaaacagatgcagagaggctaagttacaagggcacacagccataaactttggatctgtggagtgactgggcttcagagtcctcttcctgactgctgttcctatgtcttttgcaaagagaagtctttgacaggtatatgctttattaaaatcatgtttagaaaaaaatgagagaatagaattagaaaaaggaatgactgtaggcttcgatgaaaatgacttttgtgactaggtgaaaattgtttggctgggtatcctggaaaattgtcttctgggaatatctatattccagggttcacttttgtcatagaattgtttcttggcccatttaagagagatactttgtttattaataaatcaaacgttttaattttagacatctgtgatcagttcttttaaagagactatatttatttaagtacttcccaagtttagtgcaggggtactacctaccatttattcaggatcatagaggataagttagggtcaaagaaaatagagactgccatgacagcggcttgcttgctttctccccaggaataatgcacaaataatttatagcagctgatatttttcggtgttaacagataataggggaatttgctgaaatttttatttggagcctcggatttaattttaggccactgggctaatttatttttaaatgtaaattaattccagtactttatttgtaaagtttacttgagatctaactgttctaagacatgctgttgcattacaaataagaattgctgcatttattttgatcccattgccagaggcaaaattagtcaaaatttaaaggtatgtagaaatacttttgtaatccttctaaactacattaaatttctggctgactggtggctcacacctgcagtctcagcactttgggaggctgaggttggcagatcaacatggtgaaagcaggtctctactaaaaaataccaaaaaaaattagccgggcatggtggcgcatgctactcaggaggctgaggcgcgagaatctcttgaacctggaaggtggagtttgcagagagccgagatggtgccactatactcaagcctgggctacagagtaagacactgtctcaaaaataaataaaattataatttcttagatttaaaaattagatttgttttccaaagacagggtagtagaatatgtagggtacttgtatagatagatatatgttacttaatgcagtactgtctggtgcagggtatcttcacgtggcataatagacccagagcttcaggtctaggctctgtaaagcgaaatgccaaactactgtgtgtgcatttctcgaaagaaaggtgatgtagttttatacaattttgaaacaagtccatgactcccaagggtttaaggaccaatggttcagtgagacatttacagattttgaagttagaattcagtttgaattctatacacatttactagctatgcaaccttggacaagttacctaacatctgtgagcctcagtttctttacctgtagaatgatatatttgccccattgggttgttagggttaaaaaaaaaaaaaaaagaaaaaaaaaaaaaaaaaaaaaaaaaaaaaaaaaaaaaaaaaaaaaaaaaaaaaaag

SEQ ID NO: 16815 - protein, 117 aa, Homo sapiens
MFPGSLSRGRRAAVEMAWLPGSCARVAFAAGAAARYWTAWQGSAGPNPAAVAEAHGSLFCGRATSARAWSLRRPGPGSPAHSGGVQTRENWIAYPLQSAEDGVATRLQIREEPAWAT

SEQ ID NO: 16816 - DNA, 1759 bp, Homo sapiens
ggcctttttttttttttttttagtagagacggggtttcaccgtgttagccaggatggtctcaaactcctgacctcaggtgatccacctacctcggcctcccaaagtgttgggattacaggcgtgagctactgcgcccagccaactatacatttttgaagccctcctgatcacttccttggttactctcatctttgtttgaagttcaatatattactttttttttttttttttttttttttggagacagagtctcactctgtcccccaggttggagtgcagtgagccatgattgtgccactgcacgccagcctgggcaacagagtgagcccctgtttcaggaaaagaaactgagagggtaggagtaaaggaatttcctaagctactgccatgtgtcaggcccactgctaggcaatttatatcatttagctcttgaatgatcctatagctttgccagtgtgtattatctcagcttacaggtgagggcattgatgcctgtcactatgtttaagccttggtcatgctggcacagcctgagcttcccaccgcgaaccagaacagcggtggggattggctgtggaccctgacccttacctgggctggtcagcttgagccagagtctcaaagtgaagctcatggtctggcttctccaggatcatcaagtgttgtctcttcaccagaagcaaatgcccatcaattgtgtccacctggactgtctggggggttagggtggcttggcagttgagcgctgggtcaagcctgcagtatcctcgaactcctacaagaagcctgtggtcaggcccagcctctgacacctccaccgtcagtcaggatggaagtcccctgggtgttgagcagacacagggaggcagggagatgagctggatctggctgggtccctgcttagtcacaggctctggcaacctctaatgaaacatcccttcccagttggctgttttccccaaatatagacacgtgctgtcactagaggggagcttcccagcccaacagcttctggaccatgctgggctgacttggggagagagccacccacgaacccctggtttgaaggccagactaggtggtcatatggaaggtgacagaccttccccctggtgggtgtactgtgtgcagggacaaagcctgtgctagcaccctgctgtcttgacagtaagtgtctttgggctgggcatggtggcttatgcctgtaatcccagcactttgggaggccgaggcggacagatcacccgaggtcgggagttccttctgccttggacacccaaaatgcagagattacaggtgtgagctaccacaccccaccaagggtctcttaagaagagctggccgggtgcggtggctcacgcctgtaatcctagcactttggtaggccgaggcgggcggatcacgaggtcaggagattgagaccatcctggctaacacggtgaaaacccatctctactaaaaatacaaaaaattagccgggtgtggtggcgggcgcctgtagtcccagctactcaggaggctgaggcaggagaatggcatgaacccgggaggcggaggttgcagtgagcagagatcgcaccactgcactccagcctgggcaacagagtgggactccgtctcaaaaaaaaaaaaaaaaaaaagagctatactgtgttgaaagagtcctgtataaaggaggatgtcttaaatttgccattttgactctgttttgaacaggtcaccaggaaaatgagacttggtagcctggcgaggtggctc

SEQ ID NO: 16817 - DNA, 2835 bp, Homo sapiens
  CDS (20)..(793)
gtcttgctttatttcaggaatgcctctggctcaggcagtagccattcttcagaagcactgtcgcatcatcaaaaacgtccaggttctctacagtgaacagtctcctctaagccatgacctcattcttaacctgactcaggacgggatcaaactaatgtttgatgctttcaatcagagacttaaggtgatcgaagtatgtgatttgactaaagtaaagttaaaatattgtggcgtgcattttaattctcaggccatagctcctaccattgaacagattgaccagtcttttggcgcaacccatcctggaggtaagccaagtccatctgattcctctggtcatcagtggcagttcatagcaataaacctgcccggtagtgccatcccaccccacttcctggagtcaggctcccataggattgtggggttggtacttgggtgtgaaggaaacatcctcccccttgttttcaacctagtaggccagtttagaaacaagccacagggaaggtgttgtcagtcattactccctgccaggctggtttatgttagccatttcagatgccagtcaaccatgttattttcttctcccccacccccaacagtgtacaactccgctgagcagctcttccatctcaacttcagaggactgtctttctcttttcagttagactcatggactgaggctccaaagtatgagcccaattttgcccatggcctggcttctctccagataccccatggagcaactgtaaaacgaatgtacatctacagtggcaacagcctgcaggataccaagtaagtataaggagcatgagtttcttgctaaggcctgggctgcctgggagaaagaaccaagcctctgctcattctgtgtctgtccccagggctcccatgatgcctctgagctgtttcctgggcaatgtctatgctgagagtgtagatgttcttcgagatggaactggacctgcaggtttacgacttcgcctacttgctgcaggtcagtgactggctttgaggttggtacattccgcattatacccatgttgagacagtctaaaatcccacgtgcttagggtgtgtctcagtccattcaggctgctataataaaataccataaactgagtggctgctaaacaacaaaaatttatttcttgcagttctggaggctgggaagtccaagatcaaggcactggcagattcagtatctggatgcgcctgcagtctagttcatagaagaaacttctccccgtatcctcatatggtgcaaggggctagttaactccctggagtctgttttttaacggcactgatctcaatcctgaggtctctgcttccataatgtaatcacctcccaaagccctgaccttctaataccatcaccttggtggttaggatttcaacatatgaattttaggggaacaaaagcattcagtccattgccacatagttggtagaagacaaatgatgcagatgtttatggttaaagcttttgtttagttttgtcaagggactggacatagtcttataattagcaaatcttaataagcaacagcactgcttctctcagcatgcacataggcctgctgtgtgcttatatagctttgtgacagttcccaagtgtttcctggagatgcatcctgtgggttgcagtgctactgctctccccttttttgtttttttctttttcttttttttgagacagagtcttactctgttgctgaggctggagtgcagtggcacgatctcagcttactgcaccccctgcctcccaggttcaagtgattctcctgcctcagcctcccaagtagctgggattacaggcacgcattagcacacccggctaatttttgtatttttagtagagacagggtttcaccatgttgttcaggctggtctggaactcctgacctcatgatccgcccacctcggcctcccaaagtgctgggattacaggcgtgagccaccgcacctggccagctctccccttttttctacctttttttgttttgttttgttttgttttgtaagagatggcctcattctgtcatccaggctgtagtgcagtggtgcaatcatagctcactgcagcctcaaaactcctgggctcaagtgatctcacctaagcctcccaagtagctaggaccacaggcatgtgctaccatgcccagttaatttttgtctatgtggagatgggtcttgctgtgttacccagaatgatcttgaactcctgggctcaatcgatcctccctccttggctttccaaagtgctggtattacaggtgcaagccgctacacccagcttttctccctatattatccaggccggtgtgcattggaatactgtggccttgaactcctgggctcaagcaatcctgccttaacctcctgactaggctacaggcacgcaccaccatgcctggctctcctttttctaccctttatgccaagttctcaacgtaggcaagcagacgggacttgttgaattgtggtttggccacaccttggccagagttttgccaaccatgaacaacaacaacaaaaagaaatagttggccgggtgcagtggctcatgcctgtaatcccagcaccttgggaggccaaagcgggtggattacctgaggtcaggagttcaagaccagcctgaccaatatgatgaaaccccatctctgctaaaaatacaaaaattagctgggcgtggtaaagcacgcctgtactcccagctactcaggaggctgagacaggagaatcgcttgaactcaggaggcggaggttgcagtgagctgagatagcgccattgcactggagcctgggcaacaagagcgaaactccttctcacag

SEQ ID NO: 16818 - protein, 258 aa, Homo sapiens
MPLAQAVAILQKHCRIIKNVQVLYSEQSPLSHDLILNLTQDGIKLMFDAFNQRLKVIEVCDLTKVKLKYCGVHFNSQAIAPTIEQIDQSFGATHPGGKPSPSDSSGHQWQFIAINLPGSAIPPHFLESGSHRIVGLVLGCEGNILPLVFNLVGQFRNKPQGRCCQSLLPARLVYVSHFRCQSTMLFSSPPPPTVYNSAEQLFHLNFRGLSFSFQLDSWTEAPKYEPNFAHGLASLQIPHGATVKRMYIYSGNSLQDTK

SEQ ID NO: 16819 - DNA, 1658 bp, Homo sapiens
tgttaaaagggttttaaataagtctctttttcaatggtgtaagtatgagatttgtgaagccctttccagatgcatgtgtgtttgcttatgtttaaaaaatcacttgagtgcaaacatttaaacacattttataaaactggcgggccaggcacggtggctcatgcctgtggtcccagcactttgggaggccgaggcgggtggatcacgaggtcaggagtttgagaccagcctgaccaacgtggtgaaaccccgtctctactgggggaaaaaaaaaattagccaggcgtggtggtgggtgcctgtagtcccagctactcgggaggctgaggcaggagaatcacttgaacccaggaggcggaggttgcaatgagccgagatcatgccattgtgctccggcctgggtgacaaagcgagactctttctcaaaaaaacaaaaacaaaaacaaacagacaaacaaacaaaactggcatggcattggacagtgacacataagaagctgatgtcatctttgccacttagagaaggcaaaatatcttgttagataacccctcttaaatgctctgcttggctagtactttttgggcttggtcagtgattagagtttaagttgtaaatggtattcataatttcttgtctctgtctcatcccaaacagattagaaaatctttgatttttgttggtaaggagctagcatcttattaatacaaagccttgtgcataaattatttccagtaattatttagtgcctaatgtggcatgctttgtgctgagtgctgaggataaaagaggaataaggtaagatctttatagtttagcagaggaggatgtgagtgggcagaaaaatgttatgagttctataataggaatatgtataggggaacttggttacagctcaacttaattgagaaagggtgtgaaatgaaaagaccaaacattctttgcagaacagctaaacagttggaattatatactcagatgagttaatgattataaatagccatcatttattatctctccagaactccagaaccaaggttataaaaaatgaatagttctttatttagttcagaagcatttgtgaagtatctatagcatctgtaacatggcaggccctaaggacgctggcatgaatagtgggccgtcatctactgggagagtcagtatagcgtgtacgtgcgttagaggtgaaatgcataaaggggcatccaacatggctggtggctggccatgtgaacaagacatttgcatttgccacagcataaagaaggatatttctgagtcatggagtattttattatgtttatttggccccaatatttccaaataaaaagaggcctttgcttttgtgctacaggcgtttcttatctttaggaagaatgggccgggcgcggtggctcacacctgtaatcccagcactttgggaggtcaaggcaggcggatcacaaggtcaggagttcgagacaagcctgaccaatatggtgaaaccccatctctactaaaaatacaaaaattagctgggcttggtggcacacgcgtgtagtcccagctactcaggaggcgaggcaggagaattgcttgaacctggtaggtggaggttacagtgagccaagatcgtgccattgcactccagcctgggtgacagagtgagactccatct

SEQ ID NO: 16820 - DNA, 1683 bp, Homo sapiens
attattaataagacgatgatcatgctaattaagctactttattagagtttgatggattttgtgccagaaattatggtggggtctttgaaatatatagagtattttctcttagagcaagtcgtctagcatcattgaaaactttactgaaaactcttcattactcataacattgctcgtctgtttcaaaatgacacgatagtcactttcacagaaacataatagtatgcaattcaaatgtttaatttgctgctgcaaaagaattcacaatagaattctcaatgtggggttaattacatagtaatgaaagagtaaacctattgggaaaatgctctaagtaacattgctctgtttcctactgataaagacgtgcacgcctgatttattttttatgctgggaaattcagaagtaagagaaaaccttgaaaaggtatgcacatgaataataaagttttttatcatttgtcaacatgatgagaaaatgatgaacgtggataattattatattacaaaggctataatcacaaaatagtaatgtataagaatatagcattctattatacacaggagaacatgatacattaaaatcattgataacataatctaaggaaagacatcgctaatcagaacaaaaaaaggaagaagtaatagagcaggcactcaaaattgtgtccatgttttctacaaataatcttcaccctctctgcctatgagtatagtgttatattgctaggtatgttatgtttactccatatatgtcaaagactccactgggggaattgaacaatgagaacacttggacacaggaaggggaacatcacacactggggcctgttgtggggtggggggatgggggagggaaggcattaggagatacacctaatgtaaatgacgagttaatgggtgcagcacaccaacatggcacatgtatacatatgtaacaaacctgcatgttgtgcacatgtaccctagatcttaaagtataataataataaaaaatttggaccacaaaaaaaaatatggtatcttaataaatatctcaaaacagttataagattgacaatatgatccctactttgttaggtgaagaaaatgacacttttaaaaacataaaaagatttcctgtatgataggattcaaattcatatttgtttgtttccaagggctttttctcattcattatcctatgctgtcatgtaaattaatccatgaatattgcagcttgtatcagaagcttgaaagttcacagaaagaatcattttctacctaaatttgcccatcaaatttgggtggacagtgacagcagcacagtgttaggcttacttttaaatgacattatttaggatagtgagaggataaacaaatagactaaaagaacagaacggagtccagaactagatccacgcagatatggccaattgatcttccaaaaaggcaccaaagtgatgtaatggagaaaggaaaattgttttaaccaccagacctagaaaacttggtatccatataggaaaaaaataaatcttgatacttcataccatacacacaaaagtaattatagatggcacatagacctaaatataaaatcttaagctcaaaagtttctagaagaaaatatagaagaatatttcctggacctgagctaggcaaagatttcatagaaacacacaaacagcattagccacaaag

SEQ ID NO: 16821 - DNA, 2784 bp, Homo sapiens
  CDS (170)..(994)
aaacaaattgcgaaaagatgctagttctcaagactgctatgatattccacgagcatttccaagtgatagatctagttcacttgaaggcttccataaccactttaaagtcaaaaatgtgttgacagtgggaagtgtttcaagtgaagaactggatgaaaattacgtcccaatgaatcccaattcaccaccacgacaacattccagcagttttacagaaccaattcaggaagcaaattatgtgccaatgactccaggaacatttgatttttcctcatttggaatgcaagttcctcctcctgctcatatgggcttcaggtccagcccaaaaacccctcccagaaggccagttcctgttgcagactgtgaaccaccccccgtggataggaacctcaagccagacagaaaaggtcaaagtcctaaaattttaagactcaaaccccatggtttagagcgaactgattcacaaaccataggtgactttgctacaagaagaaaggtcaagccagcgcctttagaaataaaacctttgccagaatgggaagaattacaagccccagttagatctcccatcactaggagttttgctcgagactcttccaggtttcccatgtccccccgaccagattcagtgcatagcacaacttcaagcagtgactcacacgacagtgaagagaattatgttcccatgaacccaaacctgtccagtgaagacccaaatctctttggcagtaacagtcttgatggaggaagcagccctatgatcaagcccaaaggagacaaacaggtggaatacttagatctcgacttagattctgggaaatccacaccaccacgtaagcaaaagagcagtagctcaggcagcagtgtagcagatgagagagtggattatgttgttgttgaccaacagaagaccttggctctaaagagtacccgggaagcctggacagatgggagacagtccacagaatcagaaacgccagcgaagagtgtgaaatgaaaatattgccttgccatttctgaacaaaagaaaactgaattgtaaagataaatcccttttgaagaatgacttgacacttccactctaggtagatcctcaaatgagtagagttgaagtcaaaggacctttctgacataatcaagcaatttagacttaagtggtgctttgtggtatctgaacaattcataacatgtaaataatgtgggaaaatagtattgtttagctcccagagaaacatttgttccacagttaacacactcgtagtattactgtatttatgcactttttcatctaaaacattgttctgggttttcccaatgtaccttaccataattcctttgggagttcttgttttttgtcacactactttatataacaatactaagtcaactaagctacttttagatttggaaattgctgtttacagtctaacaacattaaaatgagaggtagattcacaagttagctttctacctgaagcttcaggtgataaccattagcttatacttggactcatcatttgttgccttccaaaatgctgaggataatgtatgtactggtgtcaggacctagttctctggttaatgtacatttagtttttaatggtggaactttgttatattttgttaattacagtgtttttggttcattgagtgaagattctgccgggtgggatcttgcacctttgaaagactgaataattacactaccaagtaagcctgcaaatcattgatggcatgcagtgatgatgtgctcttacacttgttaacatgtattaagtgttatttgcaaaaggtagattatgtaaccaatcaggtacgtaccaggcagtgatgtgctaatacactgatcaggtttagacaatgagctttggttgtgttcttgttagtcctaatattggttttcagtttggaattaataaagcagttgacattcactgttagttacagcaacatactgtgatttttaattagatagtaattcagatttattactctatgaaattctgtcttttgacaccatagtgccctttctatgattttttttacttaatattcttcttggccttatatttaattccctatgcaattaatattttatatctgcattttttttaaaaaaatagatgttatataagtgattctcgtatgtagcacctgttgcttttccactgaaagaattacggattttgtactgtgatttatattcactgccccaattcaagaaatattggagccttgctacaatgtgaaatgttatagtcatggactccttccaaccagatttctgaaaacaccagagggatggtataattctgtctcacctataacatggtcctgtgacatagatattaagaccacaagttgtagtgaggctacaattatattcgtctgtcttggctttgcaacataatttagaaagcacgtatagttgttttttaaccaagttacatacaatctcatgtactgatttgagacttataacaatttttggagggggcatagagaaaggagtgcccacagttgaggcatgaccccctccattcagacctctaactgttgcctgagtacacagatgtgccctgatttctggcccattggccatagtactgtgcctaatcaatgtaataggtttattttcccaatcctcaaactaaaaatgttcataacaagatgaattgtagactagtaacatttgatgcttttaaatatttgcttctttttaaacaaaaactaaaacccagaagtgaatttttaggtggatttttaaataaaaaagattgattg

SEQ ID NO: 16822 - protein, 275 aa, Homo sapiens [sequence omitted]

SEQ ID NO: 16823 - DNA, 1783 bp, Homo sapiens
aatattgtatccgtgccatggctggggaccacagcttgcccgctacaccaaggaaggcttcctgcacttgggtgccctggggaccaccacactcctccctgacacccgctgcctggtggacaactccaagagtcggctgccccagctcctggactgcgacaaggtcaagagcagcctgtacaagcgctggaacttcatccagaatggagccatcatgaacaagggcacgggacgctgcctggaggtggagaaccggggcctggctggcatcgacctcatcctccgcagctgcacaggtcagaggtggaccattaagaactccatcaagtagagggagggagctggggcactggagcctggcccccaggacatggctgctccccccaacatctggaccagctgccctggcggagagacagcaaggggccggcaggtgctcgatgggccccccagggcttctccagggcagcacagggaccccggatgaagactctgtcccccctcaggcattcagctgcccacaagtttcctgcaccctggaaaagccccccacccttcctctgggaaactgacagctgtcttccacagcctctgatgtggacctggtactgaggagcaagactgtccagttctcctccacatctcccatcccagaatcaggatctgggactggcagggtcccctcctgtgtctcatctcttgcagcagcagctgctgaactccagccatcaacacggtgggaggcagcgggggcttcagccatgtcctagctccccgccctaaaaggaggcagtgaggaccaggcactatttcctccgaggttacttctacccagatgacacctgcctgttcacgccccaaggcagctactgcccctaacccttcccaccagggtagctttgggcactgcagctctggacttttctggcccctcctgagatgacctgatggagctgatgctttctctcctaatccctgggcactaggctcttatcagtgtgcttgggccagctctcctgcctgtgtctagaggaagccagagacagaaataggctaagcctgcagtaggatctcagccacaagggccccgcaggatggagctgggtcaaggaccagggagccctgactcccagaggctgccaccggggagaagcagcggtcctccatccagaacctaagggctgaagcaaaggctgccaggacccttgaagatgcttttggctcacctcatttcaccccacgctctgctggctggcagaggagaaggcagtcgtttcctctctgaagagtatttttttcgattgccctctggttagggtgcacatataaatcagagttaatatatgaacgcgtgtgcatgcacaattgtgtgtgtgcctgcgtgctgtgcgtggcagggtgtgtgtgtgtgtgtctggctgtgcgttccggagtgtgtgacgatgctgacctagctgtgtggccttgggcttgctgcttcattactcacctggatggggacgagggatgagaagggtgtgggtttggccccatgtcactggccggaaggatgtgtctcagccctgccctgtggggtgcccccgatgggaggctgtcccatctcccagtccccatctctttttccccacactgtccctggccaagccctgcccagagctgaaccctgtagctgcccccttgccctgtgtgggattcgcagtgtctcatttggtgacgtcttactggtgatcatctcctcaccccatctcccaccttgtggaataaatacatgttagcacttccc

SEQ ID NO: 16824 - DNA, 2489 bp, Homo sapiens
  CDS (24)..(2045)
attaccaggcacgcgcaggaaacatggcggcggcgggtgttgtgagcgggaagattatatatgaacaagaaggagtatatattcactcatcttgtggaaagaccaatgaccaagacggcttgatttcaggaatattacgtgttttagaaaaggatgccgaagtaatagtggactggggaccattggatgatgcattagattcctctagtattctctatgctagaaaggactccagttcagttgtagaatggactcaggccccaaaagaaagaggtcatcgaggatcagaacatctgaacagttacgaagcagaatgggacatggttaatacagtttcatttaaaaggaaaccacataccaatggagatgctccaagtcatagaaatgggaaaagcaaatggtcattcctgttcagtttgacagacctgaaatcaatcaagcaaaacaaagagggtatgggctggtcctatttggtattctgtctaaaggatgacgtcgttctccctgctctacactttcatcaaggagatagcaaactactgattgaatctcttgaaaaatatgtggtattgtgtgaatctccacaggataaaagaacacttcttgtgaattgtcagaataagagtctttcacagtcttttgaaaatcttcttgatgagccagcatatggtttaatacaaaaaattaaaaaggacccttatacggcaactatgataggattttccaaagtcacaaactacatttttgacagtttgagaggcagcgatccctctacacatcaacgaccaccttcagaaatggcagattttcttagtgatgctattccaggtctaaagataaatcaacaagaagaaccaggatttgaagtcatcacaagaattgatttgggggaacgccctgttgttcaaaggagagaaccggtatcactggaagaatggactaagaacattgattctgaaggaagaattttaaatgtagataatatgaagcagatgatatttagagggggacttagtcatgcattgagaaagcaagcatggaaatttcttctgggttattttccctgggacagtaccaaggaggaaagaacccaattacaaaagcaaaaaactgatgaatacttcagaatgaaactgcagtggaaatccatcagccaggaacaagagaaaagaaattcgaggttaagagattatagaagtcttatcgaaaaagatgttaacagaacagatcgaacaaacaagttttatgaaggccaagataatccagggttgattttacttcatgacattttgatgacctactgtatgtatgattttgatttaggatatgttcagggaatgagtgatttactttcccctcttttatatgtgatggaaaatgaagtggatgccttttggtgctttgcctcttacatggaccaaatgcatcagaattttgaagaacaaatgcaaggcatgaagacccagctaattcagctgagtaccttacttcgattgttagacagtggattttgcagttacttagaatctcaggactctggatacctttatttttgcttcaggtggcttttaatcagattcaaaagggaatttagttttctagatattcttcgattatgggaggtaatgtggaccgaactaccatgtacaaatttccatcttcttctctgttgtgctattctggaatcagaaaagcagcaaataatggaaaagcattatggcttcaatgaaatacttaagcatatcaatgaattgtccatgaaaattgatgtggaagatatactctgcaaggcagaagcaatttctctacagatggtaaaatgcaaggaattgccacaagcagtctgtgagatccttgggcttcaaggcggtgaagttacaacaccagattcagacgttggtgaagacgaaaatgttgtcatgactccttgtcctacatctgcatttcaaagtaatgccttgcctacactctctgccagtggagccagaaatgacagcccaacacagataccagtgtcctcagatgtctgcagattaacacctgcatgatcactgttcttgcttttttgggaagagacactttgttgcaaccctttttcaagtacttgaaagttgaaaatttgaaatcttggtattgatcatgctttaaggtttatgtaaagaaagtgtactgatgttcttacattaaagctttacaaagatttaaactaattatttttgtagttacttctaccaaatagcctttccttttcgataacattcctcagtatttttatagccaagtacattttattttcttgctgatgaactggaattggataaatattgcaagtggatgagttggaaattatgcactttgaaaaacattcactttgtttaagcttattgggtttcagatttgattaaattaaatgtggaggctttctatagcattctaagctgagaagtagattgttacccagtaatgaaataaaaaataaaaataaaagg

SEQ ID NO: 16825 - protein, 674 aa, Homo sapiens
MAAAGVVSGKIIYEQEGVYIHSSCGKTNDQDGLISGILRVLEKDAEVIVDWGPLDDALDSSSILYARKDSSSVVEWTQAPKERGHRGSEHLNSYEAEWDMVNTVSFKRKPHTNGDAPSHRNGKSKWSFLFSLTDLKSIKQNKEGMGWSYLVFCLKDDVVLPALHFHQGDSKLLIESLEKYVVLCESPQDKRTLLVNCQNKSLSQSFENLLDEPAYGLIQKIKKDPYTATMIGFSKVTNYIFDSLRGSDPSTHQRPPSEMADFLSDAIPGLKINQQEEPGFEVITRIDLGERPVVQRREPVSLEEWTKNIDSEGRILNVDNMKQMIFRGGLSHALRKQAWKFLLGYFPWDSTKEERTQLQKQKTDEYFRMKLQWKSISQEQEKRNSRLRDYRSLIEKDVNRTDRTNKFYEGQDNPGLILLHDILMTYCMYDFDLGYVQGMSDLLSPLLYVMENEVDAFWCFASYMDQMHQNFEEQMQGMKTQLIQLSTLLRLLDSGFCSYLESQDSGYLYFCFRWLLIRFKREFSFLDILRLWEVMWTELPCTNFHLLLCCAILESEKQQIMEKHYGFNEILKHINELSMKIDVEDILCKAEAISLQMVKCKELPQAVCEILGLQGGEVTTPDSDVGEDENVVMTPCPTSAFQSNALPTLSASGARNDSPTQIPVSSDVCRLTPA

SEQ ID NO: 16826 - DNA, 1821 bp, Homo sapiens
agtgacgattaattaaatagatatatacgtttgtcaaatcctcaagcaaaacactaagacccaggcacatagaccaatggaacagaatagagaacccagaaataaagccaaatacagccaactgatctttgacaaagcaaacaaaaacataaagtgggaaaaggacacccttctcaacaaatggtgctgggataactagcaagccacatgtagaagaatgaaattggatccacatcactcaccttatacaaaaatcaactcaacatatatcagagacttaaatctaagacctaaaatcataaaaattctagaagataacattggaaaaacttctggacattggcctaggcaaagactttatgaccaataatccaaaagtgaatgcaacaaagataaatagatggaacttagtcaaattaaaaagtttctgcacagcaaaagaaataacagagtaaacagacaacccagagagtaggagaaaatattcgcaaactatgcatctggcaaaggactaatatccagaatctacaaggaactcaaacagatcaggaagaaaaaaaaacaaaaacaaaaacaaataatcccatcaaaaagtgggctaaggacatgaatagacaattatcaaaagaagataatgataataaaataaatggttggccgggcgcggtggctcacacctgtaatcccagcattttgggaggccaaggcaggtggatcacgaggtcaggagagtgagaccatcctggctaacacagtgaaaccccgtctctactaaaaatacaaaaaaaattagctgggcgtggtggcaggtgcctgtagtcccagctactggggaggctgaggcaggagagtggcgtgaacccggcaggtggagcttgcagtgagccaagatcgcgccactgcactccagcctggacaacagagcgagactccatctcaaaaagaaaaaaaaaaaaaaggccaacaaacatgaaaaaatgctcaacatcactaattatcagggaaatgcaaatcaaaaccacaatgcaataataccaccttactcctgcaagaatggccatattaaaaaaaaaaaaaatagatgttgatgtggatatggtggaaagggaacacttttacactgctggtgggaatgtaaactagtacaaccactatggaaaacagaatagagatgccgtaaagaactgaaagtagatccaccatttgattcagcagtcccactcctgggtatttactcagaggaaaagaagtcattatatgaaaaagacacatgcacacacatgtttatagcagcacaatttgcaattgcaaaaatggaactagcccaaatgcccatcaatcaacaagcaaataaagaaaacgtggcatatatatactgtggaatgctactcagccataaaaaggaacgaaataatggcattcacagcaatctagatggagttggaaaccattatgctaaatgaagagactcaggaatgaaaaaccaagctggtggcaagcacctgtaatcccagctactcgggaggctgaggcagagaattgcttgaacctgggaggtgaggttacagtgagccgagatcacgccactgcactccagcctgggtgacagagcgagactccgtctcaaaaagaaagaatgatacagtggactttggggcttcaaggggaagggtgggaggggtgtgaaggataaaagactacacattggatatagtgtacactgcttgggtgatgggtgcaccaaaatctcagaaatcaccactgaagaagttatccatgtaaccaaacacaccacctgttccccaaaaacctgttgaaatt

SEQ ID NO: 16827 - DNA, 1851 bp, Homo sapiens
taatgtggtaccatatattctttcttttaaggaccttaagaatctgggaagaattagccacactctaatttaggaacagagatggatgaatccacctatggacatttactggtatgagtcactggggaagttcactaagtcactatttaagatgatccagaacaggtgtctacagctgccttaagaatgagtactatggtggtgatgaaaatgttcctctcagatgtccaactgcagggggtgggtatgaaattgccagatggccccagctggtgtgctctggaatccttggcgccaaggccatgctgccaggggcttctccaggctggtgatcaaatgtagtgaggatcctaaggcaggcccattcctggaagacatgggactctcccgataggtgagtttggctcaaggactcctcatggtcctgaaagaaactctctgagacctgtacttcagtggaagcctgtctttcctttgctgtctccttcccaagggttaaacctacattgcagtctaatggtggctctcccggccttctctggctccctcgacattttctctcacaggcatttcctttaataaatctctcgcatatctgatcctgtcttggcttttgcttcttggaggacccagaataacacaagtactgtcataattatatctcctcactttaaatctctcaagtgtaattactaaaattgtgttgtagtggaagtaaaaagcaaggttactaacttgagagtatctatgaaacactcacccattaagtttcattctttagtacatttataataacttttattccaattgtagcatggtctatctccaagggcaaggtcctgcctgcgtcttcattgaaaacagtggaactttgaagcaatgggggagtttgttgcttctcttgacaagcggccagccctaattcagagttataaaagttttcatattctgcttttggcatatctgtaaaatatacttgggcatacatttttttttctgtttggatcataagtgtgtgaaacatacgtggtaagagccagttatattccaatcacagaggatgtcttggaacacatcactgccactccagaggtactgaaactttcttcctctagtaaggaacatggctggggtgggggtgagaagagatattcttacatttataaactgtttctcccaccaccagaccagacataaagtttgattttgtcctgaagatttcagttgtcttggagccagtggaactgagttagcccaagaatgagagtggatgtcctttttctctttctgcctttgaaatatcaggttcattggacaggtgctcagtagatccaattttctttaattgcacctacatcagtgtaatataaatgtcttcattcacaatcccacaagggttgtagatatcaatatgccgggggatagtgtatgggaattgagggtcatagtaggtcaatactatataagaaaattcctacagagagtgagtcaaaatccctactcctatgggaccagcgactattattgtctatttatttacttatttgaaaatgtaaacaattatttcccagtggactaattacaaagttcctgtgacatcaagatcattccttctcaaggcttttcactatatattgagacgtgtagtcttaatttcattttggtttgccccaagacttccaccaagtctaggggatctgtacggaactatcctttcccaaggtacatcatgcatactttctgctattattttttttttcagtctgtcccttgtggtcaatcaagagaaatgcagacttgaatctctataagaagagcaaaggttctccctttttaaacctttgaactgag

SEQ ID NO: 16828 - DNA, 2708 bp, Homo sapiens
cgcatggtgcgccgcacccactgtcccgcacccactgtccggcactgcccagtgagatgaacccggtacctcagttggaaatgcagaaatcacccatcttctgcgacactcatgctgggagctatagactggagctgttcctattcggccatcttggctccaccctcatgagacttattcacaatcatgagaacagcacaggaaatacccgccttcatgattcagtcacctcccacggggttccttctgcgacacgtggggattattacagttcaaggtgatatttgggttcagacacagagccaaaccatatcagctaggaaatgaccgtagagatgaaaagatattgatgatataaataatttcaataaatatatagggttggtttgatcagcttgaattttaattgttgaagatcacaaaggttacagacagcatttttgagagttaaagtgacatttttcagagattaccatgaacagtaacaactgtgaatagccaaaattaagctgaaacataagatttgtgttgggttctaagatagttagtgctgcaaagtcatgttgaggtgatgatctcagggatttttaggtgtatcctctgtgtatcttcaggcctgcctcttacttcgttggttccctaattgccattcatcctgcctgtatcagggaccactttacccgtcttctctgaagttcttggttattttatctgaagtttgtttttttttttttttttttttttggtaaatttctgtgattattctgatttaccacatttggctttgaaatactgtatttaaatgttgagaatgtcatgccttaggaattcatagctagtctaaactaaataatgaaggaggaatatactgggaaaatccagccaacttaagtggctccattacgtcttccagtttaattctttattactttctgagaccaattccttttggggatttggtttggtacagaggattagcttacttatctctgtatttttaatttaattttattttattttaagacgtagtctcgtggtgtcggccaggctagagtgcagtggcatgatgatcttggctcactgcaacctccacctcctgggttcaaactattctcctgcctcagcctctcgagtagctgggattactgggataattttttctatttttagtagagacagggtttcatcatgttggccaggctggtcttgaactcctgacctcgtgatccacccgccttgggctcccaaaatgctggaattacaggcgtgagccaccgcacctagccaggagcattcttcttactattgctgttctgctccttgacagattcacttagtgacagttgccactgccgcatcttagtcaagaaccttgtttctctctgggctatgacaatggtcttgctcactttctggctttcccaccccactccagtttggaaaatgctgtcactcttagaccattaggccaattaatccttcatcccctcacttaataacttttagttgcccttgtgggaggaagctcatattcttcagttttgcttttcaagttttccccaggttgaccccaaacttcctttccaacctcgacttttgctccgcctgactttaaaactgaacattagctgggatggttaatccactgttgcccaaaatgtttttcattgcctctttcttattctagcacattctgtggcctaaaatgtcctcttccttcctctgcctctatcctatcatcgaagcctcagttcagctctcaactcttctgaaaaatttaacttgatcacattagcctttagaaattctttataatccaaagttctctggcaaaattgcctccatctctcatttcattcaacattcattcattcattctacaaaggccacttgtcatagattgtcttgtattatcacctacgattgaagtgtttttttctttctgtttaattgcaaagaatagaaattcactcaagcttgtttgcataaagggaggtgaattgaagagatgtcccaggatgtcttgtcatcaagccacatttcccaagagttccagtgaatgggacccttccagttatcactcaccctggacctgcttagtgcaggagagggttgggggcacagttccttccaagggggcctgtggctggctgatgtagcagttgtgacctgcaattagcctacaatgggggcaaaatcatgtaacaaaaagcctattttgtattaaagcatcaaatatctcatgtagtttattgaatactgtattgaaagtgaaaaacagattggttgtataggcactcaaagagatctcagttctcttgcaagctccttaaagatgactggatgaggctttacaccattgtgtgtttgccaccgtgtttgtacacaggaagggctcaataaacaaatcattggtgactctttgacaacacagaaaacgattttgacttacagtgatttaaaggaattttagacccttttagcttgaagtcttaaaggaagttaagaagatagaaacttatttttaagagcttcccctacttgcattaataatgattaaatgttgaatcaaattagaatgaccaggctgcagtgcgtataccaatgtttgggaggtgaatgttctcaatgagggtcatgattctaacaaaattagttgttactcaaagcctgtttttcaacttccatttgcctcctactttgcccac

SEQ ID NO: 16829 - DNA, 1805 bp, Homo sapiens
ctgctagcttgaagtacaagaaaatattagtattctactatttatcttgcattaaaacactttaacattgaaaacgtgggactaatcaaaacaatacagttttttcttggttgctggctgacttgacccaagtcactgctcaaactctgttttcataatatgatggttttggtgtactcttcagaagacaaatgtctgacttgcgggaaaaaaacaaacgtttagccatttgcaaacaaattgtctctttgcaattgtctaatatatgcacagcagccagtagaattcccctttttatttttttttccccgcagaccatcttgattcaaaacatctatcgtaatccccaaaacagtgcacagacggctgacggctcacactgtaagtcccacagttggagaaatttttttaaaacaatggtgttaaagagcccactcttaattgagacaaataatgttggcttctgagctgctgacatagagctgttgcaaacaggacaaggtgctggaactccttggcgcacacagcaagaacttgatacttggccacgttcaggaggcttatcccttctagggagggtcactggcccggccacctccattgattgacatttgtcatgagagcaggtccgtccatgtgaaacggatttcaacattttgagccattcattggtctttacagtgactgaacccctggcctttattaagttctttgtgtaaaattaaaactcttaggaatattaaggaatcaataaggtaagttgcccagtaagtgtgggttttatttcaccattataatttttcctccaggaagtggagatttcatgatatgtaacaattgtatttctctaatacagtaattttttccatcagtttatgtaagcattattctttccgagttcattaaaaattttctgccacatccaagaacattttggtgctagcctggcaaactatttgtgcttttacctgaattggaattttgaaaaggagagttttcacgttctgtaagcagaagtacaagatgggcatatcatgagacctccgttacaccgcagtgttagggattcaaggcagccgccaactgagaaaacgcctctgcttctccagaaaataacttgctctcttttcagcactgaatctcaactgaagcacttgccagaggcagccggttaagtgtttacctttaattttccataatataaagttgttgcgttttgtatttcagaccattgccctcttgaacatttaccgtaaccctcaaaactcttcccagtctgctgacggtttgcgctgtaagttcatacaagttccttccccggttccctgggcttgcgtgtcagagctcagtgtccactccatctggtctgccgtgctagtgtcaaggaccgcgtttcactagaggtggcaaggagctttcgtcccactgaccccatggaaacctcttttggagatttgaactcccaccgtgtgttaaaagggaaaaagtaactggaaagggtgccctttaaaacagtctagagctgggccgggcgcggtggctcacgcctgtaatcccagcactttgggaggccgaggcgggtggatcatgaggtcaggagttcaagaccaatctggccaacatggtgaaaccccatctctactaaagatacaaaaattagctgggcgtggtggcagatgcctgcaatcccagcttctagggaggctgaggcagagaatcgcttgaacccgggaggcggaggttgcagtgaactgagatcgtgccgctgcactccagcctgggcgacagagtgagactccgtctcc

SEQ ID NO: 16830 - DNA, 2418 bp, Homo sapiens
tattctgccttctggaaaattgccttaactttaacttcaaacatttgttgatttttttttttttcagttcttattctctggtcttattggttcctctgcataaggatgcagtcttttatctttacagtttctttgacattttcctctgtcccatcattctctgtttctcaccacttctgtttcattttggtctcaatctttaatattggagacattcctcaaatgcatgaagatcctcagtggtcatttatatttaaaagatgtgaaaagctgaccgaaagctctgggtgtgaagtcagagctcttgtctattggtaaactatgctgtaggaaatcttcatatcacaatttttctttaggttagttttgttttctctagttttgaatcctttccagaggaaatctatagtcttctctgtgggggctgcttatgttttagagaaatactgaagaaagggactttgggtctctttagagttgcacataatcttctggttttagtcatatctacttctgtatctattgaagtccaaagcatcttgagtttagtttttccagaaattatgccttctgatttctgcatgattgggaagtcactgagtacaccaactggagttggagacctggaattccagtagttccaggaacctcctagtcctgaacttaatggggtttcatgagaattgactggcttctttaggcacttaaatttaacattcctcacctctggtgaggtttttgtttgttgtttgttttttctccctgtctttgtatattatggtttagggttacagtttcccagcttcatcaaaaaaagagtttttctcattctccttgtttagaaatgattggtgacacaaaggtctgtactctgatattttaagatccgaagtgtattctaccccttttttataaactattttgcagctgttccttcacgactttgctacatcttggagatcttttcatgtcagtacctacaagtctatatcattgatattatcagctatatagtactccataaaatgctttattataatttacgtaatcatcttcctattgatgaagattttggtggtttctagtttttgctttcatgaatattgttgcaatgaatattgtttggcttacttttgggtgaatttttacaaagacatccatataataagttcccagtagtggggttgcctaatctaagaataagtgtatttaaaatttgaatcatattgtcagactgtctcccagaaagtttacattcctaccaacaatctgagagagctgtctttgcagttactaggtttcatcaaacttgtttttttcagtatggtaggtttaaaaatggggatacatttttgtttttatttgcatttttaaatattttcttaggttagttggctacttaaatttctttttctgaaaactttgtatttatagccttttaaaattcttattgacttgcctgaactatttgtaaattacagaaattagccctttgtcgtatgtgttgcaggtgcttttccagtttgccagtggtcattcattttggtttatggtacttttgatagaccagaatctttgacttttatttagtgagatttatccatctttttctgtgtggcatcttggtattatagcattaatattctcttttcttttttttttttttttgagatggagtctcactctgtcgcccaggctggcgtgcagtggcctggtctccactcactgcaacctccgcctcctcgtttcaagtgattctcctgcctcagcctcctgagtagctgggattacaggcatctgccaccatacccagctaatttttgaatttttagtagagatggggtttcatcatgttggtcaggctggtctcaaactcctgatctcaggtgatccgcccgccttggcctcccaaagtgctggaattacaggcatgagccaccacgcccaggctatagtttttctttatctgaacaataactaattataaagtatagtggaagagaaaaacccattcagaaaattaacaaaaagatcacttatctagaaataaacttaaaccatagcagagcttacatgaagaaatcttttaaaactgagcaaggatttgttggacaggacacagcactaatctcaaaagaaaatttgatgaataggtcttattcatagtttttgctcatcaaaagacagcattaagaaaatgaatagacaagccacagaatgagttaaaaaaacagaaattcccagcatttacaagggattaaagatgtgtatcagaatatataaagaacctctgaaggccaggtgtggtggtttacacctttaatcccagtgctctgggaggccaaggtgggaggatcatttaaagctaggagttcaagaccagcctggtaacatagtgaaacaagattctgtctttac

SEQ ID NO: 16831 - DNA, 1446 bp, Homo sapiens
cggtttccatttcagtttgtcttagagtttccatgtctctgcctacagtgggcatcagtttttgaatgtcgtgtagttttttccattaaagcccttagcacattaattatagttactaaattctcacagtgatgattccaaaatctctgccatatatgagtctggttttgatgcccgcgttgtcttttcagactctgttttttgcctttagcatgccttgtaattttttttttttttttgataagctggatgtgacataaggggtaaaaagaactgagataaacaggcctttagtgtggcctagaggcctatctggctaggagttaggctgtgtttactgtttgatgtagctttggtgtcagagattaaaatttcctctcgtgtaactgcttttgtctcctttgttgtctttgggtttccctaataactccttcataagtaggttccgaggcttgtagttatttaagctgtaagtccctgttattacacaggagccctattgatgtggtgtgtgtgtgtgtaaaagtgttctataatcttatgattagctcttagtgagcctgtgtctttggactgtgaccttcatgagtgctttttagctcctgcaacctttacctcccaatacttaagtgagaaagtaggaaggctgggaggcggctggagttttgtatttctcttcccacaagttggttagttggtggataacaaactggaatgtgaaacctcggatgaggggaggctactgtagtttcttttgaggacaggtctttgttattgagaacagagatcgctgggcaatttcagaatggttattttttctctcctattggaagctagagggaatttttctttgatcttcacttgtgaatctctgatggggcacctggaggtaaaactcaggaaagtttcctctgtctctcccccagccagactgcccatcccctgagcttttaattctcaagctagtccacgttgaacctccagcaatttacattacagtgttcctatggatactggctccagctgtttgtttctcttgctggggtttgtgatacccgtagctgtggttttctgtagtcacatctctctccagttttgggagcagcagtttgccctgaacctcaattctctattgggtctaagaagagttaactgattttcggccgggcacggtggctcacgccagtaatcccagcgctttgggaggccgaggtgggcggatcaccaggtcaggagatccagaatatcctggctaacatggtgaggcactgtctctactaaaaatacaaaaaaattagctgggcgtggtggcgggcacctgtattcccagctgcttgggagacagagccaggagaatggcgtgaacctgggaggcggagcttgcagtgagccgagatcctgccactgcattcctgcctgggcgacaaagccagactccgtcccagg

SEQ ID NO: 16832 - DNA, 1820 bp, Homo sapiens
ttgatacttattttggggcccctgtgatgaggcactatcttggctacccggtggctgtaacatggacctgccaaaaagaacctcatagtttagtggggaagacatacccaagaggacaatttagaactctgtgcaaagtaaagtattctagttttgcacaagatttcgaaggcaaaacttggcagattttgtcaatactaattaggtgaatcctttaaaacttcatagacaggagtaatggtttgttttgcggttttgttttgttttttatacatcgtttgatggcagatcattctgaaagtcgttgttgtgtatcattgcatgtctggtgtcatgagataggcagaactgtggggtagtagattaattttctatggtatggtgtgtgactgttcttcaaagacagcttctttctgcctcccttatctctggtccttaagatggcaataaactctggggcctaagataactccagttcttctctggggctatcaacactgtctttggtttctaatactgcagtcatgaccagttttctgtatccttttcacttactgttacccactttgccttgtcttcaccctgtcaaaacaccggtctccctttcagcagtcagtctcattcccttttgactttacagtctcttatttggcaatctcatccagtttcttgcccacagttactgctatcctcccccagaccttgaacatcagtcttacagttatccttttcataggaaaacagaaattaaagacttttaacttacttgttcgttgtattctgggaaagggaaacaggataaaatttaggcattagttaaattgaagggattggttaaagtccctaacttataggcaccccagagaggacagatgtatggaaaggatcagaaaagattaaataatattatttaaaaacaaatatgaaaatgctgcaactcaacactacttttattatgattgctgttaatctgcagagagactgaattatatgactgcttattaatgcaattaactactttaagaaagaagaatatatagaatatcagatctataccaggaataggagatggaaattttttattaaaaaagaaaaatcagatctaagtgcaacttggtgggaggtagagaggccaatgtagagaaaggggcatccttcacgcaataaaggaaaggatccaacagaaaattcattaaggaatctttacaagggtctctgcgataggtcttcaaatacatcaatataaactagagaaccatacccatcccctagagagatgtttcagaaagataatatcaggtgaaaaaggtagccaaaagatgaaattattttccatggtcttagaaaaggattcagaagattcacttaaattattttttgaaacagacataagaaggtattaaatagttttttgtacgtaaaagtcaatgataaatggtgagagttagaaagggagcatagataaaattcttcacacttttgcagggcttttgacaagttccacatacaaaaggtgcttttaaaaaattaaagtattgtgggccgggcgtggtggctcacgcctgtaatcctagcactttgggaggccgaggcgggcagatcacgaggtcaggagatcaagaccatcctggctaacactatgagacctcgtctctactaaaaatacaaaaaattagccagtcatggtggcgggtgcctatagtcccagctactcgggagactgaggcaggaaaatgggtgaaccccggaggcggagcttgcagtgagctgagattgcgccactgcactccagcctgggcaacagagtaagattccatctc

SEQ ID NO: 16833 - DNA, 2055 bp, Homo sapiens
ttttttaaaaccagtaacaaaggagaatagtatccttaacaggataaaattatctatgtcatgtcaacagaaggaatcatactgaattgtgaaatattggaatcatctcccctaagatcaggaagaaaacaaagatggctgctatcaccattattatttaatgttcttctagaagttttggacaatgtcatattatatgacttagaaataagaattataactatctgaaaggaagaaatgaaattatcactatttggaaatgatagaattatctacctagacaaaaggtttaattaaaaaacatttggaattaataagaaaatttagcagaagatctagttaaaagataaacatcccaaagccaaaaattgtgttatataatcatctccaataagaagctgtgacagaaaaaagatctcattcaggagagcaataaaaaacagaatatctagaaataaccttaaaataatttgacagtaatttgatggaaagacctactgtgaagtgggtgttctgaattatgagagttatatgaataggaaggaatggcatctaatggtatcaccccttaaatatttctgtcaaatcataacctagaagttatctcttactcttctttcatgtttcatatctaatcatccactaagttccccgagtccaccttttcattagcatgcaaattaattcctatcctaccctatgtttccttcaattttagacctttattatttctaacctagactttgtaacctctttactcccagtctttcccaatcatctatcccttcattacactactgccagagtgatctttctgaaataacaactattgctcctttgttaacataccttcattgactccctctcaccagctgtataaagtccactctcctcacccgcatcccgtttttcacacttgggcacaccctgctccagctctgtgttctagctgggttgccatgcttacagtttaccaaggtgctgtgctttaccagtgcctcagtactgcagtgtcagtgcagggccattgcgtcttctggtttctctacaggacactctccatctaaatggcttcacagtgtggaaaactccagctcttctttacattcagtttaggcattggatcacttggaaaaccattccacacactttcttgcagttagggacttaccttccctgtttcctgagaagctttgtatacttctgccacagtacttatcacattatactgtagctactagtgacccccactagagtgtaaagctcgttgcatctctagcatgtagctcagtggctggctctttgttatttgttgaaatgtatatttttaacaaatttgatactcatgaagttctgtgtttctgagataattttatagttacacagctgttttctgggacagttactttaaaatttcctggttttttcttttgcatattggaactaagcaatgactggatataaagtatcactatacacatatttgatgtcaccactaaagtttgaccaatgtttaatggtttttcaggaataaaaataaagtcctatgaattaggatataaattgtgtttatgttgccactgcttaccatttctttgttagatgttatgcctagattaatgtcattagcttatatgctgaaaatgtaatcacataatgtttttaaaatagtaaatgacacaattattatatatatgtaaaattcagatccattcaaaaaatatccatgttcttttatatgcttaggactcaacttggtgctattgtatttagctattgtaaaatagctcagcctttaagaagtttgtatataaggtaagacctgcttatataacagccaatttaagattaaaaatagcagtctaagctgagtatagtggcacatgcctatagtcccagctactcaggaggctaaggcaggaggattgcttgagctaagagtttaaggctacagtgagctgtgattgtaactgagaatagccactgtactccagcctgggtaacacagagagaccatgcctcagtgtaaaaaacaaacaaacaaacaacaacaac

SEQ ID NO: 16834 - DNA, 1600 bp, Homo sapiens
aatagggtagagacaagtttgagtgtcgttgcactcacgtggtgagctgcatgtgtcgtgggctgagtgctagtattggtctgtgatggattgggatcagacccttgtccatgaccataaaatcttgagcaatattgcagcaagccaaatggcaaagatgactatgtgccccaagaccacacttttttttcctatagtttttttaagagagacacggcctcgctctgttgcccaggctggtcttgaactcctaggctcaagcaatcctcccatctcggcttcccagagtgctgggattacaagcataagccactgtgccaagcctccctaaatgtttaaatcttgtcattgccaccattctgcaagatttacctttgaatctagaaaagaacttggagtctttctactaggcctatccccacaccacttcccatcatagaggtgaagaacctgaggccgggacacaccacaggactctcagaatgacacagccagtcagattttcctggcacaaaacccagtgttctttcaaagccaccattcttttcctgtaactaatgcaaaagcaaatcttagcccatgacagggaatcacagattccaaatgagtgccctcagaatgactggtttccttgaaagcagctgtttcataaacatgactttgcgggggcagctcaggccttccatgcagtggagtctgctggtcttggggctgctctgttaagcaaaggatgggaaccaaaggtactgacattttaatattagccacacagatgtcttggcttgtaatctggagaaaatcagtcagtgtcccagctgaatctgtaaataggaacgacaataagatttgctctctctcgggacatcctaagaatttttgtcaggctagaagaggcagcctggagagatttgtttgatctgggaaagcagaagtcaaacttggtttttcattcggtaagatccactgtggttaaaatgtggtcagagggctcattcagcctcctacttcaggtcgaactatacttaccttctcttacttttaaagaaggaagggagattctgtaaatgagtggcttttcttttagtcagtgctgtcatatgccatgacaatattgtatttaagtctgttctcacagtgctaataaagacatacctgagactgggtaatttataatggaaggaggtttaattgactcacagtttagcatggctggggaggtttcaggaaacttacaatcatggcagaaggggaagcaaacacatccttctttacatggcagcagcaaggagaagcgctgagcataaggggggaaaatctccttgtgattcatgcctgtaatcccagcactttaggaggttgagttgggtggatcgcttgaggtcaggagtttgagaccagcttggccaacatggtgaaaccccgtctctactaaaaatacaaaaaattagctgggcatggtggcaggcacctgtaatcccagctacttgggaggctgaggcaggagaactgctcgaacctgggaggcggaagttgcagtgagccgagatcacaccattgcactccagcctgggcaacaagagtgaaactccgtctcaaaaag

SEQ ID NO: 16835 - DNA, 2113 bp, Homo sapiens
tttatgcatcatggtttgatatatgcttgaaatatttactaaattagatattgctgcatgtggtccatcccacatataaatggaaaagagaaacttaacatagttcataaattaaaatatttggtttcagctgtattcatattgaaaccataaaagaatcagaattactgtgggtttatgattgtcaggttaccaccatcactacaaattttctgataacaacatattagtattctgataaggtttgtggcttctttgcaaggatatttgaatactactcaacacactacataatggttaactattgttgtctttattttaaggaaggcatgaatattgttagatttgcccctaagtaattgagtgatcatttttatatacaagaaaatcagagtagaatgcaaaatttggaacaggaactcaataatacttataaataagttgattcaaagaaatgtttcaatttcttgacattgaattcatgatgttttgcttttaacatgtgatttttaaaaaatactgttatgtgtacaggggaaggctaacctgagactttcccttcatgcgtattcttcctgtgcactgcaaaaggaaactgtgtgactgctttccttcctgactggccatcacatagggttactggcagatgccaggaatccaaggactaaaggaataaagggtgtgtgttatagtacctgcgctaagagatactgtcaaactcagaggcacccctcctcctccatgtcttaaccctagaattgttttagaacttcttatggataagtgtttggattaagggagatctgggaaatgggatttgaattttaagcaagtgagccctggggatggctagctgcccaaagtctctaggaccccaaagagattatgagagagaacgttgagaggtctggaatgaattatacatactcttatgatgaaccttctccaacttgtccttgagcagctgtctccatcccatccctcaagtgctttggaacccacatcttataacaatggaaagatagataaccttttattttaatgtgtttatttttattttaatgtatttaagtagtttaaacactttcagcgaaaacgcattgtatttctcactccattcctcaatccagatgtataactaaagtaccatagtgctgtccattattagcccattttgtgttttaacctatacagtttgaggaacaagaaacctacctgacatcaagattatactatcagtgaagccagagaagctatacttattcattgtagacattcttatctttttaaattttttatattaaaaaaaaaaaaaaggctgggcattgtgtatcacgcctgtaatcccagtgctttgggaggccgaggtgggtggatcacgaacgaggtcaggagttcaagaccagcctggccaagatggtgaaaccccatctctactaaaaatacaaaaattagccgggtgcagtggcaggtgcctgtaatcccagctactcggagggctgacgcaggagaatcacttgaactcaggggtcggaggttgcagtgagccaagatcacgccactgcactctagcctgagtgacagagtgagactctgtctcaaaagaaaaaaaggaaaaataatggggtctcactatgttgcccaggctggtctcaaactcctggactcaagcaatccttgcatctcgtcctcccaaagtgctgagattacaggcatgggccattgtacccggctatcttatcttctttatatagatatctaataagatgtaaaatactgacctgcattatctccatgttaacatttacacttcaaaatctgtaaacggacccacgttcatacgcgtgaacagaaatctttcagcaacaaaagagaaaattgtatttctcgatagaaaggaagtggtcagatcatgccagccaaacaaatctgtcaggctttgaaatatagaaccgttaggtaagatactgagataaaggataaagtaagatcagcctaaatgtttcagtctagttaagttgattcgtatattacttagaaatttcattttcagggaaatagttttcagatttaaataactgtaaagagctgagttattctttgacttggattt

SEQ ID NO: 16836 - DNA, 1956 bp, Homo sapiens
gtaccagccccaaaccctgccagcagtatgggggaggatgcatttctccacaccttgctgaaggatggggacttggcagagttcagtgatgttttagggttggaacattgattcctttctctctctcttttttcccttttctccttgtgcctctcttcctgtgggtgcctgagaaaatactcagcctgtatgactgtggcctgagtcgagaaggagtgctagctctgagaagaaaaggtttatttccactctcatgtgactatccatctatccatctctccatccatcagcccattggacaatatgtacccagttcctatatccagctagctactgtaccaggtgccaggcatttcgggaagaataagacagacaaggttgtcgtcctcatccttctgctctaccaggaacaagtgaagtgataggaagagcttttcctcaaatagctctgagttgtcccaagtccagcctccagatcagagaccgtggttagggccctggaggatgcccacagcacctcccatgtttgcatgctaactggaggctgcctcttcaggtgtgaggaggcaactgtgcaggtggggcagggctgcctttcatccccctcctttcttctccagggatctggtatgctgagtttgcttttgaaatggaggtcctggccagaggtagcctggtaaatacagttcttaatctaaaaaaacaaaactcagtggggagagagtatggggaagaaggaagcattctccttacctgtggactagacagggagtgctgagagacggagcctggggaaagtcccattggtgtgagcttagagttccaggagagattagccacagccggatgctgacaagggtgccagattgtttcattatggaatggttagttatcacctcagcctcccaaagtgctgggattacaggtatgagccaccatgcttgacatggttcattttaaaagattacatctgggtctgtagacctcctcccatataacttggattttgtggacctgtatgatggcctgcagcacagcactgccagcctcagagaaggctggggtgtcagttcatgagtcaccccagagtcaacacaagtcagccccaccagccgcacagtgtgcctgctgtctattgcaaggtgaatgcaagatgattttttaaacaaatttgtctccctgtggctggtcacttggaggccttttttttttttaaaacatgtatttacatcctattgatgtatcaccatcctgttggtaactttaaaaattttgtgtatgtaaaattgcctatctactaatttgacaacaataccccggaggtggaactcatccccaacttttggcctggctgtgagacatccctccttgttatgtcttactttgttgctgttgcttttgtttctccccacacccgtgcccccatgggggtccttggccagctctactccgactgcagttgtagaactgggcagagaaggtatgacaccccctcccccattatacctcagaaagaactagaagtatgataaatgagtacgactgggaatttgttttttccactatctctaggatgttcatgttttgtagaatccatatccttaattctttttgtgtgaaaatgtagagcatacctagttctcagacccaattccatagattagaaagaagttttggccgggcacggtggctgatgcctgtaatcccagcacttcgggaagctgaggcgggtggatcacctgaggtcgggagtttaagaccagcctggccaacatggcaaaaccccgtctctactaaaaatacaaaaattagccaggtgtggtggcgcacacctgtagtcccacctacttgggaggttgaggcaggagaatcacttgaacccgggaggcggaggttgcagtgagccaagatcgtgccactgtactccagcctgggcaacagagtgagactccattt

SEQ ID NO: 16837 - DNA, 2713 bp, Homo sapiens
aaaaaatacaagctaagcaacttgtcctctgttgtttcctaccactaagtttgcattagaagagactggcagtcaaacacacaagaagaaacacaagtattggcaatttaacagaaacaaatggtagtgtatcatggacatctaaggtttgtagggctaaatcataccctcttctagtaagtcctgaaaaaaatgtatttaaaacatatgttgaagaaaatagcttttagaggggcagataataggctttggacttagaaattttataaaaatccattgtgcattctttaggcttctagtcctattcagtttttgctatgagctatgatttgtttgtggaagcaaagtaaaggcagcctatttcttaccgcctccacttcggctgggtcataccagacgttgatgtagggatgctgtaaggcgtcgtccactgatattctttttgctgggtcaatcactagcatctttgacaacaagtccctggcttggctggctgaaacaataaatgagaaaaacaattagtaagattttgatttcagtaaggaaatttgtcagagaggaaatttaagaaaacaaagtatggaatagtatcttccttccaaacatcaggtaaatcccttgatgtgatggaaaagaaaatgcattttacacctgtttctttgtgtctctaagcctaaggcttcattctgaggctctccaagggttgtaacactttgggtatataattattcacgcaaacttcttagtaaaatgtatcgacctggagagtttatgtaagcaaagtcatcttctttggtaacctgcatgaatataggataaacagaataaagagcacagagtgcaaatgcatgatgttcaacaaatgtgtggacggctgtttgaagttaatcaacacgtgtgtctctatattcttatttatacaacggaattatcagaattttagtatataaattgacttaagagtttgtatcatacaaatttttcttttctttttgtttttgtttatttatttatttatttatttttgagacagggtatccctctgttgccaggctggagtgtagtggaatgatcacagctcactgcagcctggaactcctgcgctcaaaggatcctcccacctcagcctcccaaaatgctgggattaaaggagtgagccactgctcccagccacaaatttcttatatacataaaaacaatcaaagaattgaagtgatagaaataatatcattcaactactgaattttattttaacattctgtaatcatcaggtatttttaatcaatggaatcatgacttgatgaaatccagtagttaaagactgaagccagtctaatgctacaccagacactaatgagaaactctatattatgtaaaggttatcataattaattttatggttgtgggcagtaacagttataaaattatatggtgatagctatttatttagtaagattgttaaaagacacattaattttaacctctaaaaatatgtaaattttttaaattattatactttaagttctgggatacatgtgcacaacatgcaggtttgttacataggtatacacatgccatagtggtttgctgcacccaccaacctgtcatctacattaggtatttctcctaaagctatccctcccctagtcttttacataaagttttaacagaaatgaatatctcaaatcaatattgttactcaactgatctgaaagttgaaccgtgaaaatattcagtttattctaactatatggtaaaacatcaaattaaagataacaaaatttaaatggatttttcaaaaaatcaacatagatgactctggatacatatcaatttttatttaatcaatttttcagattaaaacaacttggctaattctacaaatttgaaaattatataaaatacaaaattcaggaaataatatctaaccccactagctagaggcaatgactgtgattattggcatattttttctagtgccgttcatgtatttttcacgtaatattaaccatactatagttaaaatgtagcaattaattttttacctgtaagtattttcttggtaattacatcaataaatatatcttttaattttctgaacaaatatgaaaaatcactagttaaacttgagaattttttatttctattaatcatttttctgggaaactcaatcctagaagctgattatcattactttcaaattaaaactctgtaccgcacaggaataacaaaaatacagaaatacttatacattaattcaatatttaatttttctcattgccaatggcctcctaatagcctaacagggctgtgtttatttattcattgctttaaagacctctttaatttgtaactgattttacatccaaattcatgtaccattctcataagattctctcatcaaatctatccatttttctgctcttagaaagggctggggttagccgggcgtggtcgtggctgacacctgcaatcccagcactttggaaggccgaggcaggcagaccacgaagtcaggaggtcgagacgatcctggctaccacggtgaaaccccatctctactaaaaatacaaaaattagctgggcgtggtggcgggcgcctgtagtcccagctactcgggaggttgaggcaggagaatggagtgaacctgggagacggagcttgcagtgagcctagatcggtatcccgggcgacagagcgagactctgtctc

SEQ ID NO: 16838 - DNA, 1658 bp, Homo sapiens
ctaataaatctggtcagttttaaaatttcttattgaatcagttttagtaatatgtctttataagaatttgttccttttgtctaattttttagtataacattgattattattcccttataataatatttttgagatctgttctttatttctgatttggggattttgtatcttccctttttcttggtcagtctaggtaaaggcttatggattttatctttttaagatcccagcttttagttagttttattgattttctccattattctcatttaattaatttctgctctgatctttattattccattccttcttcttactttggctgtaattcacttttcattttcttggttcttaaggtggaagcttagatgattgatttgaaacctcttttctaatataggcatttaaagctatacatttcctgctaagcagttttttagcttcacaccataaattgcgatgtgttatgattttgttttcatttagtttaaatatattctaatgtctttcatgattgtttctttgactcttgggttatttaaatgtgttcttaaattccaaatattgaagatttcccaatttcttcctgttgttgatttttaattctgttatgattggagatcatactttgagtggcttcagtccgtctgaatttattcagacttgttcttatgtggtctcacatatagtctgttctgccagttgttctctatggccttaaaaagtacatgtattcacctgttactaggacaagtgtgctggaaatgtcagggcaatttggttgatagtttgttcaaatctgtcttttgactttctatctagttgttttccgtgacgttttgagtattgaaagttattcaccttgagaccttgtgtgctagtgagacctttatgattttggtctcacctagctaaaccagcttgggtcatgagatcctagtgaatttttacagggtgacactaaagaaaacactgtcaattcaggtaatagagtatatgttaaataaaagtcttcaggtattggcattttaggaaaaataaacttagctatgtgtgctgcaagactgtatgtgtttctgaatcctctgcttcgagggaaaaatcatattagtagaggataagtttactcagtactggaaaaattgtgtagattttaggaacttgtcggagcagaaaggcgattaattgtgagaaatgaaagtcaattttagtggcagcaggtatatcaagtacatcaagtcttagttcaatgtttatagattttgaaaatttataggttcattattcctttcatttgtttcttcttttgtcccatttttgtcaagcatgtatttattttgtttgaatccttttttgtctcatggactgagaagaaaatataactaaggttggattatcccacaatttgctctgtgtctaattattctgaggtggattgtaatgaagccagcaagacttatacattggaattttaaatgtatgggattgtaaggagggtagaagctacaaaccaaagataagatatgcctgcagatctgcttcagatttcctgagggcagtagatgaaattatttctaagggcctttttcaccactgctctttaagtatatgagtaataaacaaaaagaacaaagtatgtggttcagaaggaataaaac

SEQ ID NO: 16839 - DNA, 2202 bp, Homo sapiens
aacttagacgatttctcagaactggtgttctcttgtacacagtttgggaatgactgcttggtacacttgttgttatttctgaaaattgatattaaaataataatttatgtactaccacttgaattcttttatcagttaatccttcttccttcttgcagatagtggagggctaagaaaagcaggaagtcatgaatgattgagaaacaaataaatgccacttatctcattcctcccctgggaaaaaagaacagctttgaaatttactgtatctgtcaccaatggagaaattgatagtattgagtatatttaaaagaaaagctattagcaagatcagttaggactgcctgagtgaatttccaactgttttccccatactaatgctaagccattgctagaattccttctatgtggcagtgaaaacgtaaaatgatgtcttcccattacaaatcaaatgaggacaagtgagtagttattgtaggaagccagcttcgggattaatatgagggaaagtttgcaaacatagaagaacggacattgttaaaagatgtaacagagtagattaaatgctatgactgtatgatccaaaaccaggcaaccatatccatggctataaaatattccaattggaagggaacttaggataatagtggatggatttcagcttttataccaagtccaatcaattgtagaagctttctgagtgctatgttgagggaaatccatatctcagtgggaatgaatagcatgatcaattagcaaaagatcctatttttaggaattggagatttggcagcatagggatcacctacttgccattcttgatttagttcaattgtgcattttgcaagtcggctgttgtgatgcacagaagctgtgtaacttactcaaagttatagcactagctaaggttagagccaaaatttgagccaggtgtttgcatcccgagtctttttcaaaaataggctttgctcccaggcgcggcagctcacgcctgtaatcccagcacttcgggaggccgcggtgggcagatcacaaggtcaagagatcgagaccatcctggccaacatggtgaaaccccgtctctactaacaatacaaaacttacctgggcgtggtggcacttgcctgtagtcccagctacttgggaggctgaggcaggagaatcgcttgaacctgggaggtggaggttgcagtgagccaagatggtgccactgcactccggcctggtgacatagggagcctccgtctcaaaaaaaaaaaaaaaaaaaaaaggctttgctcaatatttttctcaaaacagctatcattgccctctttgccatttaaaattttaaagaagacattcaatgatacaacactaacattcactcatcacattagggctgttgagaatgtcttcttggaaccaaagcagtcagtcacacaacacatatggagctgtaggctgaataaaactgcaagagtcattctgacttgcagagcaagccagggtggaaattggacatgttattatatttgataaagaaggcaatgttgaaagacagagaaatgtccttgtgtagcaaaaaaaaatttgaaatatcatatttttgcttttgccttagtgctgtctttaaaattttagactcttgactaaacaattaaaaatgaacttgataccccttatagcagctgtgcatacacaacaggagctactcagaaatatgccttagaaagctttctttgaagtgtttctttaccactttctttttctttgggttcaaattaaatagaatatcagccgtccacttatcttaatgacaattattgtgaattagacactgagtagaatacagtgacaaagaattgtaggcttttgccaaatggagtggaaaacagtaggaaaatatgatattctggccgggcgcggtggctcacacctgtaatcccagcactttgggaggccaacgtgggcggatcacgaggtcaggagatagagaccatcctggctaacagggtgaaaccccgtctccactaaaaaatacaaaaaattagccaggcacggtggcgggggcctgtagtcctagctaatcgggaggctgaggcaggagaatgtcgtgaacccgggaggaggagcttgcagtgagccaagatctcgccactgcactccagcctgggtgacagagcgagactctgtctcaaaaaaaaaaaaaaaaaagaaaag

SEQ ID NO: 16840 - DNA, 1761 bp, Homo sapiens
taatgtggaatttctctgcttactgccttgtacttttgatccagctgaactaaactaactcaaatgtgtcatggtgttttcttcattttgcctgcttaactcatgtctttccagccttaaactcaatgctcttccctttgggaagagttttctgaccctccatctcttcccgtggctgatcacagcgtttattggacagggctctgcttgtcattttcacatgtgtgtccacctctggactgtcgctctagggtacagagcagcctctaccccagtgctggacaacactctgcccacacagatgggtgctccctgcgtcctgagtggactttcctgaaagagaaactgagtctggccttctcttgtttacaatttgccttcacctctgctctgaatgctcttggaggtctctagcccttctgtggtttgttgtcttttcccctcagtcttgctgcagcatctgccactgttaaacaccttcctgaaattctctcctccctgatggcctgtgacatgacacttcctttgctcttccctagcatatgtaaactctcctgtttctctccttcactggctcctccaaacccttagagatgggtcttcccacagttttgtttccaaacttctctctctgccctctcaccttctgtggcttcacctgtcacttgtgtgcagacaaatgcttcgtagtctgtgtgtgtaacctgaatccctctcctgagcctcacgtgtgtgtccagcagcctgattgacatcatcacctgaatgcagtcccagcatcctaagacccacacatccaaaagtcagctgatcacgggtcacacactagttcgggccctaagtagccccaactgggtcagctcctcagagcttctaaccctgtctccccaccccatctgtctgcccactgcgatattttcagatacttcagtttgtaaacacatactgactacctactgtttctccaaagcacagttctgatcatttctttcctcatctcaaaaaccttcaggacttccctttgcctagtaaattgagtagaaatgccttagtcagcatcccagatccttgtttttttgtttgtttgtttgtttttaaactggggcagtactcctgctttcctcccattcctctttcatccctgtattgaggtcagattctcccacctgtcactcctcttgtacacttgatacctgtgcagcatagtagagtagccattagccacctgcagctatttaaacttgaattaaaattgaattaaaattttctccttctgccagggccactcatcgcacattcctcctttttcacacaaactttcctgatcattcctttcttcatgagatatcccctcccttttgagcctcagtagtatgtttttcccttgcaaaacctacccattctttccttgtagccattgatatacttacctcatttctgaattggaagagtttttgaggtaaagactacatgaagggctgggtgcggtggctcacgcctgtaatcccagcattttgggaggccaaggcaggggattacctgaggtcaggagttcaagaccagcctgggcaacatggtgaaacccccgtctccactaaaaatacaaaaattagctgggtgtggtggcacgtgcctgtaatcccagctactcaggtggctgaggcaggagaatagcttgaacccaagaggtggaggttgcagtaagctgaaatcacaccactgcactccagcctgggtgacagagcgagactccgtctcagg

SEQ ID NO: 16841 - DNA, 2268 bp, Homo sapiens
catttagttttttatcaatagatttggaccactatgcttaaagctaatcagcaagtgattctgactagcagaacacctttgaatttgagcaaacgtactgtggttccaattgttgtcactcagaggtacaagaagagttgaattaattctcagtggcctgagtaaagatctagaggcaaccactcacatattttagaataataataataattctcttggaattcttccaggtctgttttattaacttcctactttctatactaaaagaaaaaaatagattagtaatattgttaacctgatgatgatagaagacttactctttttaaacaaattttcaccctttctaacagtttagctgaacatcctgaagcaagcgagggaaaatataaagcattgcaaactcaaaagcacatataaatcaagtcacttaaaataatggactcaagaaaaaaaaagaaaacatgatattcctggtgaagcttttgttttcacaacaaaattttccctggttacagaaaaatatttctgaagtataaaaaagtgaaggcataaacatgataatgaatgacaactggcatcttcattatggggatagaagagattggtgtggtctgtggcaaaatgaagaatgcatgccctgtcttatcagacattatgctcagctccagcagatggttatcatttggggagtcagagccggcagttttagattttacttttttccccaaagaagccaaatccagatttttaacatgaaatgtcccggcttataaatgttggctcaatttttttggacagcatgtagaccaaacaaaattgatccataagctatttggcctattggttgtcaattgatgacccctccactgtagattttctaacaagaacagatggaacattttctttgctaaccagggtaataatttagaagggctctggaaccccctcttttgaggaagcagaaccctcatgtcaggatttaataaaaaatgttttggtcattaatttataaaatttcatagaatgcaaaagtttctggattgatgacatatcacttagcttggagaaggaagacaagataactaaggcagaatgaaatgtgtgtttcaatagagatttggacaaagctctgtgacagtaataaacctaccctaggtactagcaaagcttcacaaaggaagtaacaaaaaaatgagactctgaaatattaataggatttttatagaaaaagaagagaggatttgccaagggaggaaaaagtataagcatctctacagttacattgtgggctttgctaagtcttaagatggtgattgattgggtataattggaaagtaggatacatgagaacatataattagggccaaagggacctcaaatatcagtctacacatctaaaacttgattatatagttaggggagccattcaggtttagaccagggaagatacatcatctgatctgagattatctgatctgcatgttcttattccaaatcttggtttgagttcccttaaagtaattggacactttctgtaaggaattggataaaaataaggaccctacctagatactggctaaaaagctatatgatatctggagatactgacaattcttaagaatcgactttacactagtcatgataaatcacatccttgtgatttccagatgaagctagaaagcaatgttcaagaggctatcagaatacctggtaatttcatggaatactacacagccataaaaaagaatgagattctatcctttgcagcaacatggatgaagatggaggccattattctaagaaaactaaactaattcaggaacagaaaatgaaacactacatattctcacttgtaagtgggagctaaacattgaattcacatggacacaaagaagagaacaatatacaccagggcatacttgagggaggtgggtgggaggaagctaaggattgaaaaacaacctgttaggtactatgcttattatctggctgacaaaataatatgcacaccaaacccccatgacatgtaatttatgtataaaaacaacctgtgcacatacccctgaaactgaaataaatgttaagaaaaagaatgcctggtaatttgactggcatgcagaacataatagcctgtcctgcatttgggttctgtgcagagaacattgcacctctattagaatcaactaatataagtcatgaaaacaaaaattgatggaattaggttgaaatagactggaaaggaaatgtgatgaccttaattattttagc

SEQ ID NO: 16842 - DNA, 1884 bp, Homo sapiens
tagctaattagtggatttttttttttttaacatcaaatggcacagcagtatgtctaaattgcccttaaagaaatacaaaatgggccgggcatgtggctcacacctgtaatcccagcactttgggatgccaagccaggcgaatcgcaaggtcaggaattcgagaccagcctggccaatatggtgaaacctcgtctctaccaaaaatacaaaaattagccaggcatggtggtgggcgcctgtagtctcagctactcgggaggctgaggcaggagaatctcttgaacctgggaggcagaggttgcagtgagccgagatcgcaccactgcactccagcctgggcgacagagtgagactccgtctcagaaatacaaaatgagtagtaaatttatctttgaaatctgcaaaacaaatgtaccctaaatgttataaataaaggtcagtaaatttaagttaaacagtgtgggggcaaaggatttttatcatctttatatccatttctctttttttatcctccccttttacacatagatgcgaatcagtagttgttgtttttggaatttgtgacactgtgagccattggctgtgcttccatatctggtttgttggccaaactttggagctatgtcgtttttcacctctcagatactaaggatgagcttccccatacttggcattagcctctgggatagtcagccaacgttatcttcttctagggacttggtactcaaccgagcactcaataagtgcttcattcaggtcatagctggactctgcattgttgattgtctctctgtctttctttttttaaatttgagatattcacataccagaaaatttaccgtttaaacaatttagtgtttattaacatatttacagggaatatacaaccatcatcattatcttaatttgagaacacttttattactctaaaaagaaattgcctacccatcagcagtcacttcccattccttccttcccctacccactgggaactgctaatctacttttatctgtatggatttgactattctggacacttcatatacatggaatcatgcaatatgtggccttttgtgtctggtttctttcacttaacatgttttcaagccttgtctatgctatagtatattattacctcatttctttttatgcttacataaaattccattgtgtggtgtgccacagtttatccattcacctgttagtggacatttgggttgcttccaccttttggcagttgtgaataatactgcgaggaacatttgtatacaagtttttgtgtagacgtacgttttcctctttcttgtgtaaatacttaggagtgtaatggctaagtcatatggtagctaaatattaacattttaggaattgccaagctgttttccaaggcaactgcaccattttacattcccagtaacaacctgtgagcattcaaatttttccgtatcgtcaaccaacatttattattatctttctcattgtggtaaaatgtctattcagattctgacattttagcttttgatataatcactttagggtcttcctcatgtaatatttatatttttccctttttctgtatatccttttttttctctctgaaaaacgtaacactgtcagccagaggaagtaatatattctagggaatgggaaactcatgcttcctgtgagtctttaaactgtccattgtccatcttggcaacatgaagaaaccccgtctctacaaaaagtacaaaaatcagccaggtgtggtggcacacggctatagccccagcttctcaggtggctgaggtgggaggatcacctgagcccagggggtcaaggttgcagtgagctgtgatcgtgtccctgtactctaccctgggtaacagagtgagacctatctcc

SEQ ID NO: 16843 - DNA, 2027 bp, Homo sapiens
gatgtatatgtttgaagtgtgcgtgtagcattggggacaggcagaggctctgctcactggggaatgatgttctggtggaacaccccatggacttggagcttgagaagtgggctttggccaggccctggcactgaccacctaggaacagtcatcttttccaagcttctggttcctcttctgtaaggtgcgagtccctaaccacctttccaaagacagcatcctgtgcaagctgtcacgggagggggaagggccctggtgaccctcagggcctctagagcctgtgggcaagagctggccctccatgccaaggtgccaggcctaaccctggtgaagagtgacccaactgggcgactgcctgaggcctcagaggaggacaaggagaaggtgcacagcagcagggtgcacaccttgccctggcctctcctagggtagaggacggtgtgagcccccagaggctgtcatccagcctgagaggtttcttggctcttcctcccatgcccagggttctcccagactgcagagcaagatccaggctccacacaatgccagaggccctgcctctatcttctctctggccagcggccctatcgctaaccccacacatgaaggatactgctttggcatcatcgtttgtgagggccaggctggggaagggtggagagagtgtccttccctggggaggctgaacccagggagatggagtgacatgccccaaaaacacagcaagtgggactagaacccatgtctccagatggaaccccaggctcccactgctccatgctgtgcaggttacacctcccaccctgccgctctctccgggggcctcagtccacctcctgagcccatgtcctcagtccatgattggaccgggtccctgggtcccttggaggaccagccaagcccaggtccttctttgcttcttactccccaccccagtctccttgttcttcagtcttttgctttcccactggctcccttctcacacctcccatggctgtgcccatttctccttttaactctgtcaacttttggatcctatatttgaagcaaggcatgcatatatattttaaattttattatctctgttttgatctttttgtcataaaaaattcgtttttatttctaataatacttcctgccttaaagtctacatttcctgtttgaatgatgttcagtgtccattgtgtaaattctcatgtggtaatttcctttaagaaattattgaggggccaggcacagtggcgcatgcctgtggtcccagcactttgagaggctgtggtgggatagtttcttgagcccaggagttcgagaccagcctgggaagcatggcgaaaccctgtctctacaaaaaaaacacaaaaattagccaggggtgttggtgcatacctgtaatcccagttactcaggaggctgaggtgggaggatcacatgagcctgggaggttgaggctgcagtgagtcaagattgcaccactgcactccagcttgggtgacagagtgagaccctgtctcgaagaaaaagaaattattgagggcagggtggtggcacacgcctgtaatcccagcactttgggaggctgaggcaggaggattgcttgagctcaggaggttgaagctgcagtgagatgtgtttgcgccactgcactccagcttgggtgacggagcgagaccctgtctcaagaaaaaaaggagaagctactgaattgcagtaaaaccgtgtgcttctatgaggggataaagtatttacttgtggctgggcacggtggctcacgcctgtaatcccaacacttcgggaggccgaggcgggaggatcacctgaggtcaggagttcgagaccagcctcaacatggagaaaccccgtctctactaaaaatacaattagccaggcgtggtggtgcatgcctgtaatcccagctactcgggaggctgaggcaggagaattgcttgaacccaggaggcggaggttgcggtgagccaagatcgtgccattgcactccagcctgggcaacaagagcgaaactccatctc

SEQ ID NO: 16844 - DNA, 1686 bp, Homo sapiens
  CDS (1053)..(1361)
aaataagtatatctgtcaaaaatcatatttttatgagatgtgtcaatactggtctcgtgtcatttaggctacttggaaaaaagataaaaaaaatcctgtttggctccaaaaaggaaaaatcagcccctcctgcatgagtgggagctgcaaccctttagaactgataatcacaaacccctcagaaccaaagtgaaatgaaggaaaatatgtaacattaggcattgatggaagaggactagatcctagtgtaagcatcctaataaaaggaggggttcaaagatgctctccagaaccagtatttcagacttcctatgataaactaaatgtgccagtaccagagactccaggaaaaaccagaaatttgtttttgcaattagccgagcatgtagtccagtctttaaatgtcaattcatgttatgtttgtggaaaaactgtagtaagagtttccataagaagaacttccataagaagcccaagaattagttcctacagacccagttcctgatgaattcccagcccaaaagaaccaccctgacaatttttaggtcctaaaagtctgaattattagacagtgttgcatagctagagaaggaaaaggattcactcatcctataaggcggcttagttgtcttaggcaaaagctgtataatggtaccacaaatacagttacatggtggagttccaattacacagaaagagatccattcagtcaatttccaaggttgcagactgcttgggcccacccagaattccaccgggactggacggcccccaccaggttatactggatatgtgggcacagagcttatgctaagctgcctgatcagtggacaggtagctgtgtaattgacaccattaaaccatctttcttcttactgcccataaaagcaggggaacttctgggcttcccagtctatgcttcccgcaaaaaacaaagcatagccataggtgattggaaagatgataaatggccccctgaaagaatcatacaatactatggacccaccacttgggcacaagatgactcttggggatatcggacccccatctacatgctcaacggaatcatacggttacaagctgttttcgaaattattactaatacaaccggtcaagccttgactgttcttgcccagcaggagactctgatgagaaatgctatctatcaaaatagactagctcttgactacttgctagcagctgaaagagaagtttgtgaaaaatttaactttactaattgttttctacacacaggtgatcaagggcaagtagttaaaaatatagttaaagatataacaaaactggcacatgtacccatacaagtgtggcacggactcaatccaggatccatgtttaaaaattagttcccagcaataggaagatttaaaactcttataataggagttataatagtaataaaaacctgcttactgctcccttgtttactacttttacttctacaaatgataaaaagcttcattgctaccttagttcaccaaaatgcttcagcacaagtgtactatatgaatcactatcaatctattgcacaaaaagacataagtagcaaaaataagagtgagaactcccactaataaaaagtgagagtctcaaagggggaaaatgaggaaagagagcgaccctctcatattgttctatattgttttatactcagtacctgttttaagg

SEQ ID NO: 16845 - protein, 103 aa, Homo sapiens [sequence omitted]

SEQ ID NO: 16846 - DNA, 1979 bp, Homo sapiens
  CDS (1152)..(1487)
ggtactcatgtaatgattgttactagtgtagttggtgcatagggatgggtgaccctgcaaaaaaggggcacagcaaactctatttcaggtacaaatggaccttatctttaggcaaatccttgaaattttggcagggggaatcaggttttcctgtgagttttttgtttttggcttttcatagacatctacatgaagtctctgctttagaatcttaaaactgtagcttcagaggccgggcacggtggctcatgcctgtaatcgcagcactttgggaggctaaggctggaggaccacttgagctcaggagttcgagaccagcctggctaacagggcgaaatcctgtctctactaaaaatgcaaaaattagccagacatggtggcgggcgcatgtaatcccagctacttgggaggctgagggaggagaatcacttgaatcctgaaggcagagattgcagtgagccgagatgacaccactgcatgacggaatgagactccatctcgaaacaaaaaactgtagcttcagggattcacttaaattatcatttataggccaggagaggtgtggctcatggcctgtaatccaagcactctagaaggctgaggcgggtggatcagttgaggccaggattttgagaccagcctgggcaacatggcaaaaccctgtttctacaaaaaaagaattctctgggtgttatgatacacgcctgtagagacagggtctcgggccgggcgcagtggctcacgcttgtaatcccagcactttgggaggccgaggcgggcggatcacgaggtcaggagatcgagaccatcctggctaacacggtgaaaccccgtctctactaaaaatacaaaaaaattagccgggcgtgatggcgggcgcctgtggtcccggctactcgggaggctgaggcaggagaatggcgtgaacccgggaggcggagcttgcagtgagccgagattgcgccactgcattccagcctgggagacagagcgagactccatctcaaaaaaaaaaaaaaaaaaaaagacagggtctcactttgtcacctatgttggagcacagtggtgccatcatagctcactgaagtcttgacctcccaggcttaagggagcctcccacctcagccttccaagtagctggcactataggcatgtgccaccacacctggctgatttttgtatttttagtagagatggtgtttcgccacgttggccaggctcgtcttgacctcctggactcaagcgatcttccagcttcggcctcccagagtgctgggattacaggtgtgagccactgtcctggaccaattttttttaaagaaggaaaaataaaattaattcagttctacttaaaaaaaaaaaaaaaaaacggtcaggcacagtggcttacgcctgtaatcacggcactttgggaggccgaggcgggcagatcacgaggtcaggagatcaagaccatcctggctagcgtggtgaaaccccatctctactaaaaatacaaaaaaattagccgagtgtggtggcgggcgcatgtagccccagctactcagtaggctgaggcaggagaatggcatgaacccaggaggcggagcttgcagtgagctgagatcgcaccactgcactccagcctgggagatagagcgagactccgtctcaaaaaataaacaaaaaaaagctctttaaaggaaacgtgcccggcacggtggctcacgcctgtgatcctagcactttgggaggctgaggcaggtggatcacctgaggtccggagttcgagaccagcctgaccaacatggagaaaccccgtctctactaaaaatacaaaaattagccgggcgtggtggcgcatgcctgtaatcccagctactcaggaggctgaggcaggtgaatcacttgaacccaggaggcagaggttgctgtgagccaagatcgcgccattgcactccagcctgggcaacaagagcgaaactccgtctcaaaaaaat

SEQ ID NO: 16847 - protein, 112 aa, Homo sapiens [sequence omitted]

SEQ ID NO: 16848 - DNA, 1843 bp, Homo sapiens
  CDS (24)..(1715)
agtcgtaggcgctggccgctgacatgttgaggactacgcgcggcccaggcctgggccccccgctgctccaggccgcgctgggccttgggcgggctgggtggcactggcctgcgggccgggcggcgagcggggggcgcgggcgggcctggctgcagcccacgggccgggagacgggtgtgcaggtgtacaacagcctcaccgggaggaaggaacccctaatcgtggcgcacgccgaagccgcctcctggtatagctgtggaccaactgtatatgatcatgcgcaccttggccatgcttgctcatatgttagatttgatatcattcgaaggatcctaaccaaggtttttggatgcagcatagtcatggtgatgggtattacagatgtagatgataaaatcatcaaaagagccaatgagatgaatatttcccccgcttccctcgccagtctttatgaggaagacttcaagcaggacatggcagccctgaaggttctcccacccacggtgtacctgagggtaaccgaaaatattcctcagataatttctttcattgaaggaatcattgctcgtgggaacgcttattcaacggcaaaaggcaatgtctacttcgatctgaagtctagaggagacaagtatggcaaattggtcggcgtggtccctggtccagtcggagagccagcggactctgacaagcgtcatgccagtgacttcgccctgtggaaggcggccaaaccccaggaggtgttctgggcctctccctggggacccgggaggccgggctggcacatcgagtgctctgccatcgctagtatggtatttggaagtcaactggatatccattcaggtgggatagatttagcttttccacatcatgagaacgaaattgcacagtgcgaagtctttcatcagtgcgagcagtggggaaattattttctgcattctgggcatttgcacgccaaaggcaaagaagaaaaaatgtccaaatcattaaagaactacattactattaaggactttctgaagaccttttcccccgatgtcttccggttcttctgcctgcggagcagctaccgctcagccatcgactacagtgacagcgccatgctccaagctcagcagctgctcctggggctgggctctttcctggaggacgcacgtgcctacatgaaggggcagctggcctgcggctccgtcagggaagcgatgctgtgggagaggctctccagcaccaagagggccgtgaaggcggccttggcagatgattttgacacacccagggtggttgatgccatcctgggccttgcacaccacgggaatggacagctcagggcgtccctgaaggaacctgaagggccgagaagtcctgctgtgtttggtgccatcatctcttactttgaacagttttttgaaactgttggaatttctctggcaaatcaacagtacgtttcaggagacggcagcgaggctaccttgcatggtgtggtggacgagctggtgcggttccggcagaaggtccggcagtttgcgctggccatgcccgaggccacgggggacgcccggcggcagcagctcctagaaaggcagcccctgctggaagcatgcgacaccctgcgccggggcctgactgcccacggcatcaacatcaaggacagaagcagtacaacatccacgtgggaactgctggatcaaaggacaaaagaccaaaaatcagcgggctgaggatggagcacagccatgaacctgctcacgacaagacgcacccatgcttctcagggtcaaggctttatgttaaagcttcctgtcggggctgctaggtcagcattaaagtaaggcaaccaacagtg

SEQ ID NO: 16849 - protein, 564 aa, Homo sapiens
MLRTTRGPGLGPPLLQAALGLGRAGWHWPAGRAASGGRGRAWLQPTGRETGVQVYNSLTGRKEPLIVAHAEAASWYSCGPTVYDHAHLGHACSYVRFDIIRRILTKVFGCSIVMVMGITDVDDKIIKRANEMNISPASLASLYEEDFKQDMAALKVLPPTVYLRVTENIPQIISFIEGIIARGNAYSTAKGNVYFDLKSRGDKYGKLVGVVPGPVGEPADSDKRHASDFALWKAAKPQEVFWASPWGPGRPGWHIECSAIASMVFGSQLDIHSGGIDLAFPHHENEIAQCEVFHQCEQWGNYFLHSGHLHAKGKEEKMSKSLKNYITIKDFLKTFSPDVFRFFCLRSSYRSAIDYSDSAMLQAQQLLLGLGSFLEDARAYMKGQLACGSVREAMLWERLSSTKRAVKAALADDFDTPRVVDAILGLAHHGNGQLRASLKEPEGPRSPAVFGAIISYFEQFFETVGISLANQQYVSGDGSEATLHGVVDELVRFRQKVRQFALAMPEATGDARRQQLLERQPLLEACDTLRRGLTAHGINIKDRSSTTSTWELLDQRTKDQKSAG

SEQ ID NO: 16850 - DNA, 2199 bp, Homo sapiens
caaatgcagaaagagaaaaccaaatacctcatgttctcacttctttgttgttgttgttgagacagactctctgttgcccaggctggagtgcagtggcgctgtcctggctcactgcaacctctgcctcccgagttcgggtagttctcctgcctcagcctcccaggtagctggggctacgggcgcccgccaccacgcccagctaattttttgtgtttttagtagagacagggcttcaccgtgttggccaggatggtcttgatctcctgacctcgtgatctcccctcctcggcctcccaaagtgctgggattacaggcgtgagccaccacacccagccatgttctcactttgaagtgggagctaaacattgggtattcatggatgtaaagatggcaacatcagaccctgggattactaggaaggagagaggggagggagcaagggctgaaaaactatgtattgggcactatgctcactacctgggtgatggtatcatttatattccaaaccttagcatcatgcaaaatccctatgcagcaaacctgaatctaaaataaaagttgaaattattattttaaaagaaaatttacatataaccaggtatttggttcactgagcacacatgtagtaaaatcttccctagagccaggcaaagcttttcagtttttagtgaggagtgcggtgttctctcaccaggttcctagagcacatgatccagcttggactctcccaggatctgttggagaaacatgtaggctcacgatactgaatgagaggagggaccttctatgtacacaataaatacatcaatccttgttttcttacaatctgtttcaagtgagatgggttcctggagcacaatgggttgagagacgctcttctgtgcggatgttccctccccatatctcattttgaaaaatgatcctggatcccctccccattgcatctttaaagcaaagtgacattaatgggataccactggagccggggcattatgcagaccagagtaaagcatgcctctcctatgctttgttgttactattagcttatccactcacgtagagagactatttttgctgcgtggagtctaccctcctgaaccattgtcacagtactcaaggaaggatgcttcggcgtgatggaaacaaaatgtgtgaattccagttctgccacctagttgcagaatgaccatgttagattagttgtttcatgtctaagatcctcattatcttcatttgaaaaataggaataataatagcttcttcttagacctgatgagattactaaaatagatcagcagttttcaaaccttctggtttcagggtccctctgtactcttaaaaattattgagaaccgcagagagcttttgtttatatgagttatagcaatcattatgtatcatatgtcaagttaaacagaaaattatgaaggtttattcattttaaaatgacaactattatgctaacatttttctgtgagaaatatcttccaaaacaaaagaattactgagaatagtgtttttgttttaaatttttgtaagtctctttaatgtctggatttatagaagacaactggattttcaaatatgcttctgaattcagtgtgtcatgttatgttttagttggattatgtagcaaaaataaagcttcacatagatacgtaattggtaagagaagggtatttcgatacccttctcagttaaatgcggatgttcttatttgattaatcagtaaactttgataattgatgttgtcttaaaagttgtgatgtgcaatcagaagccatattgtgaactttatgtactcaatgacataaaatccattggtttaccttgcacttggaatgacttttttgcttttaaaacagtgtcattggccatttggaaaatattagttacctagattgtacagatctcctgaaaattgactcattttatcaaaccatatcaaaaaatcataattcttaatattaccactagtctcatcagataagtcttcagtattgagaagctgtcaagcttaggatggcagatgtatgttttccaaaatgctaatttttgcttgaaaactcaaattttatcattggcaacaagtgttgttttcctggaagtgacaggctcacttcattcatttcagtaatatatctgccaaatgctcaagtctgaataaccacagtttatctaaaactgttctttcaagtt

SEQ ID NO: 16851 - DNA, 2893 bp, Homo sapiens
gtacctttgtccttggactttggtgatgtggtttgaccccagctagagagtgaggggaacaacagcaaaaggcaggacaaagactgactcgtgagaggaggcccaggaacaggggggcatcgtgaatgaggaggacgtgggggcccaagaaagtgagctcttgcgcactcagtcaccagcccccttctggggtccaagctgtgtccccttctctaaagaggtaagccctgagtcatgggaagatggaaaccggggctgatgagacaggatgttttttaagcaccgtggtgtcttgttgacttgcacatgcacgggggtcttgggtaaccacagggctcagggtatttgcaggaacagttcaagtgctcacttgtcttggggctgtttatggggaagtggtttccacagtgagaggacgtgagatattgttgtcaccccggaccacacttagctacttccttctcactaaagctctgtagtcatattttccctggcagagcagaaacttctatgttatcccacagctgttctaacggtgtagacttgacttatgcaatgatgccaggagtcctgagcagcacagcccaacttcaatcacacacagatggacagagctgtattagcaaagcctgagctactgagcgatgagagtacagccaggctttcagacatctgttcattcaagagagatatgcgctaagccaaggacctaaagatgtgtttaatatgggtgctaatatgcataaggaaccttgaaataaatgttcttagcctttggccaagagggtccatgtctaggaatctattctccatagaaataaattcaaatatggaaaaaatgaacaatgcataagtgtatttggtccccagcatatttatagcaacttaaaattggacccaatttaaatgcctatgatatggaaatggctaagaaaattatgggatcttcccttgattggctattaggcagcctttacaaacaatgcagtgacatgagaaatgcttatgttatggtaagcttaaaaaactcaagatgcaaatcagcttattttaatcaggagccacctagcatttgggatgtggtcaatcccacataatgtatttttgtgggtgcagttcccaggaaagaagaggaataaaaacggcaagtatgaagtgtctccttcacttgcagtctccttgtctacccctttgtccatccactatgaaaggactcccttctgttccttaatatggacaatttctattgaggactcattgttctaagaattgtctcatctcctcctgcatcctcagtgcccgatctttggcttctatgaaggaaggtgggtagtgcttatggcagggccagttctacctttctcagtatgttctggcctgggtatgtagccccattttctagtggttaccttgacatcatgaagagtttatgtctcttttgccctagatttgggcaatagtcattcattgggcaacaggaaataacacaagtcagcatctcattaaaaataaagtcattcaggaaagtggacgactaatagtttctaatctagagagcataggagaagaaatgtttaccacacacaaagtattagtgccttttatatcacgaagacaaaaataacaggaaaaagacaaacacattatagtgaaaacttgtttttcctaaccagcatctattctgcatgtttcctgatgcccgaaactcacatttcctcaggaaaatctcccttctgcaccattctcaggctttaagtttatgtaaaattcagtaaacccaaagattcaagttatgtgccttgattaacttaagcaaatcaatgaaacccatccccataaccacagcgacaggttaggaaattcggttcctaagtcagtcacatccgaaagggcctagtgatgtttttttccagtgggatcacagactcactcttccttgcagaaaatgaacaaaggattcatgtaacactggcaggtactggcagccacccagggcctctcacaggaaagggagatcagaaagagaagcaaagaggactcatgagataccatagggctgctgcgtccagccttgcctggagctagggccacctcgatgccctatagtcttggagccacaacgtgcatttactcaaagcctctttgagtttggtttgcttgtttgctttctgcctggaaactgccagcatcctgagagatacgagatctgcatctgtgcagagacacagggtttgttaaaagtcacaggccctgactgaagtgtggaactggctgaaatgagaaagtggtaatttggggaggaccttgtgaaatggaaggagttttaaaccttacatgcatcagaattacctggagccttgtgaaaacacaggttgctgggccctagtccattaagaaaggaagtggggcttagaatgttcatttctcccatgttcccaggtgatattcaccatgctgtcctgtctggacactaccttttgccatacccattacaaggtattgcacgtgctggttgaactatggtctgtcttattttggtgctaaaagcctgtgccaaataccaacgctgcagcattaaggaatgtgatagaaaagattctgaatataggccaggcgcagtggctcacgcctgtaatcccagcactttgggaggccgaggcaggcagatcacgaggtcaggagatcaagaccatcctggctaacatggtgaaaccccgtctctactaaaaatacaaaaaattagccgggcgtagtggtgggcacctgtagtcccagctacttgggaggctgaggcaggagaatggcgtgaacctgggaggcggaacttgcactgggctgagatcgcgctactgcactccactccagcctgggcgacagagcaagacttcgtctc

SEQ ID NO: 16852 - DNA, 1680 bp, Homo sapiens
  CDS (242)..(814)
gagctagcatcaccctgagaaagcaggctggccccaggactcacgggcgtccatgcagctgatggaggggagctggaccggacgactgtgctctcttagctctagcatcaccctgagaaagcagcctgtctccgggactcacgggcatccatgcggctgatggagggagctgggccggacgactgtgcttctcgtgcttcatgtagaacccttaggtttgcccctgaagtctgtctgctccatgtactatttagttgcttttcagcatagagcttggttttccctttttttaattgtaagaatgatgtgctctggcatgtcacactgtgaaaggggaccagatgatggagcctggactgaaagggtgaatggggccgctcacctcagaactctccctgctttgctttgctgggagcagggagcagggcagcctgggagaggctggagttcctcaaagggcagagaagaatggccttcaggggaccacagggaggaaccatgccatgatagactcaaaaagctagattatgctaataaaaaggggaagacatctgtgacacacaggaaacagtgttcgtggccttgccatagaaggcgcagtaaaggaggaaaactccggagactccctgtgaattcttggctaagaatgcacgttatctgcagtgatctaaaaacacaaacgagaacagaagtgagtggccctacctgtgagatgcacagtgctgagcggcacccagcgctggctgcaggatgggaggctggctgccgtatgattgttcgtgggaagaaattttgtagaagttatcaagctccttaaaatgttcgtgctgtgtctgcctggacagttgcaattctgagaagcgatccttgaaaatgattctgggtatagaaaaaggtacagcacagtggtgttcttagtatggctgtttacagtcgcagaaaatgagatgctaaactgctgccctaggggattggttaagcaaactggtgcttccactccatgagataggatgcagccatttgaaatatttatgaaggttttggacagtcatttggaataatggttttgttggggctcttaacttgcaagccaatagaaaagaaatctggctaatataatcctataaattatttccctacagcccatttttaaggttcccagtaactttcagaatcaaaggagacatcggatggccaggcctcagtagtggcaaggcccaggcagttccagatccctgcagcctgccactaccccgagtctctccaggtcaccagccaggcttgggggtgatggaggaggactcggtaagggacagttcacttggcaaatgtttagggagcacctgctgtggccaggcattgccctagaggcagggaatatgatagaaattgcggcagtacaggaaggtaaggtccctgtaccgcagagctcacagtctcatgggaaggagttcttacacaggtgaggtaagtgttagggagaaactaaagccaggtaatgagagagggcagtggggctgcagaggctggggtgagccacagactactgtagacacggtagcaacgtaggtctcttaagaaagtgacacacaacgtaggcctaatcacagcactttgggaggccaaggtgggaggatcactgagaccagcctgggcaacatagagagaccctgtctctgt

SEQ ID NO: 16853 - protein, 191 aa, Homo sapiens
MYYLVAFQHRAWFSLFLIVRMMCSGMSHCERGPDDGAWTERVNGAAHLRTLPALLCWEQGAGQPGRGWSSSKGREEWPSGDHREEPCHDRLKKLDYANKKGKTSVTHRKQCSWPCHRRRSKGGKLRRLPVNSWLRMHVICSDLKTQTRTEVSGPTCEMHSAERHPALAAGWEAGCRMIVRGKKFCRSYQAP

SEQ ID NO: 16854 - DNA, 1681 bp, Homo sapiens
  CDS (588)..(953)
gcactcaaaggctcaactccccacaggcgtgtgttgccaggggcagaaggcttggcccctgggtcagcatactctccggacagctcatccctgccagcccaggtccctgcagccctggggctagcacaggggatgcggacctcggcctaggtccccacagctgtggggctggctcgggggacggatctctgctaagcatggcccctgccagctcaggtccctgccactcagtggatgggactttggcggagtgtggggcccctgcagggagggtctagacaagcaacaccaggaacctgaagcctccctggccggggctcagctgtcgccaggatcgcaacagttaagctgcctgcagcaggataagtgagccgatgctgctccttaatcagggacatcgaatcggaggccttgggaggagcagccggctggctgccctgcagaggccaggtctgcccagcaaacccaggaaggtgtggcgtccccgcttcgcggccaagatggtgctggtgctgcgccatcctttgtgtgcccgggaagggcgttccgggagccgggtcgggggctcctgactcgcattgggcagcatgacggtgcgccggctgtcactgctgtgccgggacctctgggcgctgtggctgctgctgaaggccggcgcaggtgcgtggggcgcgggcgggtcctcgcctccccggaaggtgttgtggggcgacagtgcggggacgccgggcgggggtggacgttctgggcccagccctgtcctcagaggctgctggggcagaagcccggggctgggggatgccggggatggatgttggggtgggtgcctccgagaccagaggagccctgttccttggcagggaaggtgtgcacgggccttgcccgatggatggtttagggccatggccctggggtccctggtgagcagtggggccgcctctgcccttggcctgtgagggactgtctgtgctggtcccagaaggctgggatcacctttccactggctcctttgttcgaggtttttcatagacaggctatgtggacaaatgagggcagcgcccacgtctggctggtggaggggctgcggctcctccttggaggggacgcctggccactgctgtccccacaatggggccacccgtggtgcaaggcgtgacaagctgccctctctaggtaagcaggacttgggaggcccctggccaagcctgtggacccggctgggcggcctctgtggtctcaggtttgggtgtgtttggtctggtcagggctcaggggctgctggtccacactggccccatcctgacaattggagctttggggcaaggtccctggagaaggggtcacgtggggaggaaacagcctgggttttgttgatgcttttctaagaatggagtactcgttttcaagagatttgtcctaattatattttccagcgggtacttatgccaagtattgatgaataattcataaaataagcatctttgtgaattttagtgaatcagaccttaactatcaacggcaatgaatgaacatctaaagtttccaattttaaagtaaagaactggctgggtacagcagttcacgcctgtaatcccagcactttgggaggccaaggctagaggatcgcttgagcccaggagtttgagatcagcctgggcaacataccaagacctcatctgtt

SEQ ID NO: 16855 - protein, 122 aa, Homo sapiens
MTVRRLSLLCRDLWALWLLLKAGAGAWGAGGSSPPRKVLWGDSAGTPGGGGRSGPSPVLRGCWGRSPGLGDAGDGCWGGCLRDQRSPVPWQGRCARALPDGWFRAMALGSLVSSGAASALGL

SEQ ID NO: 16856 - DNA, 1671 bp, Homo sapiens
  CDS (1006)..(1479)
cttgtgtctagcccgtgattgacattctagagataatatgagaaatattccagacctgaccttagagtttgtaatccagttgggagaaacaaagccttttatgcaaaacataattagagaaccaagcaatatcatctataatctaaaagtaaaatgtgaggtatgtttttaattccaagagcctgtgagtggttctgaagtgcaagtgtcttcttgtgtttttcagaggtttgtgtttagatggctcaggtttaatctctaatggggatagcagggaaccagatgagacctgctgaggtggccacagtactgattctagtgggcaggctgcctcccctctgatactgtgtaaggcattactaatgctggcaacagtttgcatatagccaattgccaaaagcagcctgcacatccctcctgaggctggtcccgtaaattcttctctttcctgtcgtaaagcattcctcatcaccacctcccttttcacactttatgcaaggccgtgcactgggacagcaaatggctgcaactttcactgcttgcttttcccaagtcgaagaaaagttccaacgctggcaaagcaaggacattgctattttctgacgatcgaatgtcttcgaggaactagcttcagtgctgatagggtctgtgttcctctagtaagaatagcactgtttccattagaggggaccaggatgggtagacaggctaagacgtctgattactctttgctctgtgtatttgtatgacagctcgggtgtctggcttaccttcctgaggatgagagccatagcattatccatttaataacagccacagtgacagtgctgataatggctagcatttacctagcactgtgtgccctagaacatttaatagtttcactctatgaactcgtttgttggtcttcgtgccatgtgtccaacataaagctagcaggacccatctgtccttgcccatgcttattctgtgccacagccacccctggttgtgattaagatattaatgttaaagagggaattgagttctgatttctcctcattcaaaaccattctgtcatcttcatgcacatgccctgcaggcagccagccagtaaggggtccttcatacctatcctgttcctggctggtggctctcagaatctgccatggctctttgatcctgtttgtcctcctgcccttgagtgactggctatcagaaagccttcatttccttgttggattctgcctccaggaagcaaagccgacccagtggtttctgtgggtcagctgcacttggctgtctgcactggggaagagacttggcttgttggctgttttatgccctttggactgtcaggtccaagtgtactgttggccgcagcatccagtctgtgctatcagagcaaggcgctatggtcaggagacccttagccaccaaaggtctgttgtctcctggtgtctttgcctgaagacttctggccttcttgtgtttcatcactaagtgcatctataagctgacccgctgccaggtatcatgtctgagcattttggcaaggagagtcggtgagagaagttttcttggcaaccataaaataaaagtactatcaggagctgctaaataaatttgcaccgcttcagccagggaatttcagctctcctgggtgggatagtgataggggatgtggaatgc

SEQ ID NO: 16857 - protein, 158 aa, Homo sapiens [sequence omitted]

SEQ ID NO: 16858 - DNA, 2149 bp, Homo sapiens
tcttaggcaactcacttaaccttcctggggcaatttactccctctgagatgagaaagttgaattaaataatccgaaagcatcctgtcaagctctgaaaaatgctatgcttcaaggtacacagacttctcaggaagaattcatagctacaagcatgtctttttataaagaccacaggtggttctcaggaagtttgcatattacaaatctatttcgggtttctgaaatatgtgtctctagcttttcctgactacttcttttcatctgcctggtcccatggaccaagaatttagggattccgaagggagagaggggaaagatctgcttaaaaccagaggacttgcaggaacctcttctgggccgtgggcttcatcttcccacaccgagcagagcagacctctgtgcctgccctgcagctgtaggtcttgagttacctctccttccccttcctccatctgtacctccttaagagcagggccctccctgtcagacagacctcagccagcggccctccgcaggtcctggcctgcttccccacaccgttccctgtggtgacctgcctccctgcttgttttccaggctccccttccctgcgggcatatccgctcctctcggtgatcacccgccagcccactgtcatctcccacctggtccctgccaccccgggaatcgcccaggcactgtcctgccaccaggtcaccgaggcggtctctgctgaggccccagggggcgaggccctagccagcagcgagtcagagacggaacagcccacgccccgacagaagaagccccgccggagtcgcaccatcttcaccgagctgcagctcatgggcctggagaagaaattccagaagcagaagtatttgtcaaccccagacaggtgaggacgcagggaagggactctccgcagtgaaggcccctgggaacgggagacttgctcccattgtgggccgtggagccacagcactggtacagtgaggcaggacactatggcggagtccactccttggctcaaatcatctcaaccttggttaacagaacccagcccacatgaatccaccacacggtccctggagcctgcctgcggctaaacttaactcaccactttatctccatatttgaacttaactatttcagtatcataaacaaggtccagtttagcaaatggttgctcaggcggtcagctgggaaacaggcttggtttttaagccactcactcttaggattggaggcagcaggactagatttggaattgggattcatgatcttctcaatcttctccacagcctccagctgattccccactgactcagtttgctggcctggctattgcttgggaaggactggagggatccagttgaggaggtcagacatgttagtgaatttgctggatgtcaagtcagaaccatttgactgagacccaggaggacctggctgagagccccttctttgaacccctctgagatccatgttggggaggctgtgacccttgctttcttggaggcctcaatgcctcacctccttttctttaatttactattttaactgaaacatatgccagagtgtgtgtctgggccgggtattgtggcccacacctgtaatctcagcagtttgggagactgaggcagtaggatcgtttgaggctaggagtttgagagcagcctgggcaacgttgtgagaccccgtctctacaaaaattaaaatatgagccaggtgtgatggcatgcacctgtagtcccagccactcaagaggctaagatgggaggatcacttgaacccaggactttgagactgcagtgaggtatgattgtatcagattgcatcgctgcactctaggcgagaccctgtctccttaaaaaaaaaaaaaaaaatagccgggtgtgttggctcacgcctgtaatcccagcactttgggaggccgaggcaggtggatcacgaggtcaggagttcaggaccagcctggccaagatggtgaaaccgcgtctctactaaaaatacaaaaattagctgggtgtagtggcaggtacttgtaatcccagctacttgggaggctgagacagagaattgcttgaacccaggaggtggaggttgcagtgagccaaaatcatgccactacactccagcctgggcaacagagcgagactcagtctc

SEQ ID NO: 16859 - DNA, 1888 bp, Homo sapiens
acaacatcagaaacattttacctagagtgaattctacatataatcattcagggggaaaaatgtgaaaccaagtaaggattataatacttagtttattcttctcctttggcaaactttataaaggctctcaaactttgctctgaaacttgattcaaaagttgaaagatccaagcctgagttatttttgcaactactctttttgcaacatcagggaatgtttctctgtttttaatagggaaatgttaaatttccctcttaatatttaattaattttaacagagcattaaaaaaggatcttaccgattccaaattggagattgcatctctgtgctcccacaaaacccctgtgttggtttctatcacaggacacattgctcttgtcttagtgtatcaatctgtgcccttgtttgtgccaagtaccagatgataaactcctcgaaagcaggaagagtgaggtgcctacctttatgtcctagtacccagcacagtgcttggcaggtagaagttattcactggatatgtttttgctgaatgaatacatcaatgaaaggagatgcagactttaaatctacggtataaaaagggttgtaaaatacagaagcaatacaaattaattagaaaataaagtgttgacacactggatcccatttaagtgtgcctatctccatttcatttttgaagttctttgggttttgcttgagatattcattcctcctttcccagaggttccctgctctccaagcaatctgagctggatcgggctgcgttggacaaggtgacttctaagctctattcgtacgttcattcagcaaatacttccaaagcgttttctccagacccccttgtgctactgaacggtgaacgctcatttgtaagaaacatgcatcagttacagcacttgaggatgtcactgtgcccattcaacaccacaaagagtaggaagccaggaagtaccaagtgaaagtgtggggctgtctttgcgtagtatcctgctttttatttcctgcaatgctgaacccctttctaatacattttctagcaaaatccatagttcccttctttgcattctcatgactcttcagtcatttgcaatcatggagcccttctcatgtgccagggactactctagtaagcattttatgtttttcattcgtttaatccttaaggccctttaattctacaaggtgagtgcagttaatatcgtgctttaaaaataaataaatgaagcacagagaggtgaagccacttgctcaagctgtcctgctggcaagtggcagagccaggatgtggagcctggcacctggctccagaatgcagtaccctgtgccccctctcttttgacagaggatgtgctttgttcaacttctaatctcaagcatctgccatgcatctgctatgaccctctcttggtggactctaatagaagaatggaagaagaagtcttcataattaagatattaaagaatggtttattctcctgctgttgtccctgccacattatttccattcttctttctgtagtctgtcctgacacccctatcttaattaagtctccccattatgttctctgagcatccagggcttctcttggtagcttttgttacaattaattactatatattaatttgtgcaacatctgcttgttgttgagtccgttttaaaccccaagaggacagatggggagcactggttgaccacgtagccagccctgcacttggctcagagtgggtactccgtaaagacttgtggaattaatgaatgagtcatcattgactttactatgtggccacatcatatcatttaagcacccacataattgcttatgaataacagctctctttcaaccacttagaggaaaagacacctgctctatgaggagaggaaatgc

SEQ ID NO: 16860 - DNA, 1734 bp, Homo sapiens
aattaaaatatccagttagtctttattttcaagttcaaaaccttattgcgtactgaaaatgcatgaactactggacacttttacaagcttactttcacaggagtctggtaagatacgtgctattctcatatttttctcactagagggaaaacataaggcatagagagagaggcttgctgagtctggcccagatcaggcgcgttcattcggccgacccttgtgctggctgtaccctgcactgtgatgctctctctgcctcccacatggctgccagagtcgcctttctgagatacagatactgtcatatttcaacttaaaaccatcactgtctccaccatggaataaaggccgctgtctggagcatgcattctcggccttgggcagggccccagcgtcctcctccggagttgggagctgctggccctgcaccgtgccggccctgggctgcccctgctgcttgcccttggagtcctgccctgctcaggctcagcactcagctgcctctgcagatgccctcctcaggggccctactctcctggccacttcactgaagaattggccatttcccgccttgtctgcaatgctttattctcagccctgtgagcctctgccagggcctggctgacaatgcttgcatctggcccctagcatctctcacagcgtcttgaaccccggtgctcaactgcctgagattgaactcagtcaaaccaactcagcctcaaatccaagtgtccagcttctttatgggaaaagcaaaaccactggttctgtggggacacatattctctgcagatacagtggatggttcgaggtctaagggcatgcgaggcctccgtgctgctctccctttagtggatgccagccacctgctgtagctggagcccagggtgggcaatggctggccactgcctgacttgcagacctcccaaggtatcctcaccatcccaaggtcatgacaacctcgcacacttctgcccaggcctaagcaggaggggggcctgtgtgggagagagggcctagcacctcactcatcagagctgtgtacatgaccacactgctgtgcttcagggaggcccagtggctggatgttgagctttgcagacaccagtcaagaatgatgggtagttgggcgcgacaggagaggattcagaatttgccatccaaagccctgtgagacacaagactaaggcccagtgcctggtgcagttctgcctttgacattgtgaggggcgcaccttgggaacttggagcacagggatcttccctggaaatagtctcaggtgtcacttgtcaccctgcattgggacttcatgagactgtgaataactacagtaaaccagatgtgcaagaagccagagtctaggttatagttacttcagactctgtatttaaagattctctcttttttttcttttttttttttttgagacagagtcttgctctgttgcccaggctggagtgcagtggtgcgatctcggctcactttaagctccacctcctgggttcacgccattctcctcaactggaggattctacgcctcccaagtagctgggaatgcaggcgcccaccaccacgccaggctaactttttgtatttttagtagagatggggtttcaccgtgttagccaggatggtcttaatctcctgacctcatgataccccggcctcagcctcccaaagtgctgggattacaggcgtgagccaccgcgcctagcccaaaagttctcttaatt

SEQ ID NO: 16861 - DNA, 2184 bp, Homo sapiens
atcttttggagcttctcctttgtaaaatgggacaggatgctgttttaagatttaagtgcttcttatgcaataggagctcaaagagtgggagctgttgtttattaaaaataacaatatcattatcatattctctacctaaagagacctgttgaaattggacagaaaaggaacgtttctgtcttgataagtcttaaaactccagtaccaagtgcagcattcgtttcttgtgagatatttgtagaatgggtggatagaaggatgggagaggagaggggtctgaagaattcctgtagcaagctaaagaggtatcatcttccaattgagctatttttagccttactcatcatttgtaatcaaaacaatccttttcttagccttactcctcccccacccctgcccccctactacttttgcgatggtaatcgtcattgccaacttactttctttggaatacacaaacagagctgtctctttccgtcatggagattttaacagtaaaaaactcactgcaccattacctctgccttgtattccagacaatagtaaaggacattgtaacatcactgtgtcagcgcaaacaaagaactatgtaattttatcccatattaatacagtgtcacgcaggaggtactatcattagatggcaatctataaaaatggcccctgagaccaggcactggcacaattatttattcttcaattatttattcagtcctaaggatggaaatgctgacagacactgcaaaatgctctacctaccaatttacagaaattgaatgacggaatcatttgtggactgaagtagctttttattgaccctatttttatttatttaaattctcactttcacagcttaactatgtttactacacccacttacatgatagaaatgagaggctgttttgttcataaaagctacttcaaaacaaattaatatttattctgaaagggtcagatcacaaatggaggctttaaaacggcctcaggaacattcaaatcgcatccttaatatttcatatggttttatatttagattggctattttatgtagtcttttttccctttttagtgctcatacctcttgagatcccttttctagccaggatggagggaacagttacacatggcttccatttgcagtaagtaatttcaacttaatttatgtcaggggagatttccagaaggttcccgctcctgtctgctattcttgtgattctaatatattatttgtacatgataaaatacaattcccattaattcacacttaattaagtcataaaagaatttgtttggtcttaactcctaaagtttaaaagattatttgcatttgtattaatactggagtttaaaaattatggctttctttatagatcagttccgattttccctaaatcagttattttcagttttgatttttcaaacacttgggtgagatccaatttatctcaccttctgatagttttaaaagagaagtaattttaatttacattaactttaaaatatttgtatgccaaacactagttattttgaggggatcgaaacaaatcatagcagagataaggaactttcatactttgggaggattttttttaaataactgtatgtttactctaagtagatatgtgtatgcatgcattcacttatgatatgcacacacacacacacacacacacacacacacacacacacacacacacacacacagaaatttatgatgtcctttaagaatcttgggactatcagaaaaaagttaagtgaaataacaattttcaaaaatacatttttgtagtaaaaacgcaccatcggtgttacattactgtataaatcaaatttgctgaagtttataaatatttttatgtttactttaaacttggacataatcagatctatctgctgttgacgacatggctctcaatataaaaataatcaccttttctgcttaaagcctcattctcagaagtaaaatgtgtatgtgaggatattaactagttcataggattgttgtagaaaaccttttacatatgtggatactgaaattcttatggcctggatcagtggcctggatcatagctaatctttatgaaaagatcactgtattattacattgttactacaggtagattttcaccctggtccttgcatgaatcatttggttgtactgtccatgatgtccagtagtagatt

SEQ ID NO: 16862 - DNA, 2148 bp, Homo sapiens
  CDS (1152)..(1613)
ggttcatgggtcaggtgtccacaaagcagacccggatgctgtgtgagccacagtcctctgcccacaaggtgcccggccttgaatgtccagcggtgactttgacctctgatgagccagcctggaagaggacagacctgtggagaagaggctcagggccccaagagcaggcctggcggggtgctgagggcaaggtggctatggcaggcttcatggaggggaggcggccaggagcctggtttggctgagcttgggcatggagtgggtaggcctctggtgcctgcagagcctcatgtaactggcatcaggactacccagttgccgccatgctcctggccccctacctgccttctccctgtgggtctctctctgtactacacacaccccgcctcttgaaggctgtctgcttccatctgacatgcattagaccccacatgcctgcaaacccacaccagggcacactggcttgggagcagatagggttactggttcctgaagctagggagccctcctcatctcagcctctctagttagtaactgtttgaccttgaacagatcgcttgatatcattaggtctcagcttcctcatctgtaaaatgggttcatgtttagtgtgtaggctggtgagagtcaagtgaaatctctgaatatgtaaagggactttttaaaccagtgattcttggccgggcgcagtggctcacgcctgtaatctcagcatttttggaggccgaggcaggcagatcacctgaggtcgggagttcgagatagcctgaccaacatggagaaaccttgtctctactaaaaatacaaaattagctgggcgcagtggtacatgcctgtaatcccagctactcaggaggctgaggcaggagaatcgcttgaacccaggaggttgcagtgagccaagatcacgccattgtactccagcccggggaacaagaacaaaactccgtctcaaaaaataaaataaataaaccagtgattctcagcgctggttgtgcacagcatccctgggacctttaacatctacagattgctggtccaccccaacagagaccaacttcaggagtccagacagcagtccagggggtgagatagtgtcgcctcgtctctctctgctcttctctgctacatacagctaaacggacctgcaaatgatacggcagacggttggtcacaggacaactctaaaggtgggaacagcaaagtggcctggcgaggcagcctcgggacctcaagggacagcagccctgcctgcccactcccacccccacccagcagcaggaggtggcccaggccagcagactcccagcctcccatgcagtggcaggaggtggcccagacctgcagactcccagcctcccatgtggtggcaaaaggtgacgaggcaggtgttttcctcctgcagccacactagcagatgggcaggtggccagcaggcaccccgcagtcctgggagtgaacccaggggcatggtctccacccgtggcaggcatctcccacccccacccagcgacacaggacaccccaagaagggcattttatccccacaggcagcaccggcagggacccaggtgggcagaccggcagctccaggtgaatttagcagaccagaatagcacttcagcaagcattctgaaaagcaaattgtcattggaaccgtagcctccaaaagaacaggctgtacacgcgaaacctaaacagggtgacagcctgctcaaatagaggatttaacacttaacaagatcagtcttctaacataatatccaaaatgcccaggatactgcagaaaaattacccgtcacaccaagaacaccgaagatcaatgatttgaatgaaaaaagacagcagaaggcccggcgcagtggctcacacctgtaatcccagcactttgggaggccgaggaggacggatcagatcacctgagatcaggagttgaagacgagcccgatcaacatggagaaaccccgtctctactaaaaatacaaaatcagccgggcatggtggcacattcctgtaatcccagctactagggagggtgaggcaggagagtcacttgaacccgggaggcggaggttgtggtgagccgagatggtgccattgcactccagcctgggcaacaagagtgaaactccatctcaaaaaaaaaag

SEQ ID NO: 16863 - protein, 154 aa, Homo sapiens [sequence omitted]

SEQ ID NO: 16864 - DNA, 1914 bp, Homo sapiens
  CDS (1397)..(1696)
gtacaaaaggacatgatattccatgttagctatatttctctctgaaaaaaaaattccttcttttagaaaagtttatcaaacatttaatctaggagaataaactattgacaactacagaatttgttcccgcagaaaatacctaaagtctctgctcatttcatgtttactaatatttcattagtcaaagcaagtcacttaaccaagctcaaagccaagagacagagatatatatcccatctcccacattaacacatactctactgagagttacattcaagtcatatggtaaagtttatggatgtaaagttctattatagagagggagtgaagaattagagaaagtaatccggtctatcacatatattattggtttggactcagaaacaaatggtttgaataaacaacttaagaagcctgatgagttataagggacttttgtgttagtgattgataccacatttacaatcacagtctctctaatcactttcaggggttttcatcatagattacttttgaattcatcaattatggtaagcactgaatagaaaataagggtcagataaaacacagtaggttagagatgaagagtgcgaattctattccagctctatcactgagggtgaaatctcacacatttctactgattttctcccccctcagtattatgatctcaaaaaaaggagtactactcttcttttttattttttcttagtatagaaagcatacaaaaggcattgtagaattctgtgcgtagcataaattacaagaggacgattaaaatccccacaatcgtctagaagtaatttgttttcaaactttggggatatacctttctaatcattttttttcctgtgcatatataccctttttgtttttggtaaaacactgtgaacactgtttctacttttgtctcttaaatctgtgttgtgagtaacattctatgcctttaaataatcttcagtgtcatttttgtgaagatttattccacattcaccatcctttttttgtgaaatttaaatcagatgtcataaagtctttaaaaagcagaattactttgaaaataaaggtattattattatagaattttagagattaaagaaaaaacagaaactaacatttaatgaagacctactctgtgccatgccatgtgcttagaactttgtttaagccatttcatttaataacctttcaacctaatgaagcaatatagcatgatggttaaactctgtgagctataggctgtcaagttcagctgcacagcggctaactagctttatgacttttcaaatgtttatcttctttttggcttagtttctctgttacaaagtggcaataataataatagcactcacttccaaaagattgttgtaggattaaatgattggataggttcaaaatgttaggaacagtagtattcaataaacatagttattatttgctacctttcccactactccataaaccctctattaaaatacaaatccacattgattttaactgctttggtgtagaagtggattctaagaagaggcaatgtgaaataaatggaaaagccaaggattttatgttttttaatcctggctcccagccttctaataattttgcctctgggaattttgtcaagatttacaggctgggcgtggtggctcacgcctgtaatcccagcactttgggaggccaagggaggtggatcacctgaagtcaggagtttgagaccagcctagccaacatggcaaaaccccaactctactaacaatacaaaaattaaccgggcgtggtggcacacgcctaatagtcccagctactttggaggctaaggcagaaggatcgcttaaacccgggagacggaggttgcagtgagccaagatcgcaccactgcactgcaatccgggttacggagtgagactccgtctc

SEQ ID NO: 16865 - protein, 100 aa, Homo sapiens [sequence omitted]

SEQ ID NO: 16866 - DNA, 2024 bp, Homo sapiens
aaataagaagaccaccattgaaaaactaaggtaccctgggtttagcttgtcatctgttctagaaatggtggctcagaggctgggtgcggtggctcaagcctgtaatcccagcactttgggaggctgaggcgggcggatcacgaggtcaggagatcgagaccacggtgaaaccccgtctctactaaaaatacaaaatatcagccgggcgcggtggtgggtgcctgtagtcccatctactcgggaggctgaggcatgagaatggcgtgaacccgggaggcggagcttgcagtgagttgcgatcactccactgcactccagcctgggcgagagagcaagactccatctcaaaaaaaaaaaaaaaaaaaaaaaaaagaaatggtgtctcagaaaatgtacagcaaactgcttctcacttcatttttttagcaaaggtcagattttctggatcataaacctgggacttggttcttttttggggggtttcttgttttaaatttctgccagatcagctgcctcctttacttcccttcaaacaacaatgtgctgcttattacataagctagcagggtgtcaggaaattccactgatgtgttttctcccacccttatattagtaatttttatacaacatggagacattgaaatattttcatcagatggggtagcttttgatccaaatatattcaaagacattatcgctgaaatgccagcttcatacaaatcatcttccaggtgtcactacactgcatttctatggagcgtgagaactaatttgacaaaatagaggttttgagggaaaaaccagtatttattttttaatctcctaagagtgttattaggtaatttttcctttgcatgtttagcacactgagttaagtaaactgtcttttgagtgccactatgagcaaagtgtaaaaagtcaagtcagtgagaaggggaaacacgcttggtcagcgggtatgggattctgttgcaggtgtgtgcgcccttcccggccaccccgtggcttccaaccctgtcaggctcacctcggccaccttggaaaaggcctgatgaggaagccgccagattcctacccaccgaaggtgagtcttgagtagatgtgagtgctcagggcacacatgcagacatgaggttttcaatacgagactgaataagaatgggatcctagaggcgctgcctgtgaaatgctgagtcagcctcactaggtcagcaggctctgagggagggtctctgtgatctggggccagagggaggccccacggtgcccccatggaagcccacctagatcctgttggcgcactcagtgccccctgcatgatatggtgcagcatagtgtgagctgtgatcccttcagtcacccagaccagccacatttctggggccccactgggtctgcagcccgagctggctcctgacaccagcccccaatgccagccccaccatggtttccaaatgccaccacctggctttaggtgagccgctttagcccactgttactcttaaaatatttttcaaaagttacatggagctctcagaattgaccattttgctccagccctgagctgaggaagccctgtccaccctgtggtttcagagaactggatccttaacccagagtacctcacggctccctgctgtctcttaaccctcttgctaccctggtgaattacagctagagttcattctaatagttcttccccaccgagtttttctgatgtacccacaagaattcttgaatattgaacttagtcaacaagagtccaaattataacagtgaacaagattggtgtcaaaaaaaataagtgattgaaaaatcattgctgcatatgcagtaggcaataaactgttttaactcccttgatccaaaaaacgcaaagggtggggctccaaggaggaggctgccattcccaataagctttacccctgctcgtccccaaaggtggaaccataagcgagaacggctttgtgtggtagccaaaagcacatcttcattttcgtaaaaaagaaaaatgcagctctatt

SEQ ID NO: 16867 - DNA, 2356 bp, Homo sapiens
ttagaaggtgagattagcataagcagaggtttgagggaagagtgggagcaaggagtggaggacaggaaacaggaaggagactgggctgctggtggggaggaggcaggacaggccctgtgagggcagggcaaagtgggagtcagcgttggccaaagcgagagagccccaggcagtggagcctttgatgtcaggcctgaaggcagtggggactgtcttagaattttatgctgagatgaaaatgtatgactgaaaaattggtctggtggcaggaggtgatcagagtgggtggccgcaagaggcttcctggggaatgggcttcctcagtatccgggtgcagcaggtgggccagaggcgacccatggcagcccccagtgtcaacgtgagcaagtgcaggactgtggacaagactgtgatgccatgcccggggcagagaagatgatggaaaaggagaagttgccccagatccagtggctcacagaagcactcttcctgaggaagagcttgttcttgaagtttgcacccacagcttctcctaggcgatgggcttggagagctgtggtcagcatcaagagctagcctggcagcagggcaaggatgtggctgcgagatggcatcgtggtacccactctctctcggtgcctcagtgtccttgtggaggatctggcctctatgacttgagtgatggtaaagtgagatgatcccatatggcgtttgacgttgtgctgcacacggggtgggtgcccagtaaatgggagtggttattattttgaagatcctttagggaaaaaatgtccattctttaagaagctaaagcagaaatgaagggaatgagcactcagacatcttccactctgcaaacatttttgttaataacaggaaggaagagaagcagccacattttttctgtggttctcatataacattgtcgtgtacttggtggaaattacagagggagctagactttgaaaagccttaagacttgtcaacccagcttatcagatgaggtctccagtatttttcagaaggtaatcacttgagaggctttgtttcttcttatcaattcacaattaatgtgtttttattaaactggcagattataattttgcattagagttctggggctcttaagtgcataaaattcatttgcctacacctttttttcaactacgtatttcaattcagtgtttattggcatttgctaactacatattcattaccttactggtcaaataaaacaatatatgtgtgtctcactcctaaaggatcttatcagaaaggactgtcaaatgatgatagaagacggtaagtgaatgaggactaacaggagtggtctagacagtgagctctccagaactggaaggaagttagaaccgggcactaaaatcctcagcagaggccttgcaaggtgagataagaagccgggttttgaaaaggtggtctggtgtgggcagtgggaggtcagtgtgaggagagatgaccaacatgagcagagagacccgagtgggtctgagcaggcctccaccaaaggatgggcagacctggccaaagagacattttgagtaagtctgagggggcctgatagccacagtccgtgtgactctatttcactcctacgattctatgaaaataggctggaatgatgttttagggggagagaatgggagccaggggggtgttttattttcaaattaattgcatgtgactgaaaatgaaatttcaaagtatatatgcttaccatccaatttgtcttatacttgctgctgaataaaaagtcctgaaattcagtttaaatattggtctttgttatcccaaaatagcaatcataattatggtaaattagttgaattcacctttcatttattttgtagtaaatatctatttcacttaactttagtagataaagtaaccaactattgttcagctttttaaaaagccttcacaatacaattaaaaaaattatatgtagtaactaataaaagtaaaccatttctttaaaattcacggggtgtacttgcaaaacagttcatgcacacctgggaagatggagagagaactatgaaataagaatgcacagggccgggcgcggtggctcatgcctgtaatcccagcactttgggaggccgaggcgggcagatcacgaggtcaggagatcgagaccatcctggctaacacagtgaaaccccgtctctactaaaaatacaaaaatttagctgagcatggtggtgcgtgcctgtagtcccagctagtggggagtctgagggaggagaatcgcttgaacctgggaggtggaggtcacagtgagccgagatcgtgccacggcactccagcctgggtgacagagtgagactccgtctcc

SEQ ID NO: 16868 - DNA, 2461 bp, Homo sapiens
gaacccctactaactgtgagctcctgaggagtcaggcctgagtctgtgggtcatctagcacatccttaatagaatgattgcctggatgtgaccaccctcacccccaaccctcacacaccctgccagcatgcctcagaccttaccccagctcaagataagtctcagattgcaggatacctgctgcagggaacaaaggtgaatgattgtcttgtgagcctcctgttgactgattctgttttacatggctgcacagagcccttgtggttatttggggttggggtggtggcttctgtattagtcacttctgcatgaaccatttcactcaggatctgaggccacagttcctttcttagtcactgatacatctggcagacttgaaattaatcagacaaacattgttcatagttaacatatccttggaagtttctcagctataaggaagaggtcttggtggctagggaggcctttctctgtatcctgttctatccagtgagagcctagagggtgctgcccagccatattctggctagcctcagcggttctcctgaaaaaaaattggcatctgacaacctggatggtgactataggtagtcaaatccagctggctggtctcctgggggttagcttccatggagctgcaagtcccctgaaatgatactggcagtgttgggacagcgtgtccgaaggcctggttttttcagaactggtctcagcaaaatgtctcgccaacttctacagttcccataagtacatgataactgaaacacttctagagccccccagcaatgggcttgtgcttttagtagaatatgtgcttgcttccatttaggggtaagaaggtgggcccctcaccatatgctgcacagagaagagagacaccatcactcatttattcatttaacaagtgctttccaagccactactaggtgccaagcacttcctaggtcctggggatacagtggagactaagatggagccagttctttctcatagggatctcacagcttagtgagtgagaaagccaaagagtcaaaatacagagagggtctgaggggcccattttgagagccatcatagtggtgaggagtgtgagtgctagagtcaggctgatcaaatcccagcctgccattggctagccttgtgactttgagcaagttatcttacttcgtggaacctcaggtttctcatccataaaatggggaagttggatagggtattatgatgattgaaatgcatttatacatgtaaagcataagtactggctcagggtgagcactcaataaacggcagttatacctacttttattaggaagtgatacaccttgagcaaaaccccttagagtataaggcatagcattcttacatatttttaaaatttaaaataaaatttaaaacatcttgccctttataatcagtccgccacaaacaagagatggagaaatcacccttccttgttttgtatctatggggtgcaaacatttaatcctcccaactgtcaaaaaagtgagagtttcacagcctgttttacagcagaggaaactgatattcagagaggttaagtaaatttgcccaatgccacacatctaataaatggctgagctggaatcaaggccagctcttacttggctgcaaaatccatgttttatgcagctcctccactatcttggcctccaaggcagctggctttgaacactacccttgcagcccagtcagccaatcccttgctctcctgaagcttttgctggtgggccagccccacctgctttccttgtgcactctgacttggaccctgaagtgagaagagttggcacaggacatcttacttccctgaaaacagtacctggacttttctgtatcttcacatccattgggcattgggcaaatgggtcatgcagatgaaaaccatccaagataagagacatgggagtgaaattcacacccactctggctttcataccatgggtctgaacattagcccatggtatttcttggccatactgacctgtgccattccagctgcattcatctcagttggtgttgtctgctggctgctctttctgatttcccacaggagcagtaagaacctgaggaagagtagggtcagaggagtctgggagaatgaggaaatatgagagccccaggaactgaaaaggcctgtgagagactctgagcttcctgggaacaggcgcagtggctcaagcctgtaatcccatcacttcgggaggccgaggtgggcagatcacgaggtcaggagatcaagaccatcctggctaacacggtgaaaccccatctctactaaaaatacaaaaaaattagccaggcatggtggcgggtgcctgtattcccagctacttgggaggctgaggcaggagaatggcgcgaacccagggggcggagcttgcagtgagctgtaattgtgccactgcactccagcctgggcgacagagcgagactccgtctc

SEQ ID NO: 16869 - DNA, 2944 bp, Homo sapiens
  CDS (400)..(705)
acagtatcaccatgcctctcatagcgccacgacactagaagaaacctcactgattgctgtccctgtctacagtccaagaggatttcaaatgggcccacacggtatagctgagaacccgaatcccttgctgatgccagctcattttctttggtctcatcctcatcactcctccaagaaaactacccagtccagagggacttgcttttgctataagtgggttagatcttgagataaggaaatagcaaaatgttggtgtaacattgagtgtggaaatgtggcctgagggaagtgagtgctggcaggagctgaggaccctgttgggagggggccgtgaaaccttggcatagacctcgccagcacagctgtttggaatggaggcaggaagggcaggggaaagccatgagagagggaattttcaagatggtcagtgttctcaatccacagccatcacagaagaaactaatgaaatatgggtacaatctggagatttttaagtctctaagaagtggaatttgtgagacgaaaggcttccagaaagctccctttctgacctggcctctacccctagagggccttagccttgctgtggggaatgaaactcttcccggttgtagggttttggtgctgtccacccccagcccagccagaaatgtggcttctgtacttctgctgcagttcaagccacttttccaggtatgtcccatctgagtggagatggggctgacggcaggccacagggccaagctcgggcacggggccggtagctgggactgaggctgcactgctgattaatgggcagggaggcactttgtgaaacgtgcaataccctttgacggccttttccgggggactcgcagctttcctcgtgtcttttcagcaatatcacatttgattttacctttaaaatgtattgatgaagctgcatgattggaaaaggtgctgggggagatgaatctctcctactttccgttctgtttccattacttcaggggtgtgtacgcatgagtatacacgtgtgcgggcgtgctgtattagagagcccaatttcctttatatacgtgaactcctccccctagtagccaccattaaacatccaacggctttaaaatggttagtgagaagtacacaacataatgtcagatgtggccctgagagaggcgtactgctcactgccctgctttaacccgttggctgtttaatggtggttactaggggcaggagttcacgtatataacagtcatttttccaaagtttccagcaccaagggtcctcctgctccttaccacactgcggagccttctacatctcttcatactgcttttcttccttgattattttttgtttcaagtatttcttcctccccctttctcctggtgtctcagagttagcaggaagctggtaattaaaagaagacatgggttttgaaatgctgctgtggtagctcttccccccccttatccattttacaacagaaacaaaaagactcactccttttcttttgctcctccctctagcagagtaatgaaagcggaatgttgtttgcttgtttttgtttttgagtccactaaatcattattgttacactgactagctgggtgaacttgggcaagttagttcaaatttctgggcctccttttcctcatctgtaaattagaaaaagtaatgcctagttcatagagttgtgagaaagtgcacaaggtaagtctaagtgccttccccatcgtaggtatgaaatgcgtgtttccttccacctctcattttacttgggtctgtagacctaataagtgttccttttcattggatttcagtttaatttaatatgttttaagcacctagtatgtgccaggtcttgagcgccagggtctgcacaaataccagataggttttctctcttcaagagcagcctggtgctgaaaccaggaatgtgataaacggtcgcacaacagtgtgaaaggtgtcatgggcactgagggaatctggaagaggagcacctaggattccttggggacagggtgggagggtagaagaatgtgtccctaaggagatgacaactggtcaagagcgttaaagggtgttggcgatgggagaagggtgttctgggaagagaggagcatgtgtatggaaatcgttgtgtgttccatgggagagaaggagcgtcggccaccgatgggggatgaggttgagtgcctgagaagagtctagatcaggaacagcatcgtatgttacagtggagacttggtttgaaaactactgaaagccattaatggagtttaggagcatcatgagatgataaagattttacctgcagcacatcaagccagctctaagaaatcctgtgtacacaaattgcctctttcgaatcaatgtgaagtcagagagcccacaggccagcagtccagttctgccactaattagttttgccgcattagggaagtctcttactttccgatggtctgagttgccacatctccgaaattaaagtgttggagtaggtgacacccatgtttcctcccagctataacagcagcctatgactctgtgatgatgtcactgctttttggcgcttgtttcataattcctagagttaacttattaaaattgctgtgcaagcatgatgactgtcccctagtaaacatcaagtgttcttcttcatatgttccatatgaaaattagcttcttgggccaggcgcagtggctcatgcctataatcccagcaatttgggaggccaaggcaggcggatcacgaggtcaggagatcgagaccatcctggctaactactaaaaatacaaaaaattagccgggcgtggtggcgggcatctgtagtcccagctactcaggaggctgaggctggagaatggcgtgaccccaggaggtggagcttgcagtgagccgagatcgcgccactgcgctccagcctgggggaacaaagcgagactccatctc

SEQ ID NO: 16870 - protein, 102 aa, Homo sapiens [sequence omitted]

SEQ ID NO: 16871 - DNA, 2491 bp, Homo sapiens
atggggacagtaacagcaaaagagagatcactaaaggaagctctaaactttatttcaaatttcaacaataacagccaccagttattgagcaactactgcatgccaagtacttcactaagtgctttgcatatttttcctcatctgttcctaacaaccccacaggttaactaataaagtccttatttacagataagtaaatagagaattcgaagttaagtaacttgttaagtaacttttctgaggtcccagccagtaaacaagagagcaaggattagtactggcaagggctctagtcaatgaactgacaaaccaagccttctttaagctttaggttcacaggcttacactgctggtgctggatccctcacatgatggtatcagactctggggaatcaaaatactgtcccagtcattgccagagagaattgagatcttcagtttgacccccggaatttttaagactctttcagaatacctcagaaacttaaggaaggaaacattttatttgactatggtaacaaacagcacaacctacaagacttttctggctctaatatggatgattcatctatggaagtatttgcttagtaaacctgacatgcttcttaccattatcttggcccagaatcagagagtaaatgctccgaagcccaaatacattgaggaagtaccaggatgcagaactcaccctggcaaagcaaaatgaaaatggtgtggttagttattatatcagagagtaatgcagttcccacttccctaccacccaaagttgttcagtgtttgtaaagaagtcaccttggatgggctatattcatccaaagcacaaccacagaagaaatacaagttgttaaagcagtctcaccaatacagaactatatttcaaaaaatccaaaggtgactcccattctgaattccattccctagaggaaatcacaagtgttggtgtgttccatacttttttttttttttgagacggagtctcaccctgttacccaggctggagtgcagtggcgcagtcttggctcactgcaacctctgccacctgggttcaagagattctcctgcctcaacctcctgagtagctgggactacaggcacacaccaccatgcctggctaatttttatatttttattagagatggggtctcaccgtgttggccaggctggtctcgaactcctgacctcaagtgatccgcccacctcagcctcccaaagtgctgggattacaggcgtgagccactgggtgtgttccatacttacaagaagggatgagacatggatttcaggaaatacagtaccgaggactatagctactgggagagccattccaagttttgaactatatcactgaggcttcctttagcttaggtttcctactcaacctccataaaataaatatgcttgcatataataaaaactaaaaacaaaaatgcatatgggaagtgatagataaatggaaagatccacactcattccaacaagtgggtcacataagggcaagagtctattctggttactccataggctgcaggtaagtaaatggcctgtctgaatacaatgttgctgatctcaccacagtggtaattgtacactcaggttccagtctcgcgtctgtccatgactgcatttcagtcacatgcctctctggatgctgagaaaagataaataagcttttctccaacccatgaagtttttgtttagcccaatgagactgaaggtaaaagtagaatagactcatgctactcatataatgtacagcttttcttctctagcagaactgtgcatggcccagccttcccagcctctggcctttcctgctcctcccacacatcctagagggctctgctcaaaccaagtagtcaagattaccactagtaatccccattttgtccatttttcttttcctcttgtttatgccagtctttgggaagccacaggcaagagtctggagaggctacatgaagcagcattactaggttccagatattgtagcagtattttctaagagcttttcagattttaatttttcttattctgccattcaaaaaaaaatagtggtattcagaaggagaaatctcttttaaaaaattataaagagtggtaagtaacacatgggtgctggatttgaacagaccttgtcatcaaatgtcaattcctacacaggtttcataggttgctatgagggtaaaatatggaaaacgctaagcccagtgactagaactaatgaaaactattatcattagtagtaatgtactttggaaaaaaaaaaatacaaacttccactcccataagctcaagggtattactaaaaatgattgcctggccagaattcctggcttaaacttgtaactttctgggggttgatacatccacccctgcattcttaagcccccaattgtgatagaaaagaggtgacacattctttccttttgctagactcatgtaaaagttgccataaaccacccatggcattttcagtggagtttcaatg

SEQ ID NO: 16872 - DNA, 2828 bp, Homo sapiens
ttcatgtagatatgcatgactcttggccagtgattctcaacctcggctgcacattggcatcaactggggaaccttcaaagctcctggcatgtgggttccaccctcagagattgtgatgtaatgcactgacagtcaaattgggaacaactgtaaattggctcagttcattcatcttttactgctgtacagaagatttcattgtataagtacttcacaactcatgtactgatttctagttgatgaactgtttcaaatttttgttatttcaagcaattctctaatgaatgttgttgtacttgtctccccttgaatgttcctctggggtatatactgagaagtttgaattggcacatcaaaggttgagcatcttcacctttaccaggtattatcaacatatcgttttccaaagcatttacagaaatgtgtgctcccaccacttctctgcctctttgacaacactcagtatgatcacacattttttttttgccaattttatgcatgtgaaataattttattgttttagttgtttatttatcttagagaaaaggtcttgcagtaggctcctaggctggagtgcagtggtgcgatcgtggctcactgtaacctcagcctcctgggctcggacagtcctctcgcctaggcgtcctgagtggctgggactacacttgcgcatcatcaccatgcccgggtagttcttttgtttttatttttagagacagggtcttgctgtgctgcccaggctggtctcgaactcctggcctcaagtgatcctcatggcttgaccgccccaagtgttgggattacaggcatgagccaccatgtccagcaattgttttattgttttaaattgtatttacttgattatgagtgaggtttagcatgtaagttactgcttctatgaattgtcttttgcctaatttttctattgttcttttgctctctcttatcctttctctctctctccctccctccctctgggctcctgtctcctcatttgtggactgtgcaattgctgacaccctgcacagctaggccctcaatccagaaacagctgttgacatggtatttctagtgccttcccaaagtaatactgagtacatcacagatccattagccaacccatgtagtgattgagttacttcttggtctcctgtaccctgagccccagacagtgagtctatagctttccttcccatctcctttcaaaaacagggaagtaaagtagccccaccacagtccctgtctttaaaaagtgatgcttgctctggttctctggctttcatgaagcattttcagatcttgctgccatccctgctccagcctactcactgctagtgtttctgtcctgtttctattccgtgagacaactatcatggttgggagtccagaaagccttttgtcaatttttctacttgatccttaccatagatatggcgcaggagggctaggtcagagttagaacttactacacatcttgaacattatatgttatgttttatggtgaaaaaattttaaattctattttagcatctaaatttgcatttaagatgtcactttcttctcaatttattttttctgcaagtaggggaaagagcctgtgagctggatggcagagaaaactagtttttaaattaatattgccaaatatttcagtaaccaaccaactataaaacataataagagctgtcacaattagtaaagattagaagcaatggtaactctcatacagacacccctgggaaaatatgatttacctgtatgctttgtatttttgttccttgaacgttttttggaagcaactgcttccagaaactttcctttgaatagtcaaaaaatacagccattggtgtattattttgttgaatattaaaccagacctatgaaaacattaatataacattagtgtaggtccataggaacacaaggcccatcgttggtaaggaaggagcaaaattttacagtcttactactcaatgaagtggcagaatcccagcggggttctgaggcaggagataaagagattctagggtttcatgatcattagactacctcaatggttctcatccttgaaggcactacacaatcacctggaggagctttagtgataaaagattgctccggccccatgccctagggaatctgatagactatctatatttaaagttccccaggtgattctagtgtgtagccagggtgactctagaggagataactcaagattttttttccccatatacttacatttctatcatcaaacaaacaatctacactttttaagggacaaaacgggtcaaactgcttataacattggccagttgatggattccaaagcaaatattcattagtttcttgagttactacataagccacatgcccctgtatgagaaaaaagaaagtaatttttggtggatttaaataatttctatatatggaaattatactgtgatgattctaatttttaaagccttttttagtggagtgtagtggcttgtacctgtggtcccggctctttgggaggctgaggtgggagggtcacttgagcccaggagtttgagaccagcctgggcaacatagggaaaccctgtatctatcacaaaaaaatttttttaaaatttgctgggcacagcggcacacacacctgtagtcccagctacttgggaggctgaggtgggaggatcgcttgagcctggggagttgagactgcaatgagctgtgataatgccgctgccctgtggcttgggtgacagggtgagatcctgtctcaataacaaacaaacaacaaaaataaataaaagcctttttgagggcttttacattttctttgaaat

SEQ ID NO: 16873 - DNA, 1985 bp, Homo sapiens
tctctccagctgcaatggaagacttgtctcttccccttctgccataattgtaagtttcctgaggcttccccagccatgtggaactatgaatgaattaaacctcttttctttataaattacccagcatcgggtatgtctttatagcagtgtgaaaacagactaatacagaagtatatgttaactttctctgctgagcatgttggtgcttgcctgtagtcccagctacttgggaggctgaggtggaaggatcatttaagaccagcctgggcaacatagggagatcctatgtccaaaaaaaaaaaaaaaaaaaaaaaaaagcatgttaaatttttcatcagagttgacagcttctcaaatggtcagtttttgttatatacattgttgaggctgtgtgttagaaactttcagattcatgaacattattcaatgttctttgtagtttgttccttttattgtaatatagtctctatccctattaatgctttttcgctactgatacctgacttttttccccttaatctttgacttgtaatatgtgagattaatctatttgaataagtagacttatttctgctctctgaattttatattttctgatccatttactttgctgtgtgtgtgttttgtttttgtttttgtttttttttttttttgagtctagctttgttgcccaggctggagttgcacgatcttggttccctgcagtctcagcctcccaggttcaagtgattgtcctgtgtcaatctcccgagtagctgggactacaggcgtgtaccaccatgtgtggctaatatttgtatttttagtatggatggggttttaccatgttggtcaggctggtctcgaactcctgacctcaagtgatgtgcctgccttggcctcccaaagtgctgggattacaggcctgagccaccgcgcccggcctctttgctgtttttttcctcttctgttagatggttagttttctgcactcctttttttccctccctcttgattcgaaagtcatagactatatttccattattttaatggttactgttaaaattttcagttacgaagttttctactaaaaatgtgggcctaactggcttctaggatgaacccagctctggcacccagtctcttttactctgtttttcttgtgtggagatactcatcttgtatctcatctcagctttgtcttttggttttctcttttttacagttgcctttcatagctacatatttagagtaggagaagtcttcctcagggtgaactcaatgcatcatctctacttcagccattctttcactctactggtttgcatatctgcacataatattcagtaaatacttgttaagaagtgtttcttatatttttttcctttttgttttagttttactcacttttttcagcttttgatggaaaggagagaaagtggagataacaggaccaaccacatctgtagaatggtttttacactgactgtcgacaatcagggttggtggagtggtcagggtaagaaggaggtatagagaatttagtctgggacaaaggaactgtatggtccaagtgtgaattgacacttattatgacaatattatggcaatattatttattgataatattctaataagactgcctccattttgttaggtttgttttctgtttttatacacaccgaagtattaaatagatgccagttatttttgtagaaaacaggagggctacactgctgtattgtagctatgatgatggcgaccgcgttttacaaacatttgtgttctcctaacatagtgattaattactaggacaggtttgagatggtggcagttacaaagagcatctggctggagatgagtttagtgttcgcatatacccctactcactcctccaccatcttcccctttcagaaaccgagagaggaggtagctgatgataccaataaacttgttatgctttgagatgtatctctgtaactagcaagtgatttccaggcattttt

SEQ ID NO: 16874 - DNA, 1703 bp, Homo sapiens
aagtagatataatagggtaaaggagaagtggtggtaaagacgaaaagagtagggaacaggtggttgaaggaatcagattatccccagtagaggggaaatttatggttgtttgctttagaataaggagttagttgctgaaataaaagagcattctaatataagtgctagaagctattttaactgtatgaaatggatactgagccaagatggctgaataggaacagctccagtctacagctcccagcatgagcgacgcagaagatgggtgatttctgcatttccaactgagggaccgggttcatctcactggggagtgctggacagtgggtgcaggacagtgggtgcagagcaccgtgcatgagccgaagcagggcgaggcatcacctcacccgggaagcacaagaggtcagggaattccctttcctagtaaaagaaagaggtgacagatagcacctggaaaatcaggtcactcccaccctaatactgcgcttttccaacgggcttcccaaatggcacaccaggagattacatcctgcacctgtcttaaagggtcctacacccacggagcctcactcattgctagcacagcagtctgagatcaaactacaaggtggcagtgaagctaggggaggggtgcccgccattgctgaggcttgagcaggtaaacaaaacggcccggaagctcgaactgggtggagcccaccacagctcaaggaggcctgccttcctctgtaggctccacctctgggggcagggcacagacaaacaaaaggcagcagtaatctctgcagatttaaatgtccctgtctgacagctttgaagagagtagtggttctcccagcatgcagcttgagatctgagaacaggcagactgccacctcaagtgggtccctgacccccaactagtataactgggaggcaccccccagtagaggcgggacacctcacacggccaggtactcctctgaggcaaaacttccagaggaacaatcaggcagcagcatttgcggttcaccaatatccgctgttctgcagccactgctgctgatatccaggcaagcagggtctggagtggacctccagcaaactccaacagacctgcagctgagggtcctgactgttagaaggaaaactaacaaacagaaaggacatccacaccaaaaacccatctgtacatcaccatcataaagaccaaaggtagataaaaccacaaagatggggaaaaaacagagcagaaaaaccggaaactctaaaaatcagagcgcctctcctcttccaaaggaacgcagctccccaccagcaatggaacaaagctggacggagaatggctttgacgagttgagagaagaaggcttcagaagatcaaactactccgagctaaaggaggaagtttgaaccaaaggcaaataagttaaaaaccttgaaaaaaaattaggccgggcgcagtggctcacgcctgtaatcccagcactttgggaggccgaggcgggtggatcacgaggtcagatcgagaccacggtgaaaccccgtctctactaaaaaaaatacaaaaaattggctgggcgcagtggcaggtgcctctagtcccagctactcgggaggctgaggcaggagaatggagtgaacctgggaggcggagcttgcagtgagccaagattgtgccactgcaatccagcctgggctaaagagcgggaatccatctc

SEQ ID NO: 16875 - DNA, 1719 bp, Homo sapiens
  CDS (795)..(1445)
aaattcttcaaactgaattgcaataatgacacaacctatcaaaacctctgggatacaccaaagggagtgccaagagaaaagtccacagccctcaacgcctacatcaaaaagattgaaagagcacaaattgacattctaaggtcacacctcaaggaactagagaaataagaacaaaccaaacccaaacccagcagaaaaaaaggaaataaccaagatcagggcagaactaaatgaaattgaaaaaaaaaaagatacaaagataaaaagctggttctttgaaaagataaacaaaattgatagaccattagcaagattaaccaagaaaagagagaaaatccaaataacctcattaagaaaagaaacgggatattacaactggcaccactgaaatacaaaagatcattcaaggctactgtgaatataaactgtaaactaggaaacctagtttatgcgcataaactaggaaacctagaagagatggataaattcctggaaagatgcaacactcctagcttaaatcaggaagaatgagataccatgaacagaccaataacaaacaatgagattaaaatggtaaaaaattactaacaaaaaaagtcccagaccagacggatttacagcagaattctaccggacattcaaagaagaattgataccaatcctttgatgctattccacaacatagagaaaaaaaggaaccctcccttaattcattctatgaagccagcatcaccctaataccaaaaccaggaaaggacttaaccaaaaaagaaaactacagactgatatccttgatgaacatagatgctagaacccttaacaaaatactagctaatcaaattcaacaacatatcaaaaagataatccaccatgatcaagtgggtttcataccagggattcaggcatggtttaacatatgcaagtcaataaatgtgatacaccatataaacagaattaaaaacaaaaatcacatgttcatctcaatagatgcagaaaaagcagttgacaaaatccagcatcactttatgattaaaactttcagcaaaattggcatacaagggacatacttcaatgtaataaaagtcatctatgacaaacccacagccaacataataagcattccctctggaacaagacaaggatgcccactctcacaaatcctcttcaacatagcactggaagtcctagccagagcaatcagacaagagaaagaaataaaacgcatccaaatcagtaaagaggaagtcaaacggtcactgtttgctgacaatacgattgtttactttgaaaaccctaaagactcttccagaaagctcctggaaccgataaaagaattcagcaaagtttctggatacaagactagtgtacacaaatcagtatctctctttacaacgacagcaaccaagcagagaatcaaatcaagaactcaacccctaggtcaggtatagtggctcatgcctgtaatcccagcactttgggaggccaaggcaggcggatcacaaggtcaggagttcgagaccagcctcaccaacatggtgaaaccccgtctctactaaaaatacaaaaactagccgggcatggtggtgcacgcctgtaatcccagctactcaggaggctgaggcaggagaatcacttgaacccgggaggcagaagttgcagtgatctgagatcatggcactgcactccagcctgggtgacagagtaagactctgtctcaag

SEQ ID NO: 16876 - protein, 217 aa, Homo sapiens
MNIDARTLNKILANQIQQHIKKIIHHDQVGFIPGIQAWFNICKSINVIHHINRIKNKNHMFISIDAEKAVDKIQHHFMIKTFSKIGIQGTYFNVIKVIYDKPTANIISIPSGTRQGCPLSQILFNIALEVLARAIRQEKEIKRIQISKEEVKRSLFADNTIVYFENPKDSSRKLLEPIKEFSKVSGYKTSVHKSVSLFTTTATKQRIKSRTQPLGQV

SEQ ID NO: 16877 - DNA, 2023 bp, Homo sapiens
tatacaaaatataagtaaataggaaaaagtaactatagtaacagttgctattggaattcctctttggatttattagagaaagtaccctaatatctgccttgggtatagatagtgaaagcccaagcattttgggtctggttagaactaaactgtagcaaacaagggaggagtttttcagggactctggaatgggagagaacactgggataactgagaggagccaggagttggtgaagtctttgcattaggggatgtgacacttcacaggcacccctctcccctatgtttttactaaaaactaccaagaacttgatgtgtaaggatttcttatagaggccagtaaaaaggttaagtcatgcaacaggaagctttgcagaaaaacagtctatacccaaggatgcaggagcacagaagtagagaacataaggaggaattcttgagaatttgctggattatcggggacacttcgggctgacacagggagtggggctgggattataggcagagtgtaatcagaccactgaggggcagagagtctctaacatctaagttacatacttatattttaaatttttgtgattttagtttttgcttgctccattagagtagaaaataagtatttgttgaataagttagaaaaatgaatgaatgaatgaattgctttcaggactatgccacagaatgttagagtaggaaaggaccttagggatctattagttaaacctgttgagcaattagttcaatgttgttaggtattgatctcactccaaagataataaccattagcagcaataacaacagtcactgctatgagtgcctaccatgaatcagacagtttacatttataatctctatttttttaaacctttcaagaaaagtgtcattattgctacttttcaaatatgttgtccaaagtttctcaattagtaacccaaatctgcctgtttctaagccggggtgtgcccacctttttggctatgctttttctcaggtcattccaaagacagaccatttaaccactggatctggggcaacaaaggtggatcaatcgtgaatccttcactaaaaagcttgctttgtaatagatgaaacagtttaatttttaaatctagtgttataagggtttaagtagtagcacactgtcaaacttctgttggaatgaaaagaataagaactgacgaccacaaaaaagcaattctgcttaaactagtgtctctcacccttggcactattaaattatcagtacaggcggtccgtgacttctgatggttcaacctacgatttttcaactctacaacagtgcaaaaacaaaaacaaaaaacaaaacaacaacaacaaaaaaagtgttgtcagtttgttcatcgacttatgatggagttacatcctgataaaatagtggttagttgaaaacattaatattttttattttactttaagttctgggatatatgtacagaacatgcaggtatgatgcatagatatacatgtgccatggtggtttgctgcacctgtcaacctgtcatctaggttttaagccccacatgcattaggtatttgtcctaatgctctccctccccttgcccccaacccgccgacaggccccagtttgtgatgttcccctccctgtgtccatgggttctcataaacattaatattttcaacttacaatgggtttatcgagatgtaatcccatcataagtcaaggaccctctgcactgaatatacttcattgtggagggctgtcttgtgcatcaaaggagggttagcagcatccctggcttctacccattaggtgctatggcataccttcttccactgttgtgacaaccaaagtgtctccagacattgctagatcgggcaaaattgtgcccagttgagaatcactggcttaaaaggaaaaaggccattgcatggatgtgcaataacacctttagccatttcctaatgatgtcatttaatcagttaggatttttgttttgtttttagtattttgctgttacaaataaagctgcaatgaacattg

SEQ ID NO: 16878 - DNA, 2084 bp, Homo sapiens
  CDS (192)..(566)
ccagctttagctatgatgcagcaagcacagcagccccttaccttcattccttcttccttcccactttcaatcaattcatctattcttttcctttcttcagactgggcagagagaaagaaaaacagcatcagtatcttctcctaggcccatcgtgcgtagcttgatggtcttgagccctgattgcccaggccatgcccaccgggccacaatcggcctcatttggcatcactggggatgatgggtccccagtgatggcaaagcccccaagtatccctccttttctcatcacccatctgttgtggaagatctgtcacctggggttcaactggatcaggagggaaacagtggggacccaagaacagaatggggctcgtagatatgttctgttgcccatgcagcacgttaaaaaatgtccaacttgcccacacctgaaaatcaggcctctgacttcacagaaaatcaggtacagtgggccaggcgcggtggctcacgcctgtaatcgcaacacttcgggaggccgaggcgggcggatcataaggtcacgagttcgagaccagcctggcaaataggtaaaaccctgtctctattaaagatacaaaaattagccaggtgtggtaggagcctgtagtcccagctactcgggaggctgaggcaggagaatcgcttgaacctgggaggtggaggttgcagtgagccaagattgtgctactgcactccagcctgggcgacacagcaagactccaccttaaaaagaaaaaagaaaatcgggtacagcagatcagaggctgtgccctttggatgggacacacgcagtccacatggctctggtctgatggctcatacttctgtttgggatcgctgagattcacctgtatggaggccaccacgatggatgagaagagggcctccaatcccgagggtcaatacagacctgaacagagaactgggagggggcacccctggatccacctctcctctaaggccacccctcctgcacctacctccatccctaaccctgggttctactgctctgccactgcacagatactacagagcaaaagggaaccaaatgaagacagatcggaagctccaaaccagtgtggctcaccccaaaccagcatgtcttgacggcatagactttcaccaaaccagatggcacgtgtcaggagcctgacaccaactgctgagctcagcccattccccctacacagaggcccaaaccagcttgcagcttttccaggcactcaatccacacctgcaatgtgccaggcgctgcagtctgtgctgggaacaatggtgaatgagtaacctcaaggacagtcccaaatcctgccacctcctctccatctccattcccactgcggccctgcagcccagccacggccccggccccgctccggcccccttgctagtcaccaggctttcactctgaccccagggaacactcagttctccacaaggtagccagaggggtcttttaaaatgtaaatgaggccaggggcagtggctctctcctgtaatcccaacacttcaggaaagccgggaggaaggatcgcttaaggacaggagttagagaccagcctaagcaacagatccagaccctgtccctacaaaaaataaataagctaggtgtggtggcgtacacctttggtcccagctactctagaggctgaggaaggaggaggattgctggagcccaggaggttgaggctgcagtgagccatgactgtgacactgcactcctgcctgggcaacagagtgagaccctgtcttaaaaaaaaacagaaaacatgaccaggcatggtggctcacgtctgtcatcccagcactttgggaagctgaggtgggtggatcacttgaggttacgagtttgagaccagcctggccaacatggcgaaaccccgtctctactaaaaacacaaaaattagctgggcgtggtggcacacacctgtaatcccggctactcaggaggctgaggcaggagaatcgcttgaacccaggaggtggagtttgcagtaggccaagatcgcaccactgcactccagcctgggagacagagcaagactccatctcaaaaagaaac

SEQ ID NO: 16879 - protein, 125 aa, Homo sapiens
MPTGPQSASFGITGDDGSPVMAKPPSIPPFLITHLLWKICHLGFNWIRRETVGTQEQNGARRYVLLPMQHVKKCPTCPHLKIRPLTSQKIRYSGPGAVAHACNRNTSGGRGGRIIRSRVRDQPGK

SEQ ID NO: 16880 - DNA, 1605 bp, Homo sapiens
aatgtgaacaatgcttcagaaaggaaatgaaatgtctgcagcagatagaagtgtgtaaattttgccttcactttagagctagaatcactatgagtggtagcatttcagaatcagaagaatggaaagctcagttgattatcattacacataggagtaaaaggaaaggttcacatttttattgacagctcatatcgaaaagacagctcctcttagagagaagtgaattctcctccttcttgttgtttcttctgccacctttgccctcatacataacgctctatctttatcttcttcccttttccctcctcctttcctgtcttttcttatcttcctccattctctccccatttcctttctgtgctccctctcctttctgcactcacctccttcacctttcatctgtaggtgacactaaaccgaggtttaagaagagccaccttggctgggtgcaatggcttacgcctgtaatcctagcattttgggaggctgaggcaagtggaacacaaggccaggagttcgagaccagcccagccaatgcggtgaaaccctgtctctactaaaaattcaaaaattagctgggcgtggtggcacgcgcctgtaatcccagctactcgggaggctgaggtaggagaattgcttgaaaccagaaggtggaggttgcagtgagccaagatcgcaccactgcactccagcctgggcagaagagtgaaactccgtctcaaaaaaaaaaaaaaaaaaaagccacctcacagagttgatggcagtgtgagtgctgctttttgtacattacctcattcagttctggacacaggaggggtctccaaatcatgctgcgtgggccagggagtctgatggaagaagtcatacttgagttatggctgtctcggggatgctgtgagttgactagcttgctgggaggctggagtctggctcacacattcagaacatttgcaggttactgagacaaccagtaccaaggacttgttctggagactaaccagatatggaaaacactgaggtaggcagaaatcagtttgtgatgggctattgatggtaaactaaggagctaaatggaaagctctggcaaacccttgaatgagagagaaatgatctaacagagaatcctctaacagaagtaggatgaacagattaaaggaaaaagtagggggagaccaggtgggaatctttcgcaccaagtcaggaaggaaatagagttgtcacaaaagctgagggaaggaagaggaggagaggcaaattcaagggactaaagaggttgactctttagaacttggcgatgatgtgaaaatgtgtaagaaagagtttaggaggccaggcgcagtggctcacacctgtaatcccagcactttgggaggccaaggagggcggatcatctgaggtcaggggttcgagaccagcgtgaccaacatggtgaaaccccgtctctactagaaagacaaaagattagctgggcgtggtggcacacgcctgtaatcccagctacttgggaggctgagacaggagaattgcctgggaggtggaggttgcagtgagccaagatagtgccattgcactccaacctgggcaacaagaacgaaactctgtttc

SEQ ID NO: 16881 - DNA, 2759 bp, Homo sapiens
tttgcgaagatggcggcgctgggggtgctggagtccgacctgccaagtgccgtgacacttctgaaaaatctccaggagcaagtgatggctgtaactgcacaagtgaaatcactgacacaaaaagttcaagctggtgcctatcctacagaaaagggtctcagcttcttggaagtgaaagaccagctgctgctcatgtaccttatggatttgacccacctcattctggacaaagcctcaggaggatctcttcagggacatgatgcagttttgagactggtggagattcgcacggtatgaagcatttggcttcttggagttttaggtttctaaattttgagctccaagggtatcacacagtagctctcatttaagtgagtcttcccatgtttaaggaaaccaaatgagaaaaggtatttttctattcatttgctctactttgtacatattttaggtgccttatgtggcaccttaatatagggactctggtgtgtgcttcattttgggaaggaaatataatcctgattaactaccatgttgtaggttttggaaaagcttcgtcccttggaccaaaagctgaagtatcaaattgacaagctgatcaagactgcagtgacaggcagccttagtaagtgaggagaccatcatgaagttgtggggaccatcagaaagttccaaattttgtaaaattcattgggttatttatttcaggtgagaatgacccacttcgttttaagcctcatcccagcaatatgatgagcaaggtaaggggttgtagtattctcctgatttttttctgaggcagctatacctagatgagcctcttggtgatcctggataccctgggattctcttaggacttgattttccaacttgtgtgttagaatgctgagtttgagattccctttttttccctttttatattcccaccaccccagggtactccagctttgggttttcttctcacttatctcatgaatgcttcctaaatttgcagacattgtttcttttgtagttgagctctgaggatgaggaggaagatgaagcagaagatgaccagtctgaggcttcagggaagaaatctgtgaagggagtgtctaagaaatatgttcctccacgcttggttccagtacattatgatgaaacagaagctgagcgggagaagaagcgtctagaacgagccaagagacgggcattgagcagctctgtcattcgtgaacttaaggagcagtactcagatgctccagaggaaatccgtgatgctcggcatccccatgttacccgccagagtcaggaggaccaacacaggattaactatgaggagagcatgatggtgcgtttgagcgtcagtaggcgagagaaaggacggcgaaaacgagcaaatgtcatgagctcacaacttcattcccttacacacttcagtgacatcagtgctttgacagggggaactgttcatcttgatgaggatcagaatcctattaagaagcggaagaagatacctcagaaaggtcggaagaaaaaaggtcagtgaactgctgggacttaggtgatcaggtgcaaggtggggagtacaaattgagtctctttggatttgccattctgggtctcaccaagccctgtagtatctcttccatactgggcaataatctccttaggtgggcttttattttttgctttcctgagctggaaatcagcatcattcacaaaatgaatctctggattctgcctctaaggtcccacagctcctgttcaggcttccctaaatagaactggtaaagtgtcgcttgaaggaaccattatcccatttcaattttattcctactcctcgtcttttgtcctgggaagatattcagggtactgcctaggagaccccacccctgtgagcccttccctctagatgtcctgttttcctgtccctttagcttttccaactgtcctttgcctcattcttggtttcccttcctttcaggttttcggaggcggcggtgattatgggtgtacatatttgtatattttttgtcatcctgagatacttctaatttcattgtatataggtggttttccctggaattcattaattgtttgctttggacatgtggaaagagccttactaataaaattgattttacttatgaattaaagcccctttttgcacatgtattgtacgactggagtcgttgggtttgggatatttttggtgagtggttggtgaaaagggaaattttttttggaagtgcaaaacatttgtattgttttctttgataatatatttttcccaaaaactaaaaattggttacgtcacaaaaagtattgagagacgaggctggtataatcaactctttcaacccatgttgccacaacttcctgtatgatttgttataatacaatacagattgagatattaacacatgaattttaggttttattagtgttatctgggctggccaccaggtggcataagtggttcaagaaacttgagcttggctgtaatcaaaagcaagatagaacctttccacatcagcaagattattcttatctccacttctctgaatgtttttcatttctttctgaaatagcatgaacataaggctgatctttggtcagttactgagggagtttgtagaaaatagtagagtgagtaagaaggctagagtgaagagtcagtatagtcttgtgtttttcagactctgacccccccccccttcaactgagggtcattttaccagagtcaataaaggccaacccttctataaagagctggc

SEQ ID NO: 16882 - DNA, 2089 bp, Homo sapiens
tctcttgcttgtattatttgggaacatcatttaaaaggactgtataatattccattaagtagatggaccatcatttatttaacatgctttggtctttaccccttgaaggcaaggcatatcctcctttccctattaacccattatggttcagtcatccgtgaagttggctaagcttttgaatttaaattttctgtctgcactgtctctttgaggtaatggtatgccagttgctgtgtgaaatgaaacttctttttatttgctttaaactttattaattcaagctttagctaggcatcttgttcttattcggctttagtttgataaaaaaaaaaagttgtgtttatcttcccctgcctggtcttgcagctttggtcctagggcctcccttccttctttcgaaacagatgccactgtggatggtaggttccacaagcatggccctgtccactcatcacagatgtgactcgagcagcttctggagctgcgctctagagggcattcaggtggatgtttccccacctgcaaggtgggatgtttgctggacagataacaagatttgcctgtttttttccccttcccatcacatctatttccttatccctttggtgacccagggtgccctgttggctggatcttaggaactggttgtctcacactttcacctgccccctgcctgtgtctttccccttcctgacttctgttgacctcctgttcccactctactggtctctccctcacagtgctgtcactgcagctatgctcctggcttcccctcaccgagtgagtttttgtgaccttcgcactgtattcatgctttgggacttactgctgtaatgatgtcagtggcggaggttagcagatggcggcagcagcaatgagacctgacatgttctaatgactccctccttcctacccttgctggctgagccaatggagggacagaggtttccttgaggtatttaaggagggggccaagggaaatcggggggcccccaggtgccaatgaggcctgtgacctttgctgctataatatcagtgtttcacaagcagggcggttcgggagcccacttgcagcccatcaaaaattgatttaattgcaatttttcctccaattaggagcactggagcctgactaattggagtaatagagagtaataaggctcagataaaaagccttcctcggctgcctttgtatctcgtgtcagtgcctgtcagaggtcagagagcttgcatattctattaggcagcctggccttcatttgtacaaattagtttacccaacagtaattaaaatgccaatgcgggttgaagagaactgaatacacttgatgggcatgttggtgaacgatgtgacagctctggtggcctcccttgccaaagtgtgtcagcccaggctcagaggctgctggggcctgggccagctgggcggctctaggccagccacggggcacagctgctgagcacgccacttgtgctgccctgcctcagagccactcagttgcttctttcttcttccaggtggagtcatttgttcatttgtccattcattcattcattcaatcaataagcatttgagttttcaatatgtgtcaggcattatactagatgctggagattcaaacaagactaactcttgaagtgtagcccacatgagaacttctgggcgaggggtggtataataacttgggtctggaatcaagactgactgggttccaattccagtccactagttgctacctgtgtgagctagagcaaattaattacctcccaaagcctcagtctcctcatgtgtaaaatagggaaagtggggctgggtgcggtggctcatgcgtctaatcccagaactttgcgaggccaaggtaggtggatcacttgaggtcaggagttcgagaccagcctggccaacctggggaaaccctctctctactaaaaatacaaaaattagccaggcgtggtggtgcgcacctgttaactcagctactgggggtgctgaggcaggagaatggcatgaacctgggagatagaggttgcatgagctgagattgcaccactgcactccagcctgggcgacagagcaagactctgtctc

SEQ ID NO: 16883 - DNA, 2190 bp, Homo sapiens
  CDS (153)..(455)
ataacaagccctaaataaaaatagaggtggactttgctcatggagtgttacatcagttctcccaaaactaattgataatttcagtgcaatctctggtaattatagcagatttttttttttgtggaaattgagaagctgaatctaaaaccgatatggaaatacaaatgagtaagagtagccaaaacagtaagttactcatcccagtattaagactgtgcagctacagtgatgagagtgtagtgctggtaagaggactggcacgcaggccagtggggtggaatggagcccggaaagtgaaccacaaacttttggttcacagaggtaccaggataattcaagggggaggaattgtcttatctacaggtggttctggcaacagagtattcacaggaaaaatggtgaacgttaacccttgcatcatatgcaaaaaattatttgaaacaggtcataagaactaaaaccatcaaacttctaggagaaaatacagggaaaaatctctgtggccttgaccatgcaaaaatttcttgggacacaaaaagcatgagccacaaaagaaaacgttgataggtgggatctcatcaaaatttcaaactctctttctttgaaagacagttaagaaaataaaaaggcaagccacgccctccaaaaatacatgcagtacatatacaggacaaaggacttatttctagaacctgtaaagaactcttagaactcaataataagaaaacaacccagtaaaacaatgggcgaaagatttaaacatgcatttcccagaaggtatatgagtgggcattaagcacacacagggtatcattatttatcagggacatgcaaattcacccatgagctacctgaacatacttgctagaatggtcaaaatgaagaagagacagtcttcattgttgataaggatatggagcagttgaaacgctcacacgttattgataggaatgtaaaatggggccgggtacagtggctcatgcctgtaatcccagcactttgggacgccgaggcagtcggatcacttgaggttaggagtttgagaccagcctggctaacgtggcgaaacctgtctctactaaaaatagaaaaactagccagacatgatggtgaacgcctataatcccagctactcaggagactgaggcaggagaatcactggagatggggaggatcacttgaacccaagaggcggaggctacagtaagcagcagtcgtgccactgcactccagcctgggggacagaatgaagctctgccaaaaacaaaaatagggaatgtaaaatggtaccattgttttggaaaacagtttggcagtttcttattaaggtagacgaacacttccatgtgaccaaacaattcaacttttatttccccaagagaaataaaaacctatgtccatgcaaagactgttactactttatgtataatatcaataaactgaaaataaccctgacttccatcaagaatgaaatggatatttggtatgtttgtagcagtggagtgccacacagcagtaaaaatgaatgattattaatacatacagcagtatctatggatctcaaaaacagggaaagaggccaaacaatgaagtatgtgccatacaatttcatttatttgcaattctagaagctaaactaatccatagggacagaaggcatgtctgtggttgcctggggttgggtgtggagggaaagactccctaccagtgggtacaagggaactttctgggcatgatgagaatattctgtatcttcattgtggcttgatgttatgtttgtcaaaactcattgaactctacacttcagatgggtgcattttaccatatatgtcatctctcaataaactgaattttttaaaaattaaaggaatttacttaattgcaaaagaggactggaaaggaaaggctgccgagcatcttggcctgctgtacccctcttccttcaaaggagggtgtggccacgtccgacagcagagttgaatgaagcctgcatgcttgcacaacatcagaactgtcagaatgtcaagatggaatactttcaattgagttttacaaaaagacaagaaatttgctgggtgtggtggcgcatgcctgtaatcctagcactttgggaggccaaggtgggggaattgcttgtagtcaggagtttaagaccatcccgagcagcaaagtgagaccctgtttttactt

SEQ ID NO: 16884 - protein, 101 aa, Homo sapiens [sequence omitted]

SEQ ID NO: 16885 - DNA, 2103 bp, Homo sapiens
agctcctgggctcaatgatcctcctcctcggcctaccaaagtgctgggattataggcatgagccactgtgcccagccaatttcatgtttttgaaaaatttgtcaattgtggaataagtgggtaaaaatcctattacaacaaattgtaccaagtcttagactaactagaataggaccatttctgagccccaggaagggctgtcggaggtgctgccccacatccaggaggctctgtggtctgggccacaccttcaggaggatgtgcacctactgggagccccaggccatctctaatctcacactagattctcccacccacagatatgtggtctccctgatgaaggctggatttagtccttgttctcagcgaggtgggtattggccccacaatggccacagtacactgaccccgtaacagaggaaatctatagctcgtataattcattttcatggcaagtggctgcatttgtttttggcctcacttggtctgcttcccagaatccctaagaagggaccaaactgccaaggtgggaggatcacttaagcccaggagtttgagaccagtgtgggcaacacagcaagacctcgtctctatatttatttaaaaataaaaaagccaggcgcggtggctcacacctgtaatccagcactttgggaggccgaggcaggcagatcacaaggtcaggagatcgagaccatcctggctaacatggtgaaaccccatctctactaaaaatcaaaaaaattagccaggtgtggtggcgggcgcctatagtcccagttactcgggaggctgaggcaggagaatggcgtgaacctgggaggcggaggttgcagtgagccgagatcgcaccactgcgctccagcctaggtgaaagagcaagactccatctcaaaaaaagaaaaaaaaaaaaaaaaaaagtccaggcgcggtggcttatgcctgtaatcccagcactttgggaggccaaggcgggtggatcacctgaggtcgggagttcgggaccagcctggccaacgtggtgaaatcccgtctctactgaaaatacaaaaattagctgggcatggtgttgcacgcctgtagtcccagctacttgggaggctggggcgggaagacctcttgatcccaagagacagaggctacagtgagcagagattgtgccactgcactccagcctgggcaagcgagactccgtctcaaaaaaaaaaaaaatacaaaaattagctgagcttagtggcgcatgccagtaatcccagctactcaggaggctgaggcaggagaatcatttgaacctggaggatagaggttgcagtgagccaagatcacgccactgcactccagcctgggcgacagagtgagactgtctcaggaaaaaaaaaaaaaaaaaagaaggaaccaaaatgtagtgatcaaacccttccattttataactgggaaaactcaggcctcgtgacaaggcagaaagaccccaaatggtagaaaacagctgctgtaaccccttgtgctcttgtcctcactgaggggctgaagtagctcttagagctagaggggtgttagaggtaaccccgctccagaggactgactgtagcccaaggcaagagagggagtttcctgaggaaggacccagatggtgacctcagggtgggtgaaggaggtattctttgaatttctcttggagttgggagacttgatattgtccgacctaatctgcagtgctgaatcctgtcccacaactaagggggaccaattctcatgtccttgatcctctttgaagcaccttgggcttgtctgtcccacatcatcagtggcattaagcacaagagataccatcttagcacaatccttttactctaaatgttcaggggaggggtatagcagcaaggagagggggtctctgtgatggcccaaggagatatttttgatactgaagacccaggcccccaggggaactgcaggaagcgtctagctcataggcataggcctttcagtaaaggtcacccatccagggatccaggatgtagctggttccaggtgatgaaatcttcccaccttatgactggggaatgtcaggtctagtagcaaagcaaagagaccccagatggc

SEQ ID NO: 16886 - DNA, 3645 bp, Homo sapiens
aaaaaccacactcctatgacagctctttgcctgctccttgcttgatgttttctggaagtgtgtgtggggtcaaggatggtgtggggcacctgtatctactcctaatgtttttgaccctgctgtgttcaatcttcttacacttcagtttcttcattttaaaaaggaaaaggtaatttcttcacagtctcctatgagttggacagaaagtcatggatgtgtaaaggacttcttgatgataagccccaccttcatttttccacggcaccaaacagccctgtgacatctgcattcaccccactcgtttttatttttgctgcagtgaacagcttgagttgtctcttaagagtcatctcatcccttgctattcgagatgacccacagatggcagctgttcagcatcacctgggagttcattggaaatacagaatctcaggccccacccctgaatgtcgaatactgtgtgtactgctctagcttctccagagtaaaagatagtctctataggatgccgtctgctctggcaccaggccccctgagcccatgccttttatctgacgtttgttttgcaacccattacatcacttgcccccgggcatcctttaaatttcatccttggctaattctcattgtaaccggttccagcttgctttaaatgattgggtggatggaattctccccattgacaattgacaggtggcaattaattgttcatgcctcagtgggatgaatccattacatctctttcctgcctaatatttttatctacctccgacttttttgtagggactttgttgatatcctcatgaaggcccatctctcctctctctggcttgtccatcccttgacaaaaccttaatgactgttctgggtaccaaatctgtggcaggagtgtgacccagctgccacccacctcctccatcactggaccagctcatagttgtcccttggacatggggttagtgcccaacaagtgtagtcatttggctaagtgagttactaggagggagaacagattcaatttcctgaggtggtgaggagagactgaaggctttgccagttctttggcctatgccaggctctctggtacttctgcgggtggcatgagctgtgtgaagcgcctctaaatttaaggctccaaagctctccaacacaaacaagactttagggtctgcgttatggacgccaagggaagaaatacaacctcaacatcagtgcctgtcaagggaggcagatgtgagctcgtctgcctgccaccggccatttggactaccttgggcaagtgacctccttaaatggggccgataatgttgctttccttctctccctggcacacagtaggcatttaataagtggcaatgggtattgtccctagagttgtataaaaaaccagctctagcagggcgtggtggtgcatgtccgtagtgccagctgcttgggaggctgaggtgaggatcacttgagcccaggagttttgagtccagcctgaacaacataacaagaccctgtctgtaaaatgggggaaaaagtcagctgtgctttgttatgctgtttaagatattcttaaagaaaaaggcctgattacagaaaaataccattaaggggaaccctctttcagtctctgtgctgagggtagtagtaggctgagtaatggtcccccaagatatccatttccgagtccctggaacccatgattgttaattcatatgacaaataagactttgcagatgggattaagaatcttgaggtggggagattggttctggattatctgggtgggtccttagggagcaggcatgtcggcatcagaggaaatgtgacgacagaagcaggggttggagtgatgtgaggccacaagccaatgaatgcggacagcctctagaagctagaaaagccagggaaacagattctccctgagagcctccagatagaatgcaggtctacagacccattttgggtctctattctccagaacttgagataatacgtttgtgttgttttaagccacttcatttgtgataatttgttacagcaaccataggaagctaatatgtgctccatcgttcatgccctggggagctggctgcctccctgacgtcagcgacccgtggtataggcatgacctgctggagaaactgccctagcttcaaaggcctgagtgtgcaacattggcccttgggaggctgccttagctgctggacttgatctcctaagccttaaaagcgccattcatggagaggggagaaggaagcttccaagttctgagagcccaaaaaggccagaatagctgggcccagcaggagatgtaaggcttcctgttgtctcagatgcaggagccagagggcagcccagctccaggtaggcaccagccacagaactggaaagcccttgggaggctgaggtcctgccttctctatagcttatcttggcccctctctgtgtgtcagcctccctcctctccctgcagcccagctttgggtgcacacctccccatggtggcagaggtcaattccacagtgcctagtgttgacattttcttgacacgagactagtcccaattccaaatgtccaggaggcacttggcccagtctgacctggtgtgataaagtgatgcctgtcagtggataaggctggggccattgctcatgggctagattgggtatcacctttaggataacccaaaaggtggcctcataagaactgtctcagttcatcaattttcacattttagcatctctgatattgagatagagcatacaattgatctcactttaggattaatggtgtcttacaattgctgttggccagatagcagtcatgacttagtgtcattgcctgcctatttgagacaggaatgtgagtcctgtcttttgtctcaaaaacttccattattcttacctcctggtaagatcaagctccagtatcaaaagttgcatagtgggtacccagagagaaaatgctgatgatcatagtgtagtactggcttacgaaatgctagccagggtgcaatggctcatgcctataatcccagcactttggcaggctgaggtgggcggatcgctcgagcccagaagttcaagaccagcctgagcaacatgatgaaactccgtctttactaaaaatacaaaattagccggatgtggtgccgcatgcctgtaatcccagctacttgggtggctgaggcaggcgaattacttcaacctgggagatggaggttgcagtgagccgagatcatgctgaaggaaggaagggagtaagggagggagggaggcgagagagagagaaagaaaaagaaatgctgcattttcagttctattgatggcacagcaggcaacggtgtgtgaaaaacaggcacttaaagactctgggccgggcacggtggcccatgcctgtaatcccagcactttgggaggctgaggcgggtgaatcatgaggtcaggagttcgagactagcctgaccaacatggtgaaactatgtctctactaaaaatacaaaaaattagctgggtgtggtggtgggtgcctgtaatctcagctactcgggaggctgaggcaggagaattgcttgaacccgggaggcggaggttgcggtgagccgagatcgcgctactgcactccagcctgggtgacagtgtgaaactttgtctc

SEQ ID NO: 16887 - DNA, 1861 bp, Homo sapiens
attttattttattattattactttttttgagattgagtcttgctgtgtagcccaggctggagtgcagtggcacgacttggctcactgcaatctccgccccctgggttcaagcgattctcctacctcggcctcctgagtagctgggatcgcgggcgtgtgccaccacacccagctattttttttttttttgtagtgttagtagagacaggatttcaccatgttggccaggctggtcttgaactcctgacctcaggtgatccacctgcctcggcctcccagagagctgggatttagaagcgtgagccaccactcccggccaatatatttgtatttgtaagttcacatcattcaaaaatctttatatctggtttctacctatttgagacaatatcctatgaattggtttttaaattaaaagaacatcatattggggagaagattgctctgtaatgtttgttcaagaaagcagcaaactaggctgagtgcggcagctcacccttgcaatctcagcactctgggaggctgaggctggcggatcacttaaggccgggaattcgagaccaacctggccagcatggtgaaaccctgtccctactaaaaatacaaagattagccggatgtggtggcatgcacctgtggtcccagatagtcaggaggctgaggtgggagaattgctggaacctgggaggcggaggttgcagtgagccgagattgcactactgcactccagcaagtgcaatgagaccctgcctcaaaaataaataaataaagcagcaaactgattttttaagcaaaaaaaaagaaagaaagaaagaaagaaaaaggctgccagtatcatgtgaaatttagagccctacttctaaaataccgttgctgcataagattttaggaattcagatgcatcactaaatattttttttttaagtggtgcaagtatgaaaggaaagggctctgagccaggcgcagtggctcacacctgtaatccaagcacttagggaggctggggtggacagatcacttgaggtcaggagttcaagaccagcctggccaatgtggtgaaatcccatctctactaaaaatacaaaaattagccaggcgtggtggtgcacacctgtaatcccagctacacaggaagctgaggcaggagaatagcttaaacctgggaggcagaggttgcagtgagccgagatcccgccactgcactcctgagtggcagagtaagactccgtctaaaaaaaaaaaagggctgtagactggcctggtggctcatgcctgtaatcccagcagtttgggaggccgaagcggggcagatcgagaccagcctggccaacatggcgaaacctcatgcctaccaaaaatacaaaaaattagccagacgtggtggtgggcgcctgtaatcccagctactcgggaggttgaggcaggaaaatcgcttgaacccagaaggtggaggttgcagtgagccaagatcgtaccattgcattccagcctgggcaacagcgagactccatctaaaaaaaaaaaaaaaaaagccgagcgtgatgtcatgtgcccataaccccaactactcaggaggctgagacacgagaataacttgaacccaggagatggagattgcagtaagctgagatcacgccgctgcactccagcctgggagacagaggaagactgtttcaaaaaaaattaaagagctgataccttttgcagtgggaaattcttaaagttttaagccaagtgcctatttttaactgatcatagtgtgatgtccacagaggcacaatgtatattagtactttcttccatatttggtacataatgaatgcctttggtactcattttctgaatggtttgctctagtagg

SEQ ID NO: 16888 - DNA, 1727 bp, Homo sapiens
gaaaaatagagatgagggctcactatgttgccaggctggtcttgaaatcctgacctgaagtgatcctcctgccttggcttcccaaagtgatgggattacagatacaagccatcacaactggccctccctaaattttctaacagcaaccttatctttaaagaaattgtccgtgtgtgctctgcccatgtttctaatgacatgcatgtgttttttcagcaccgtatgtgccctgaaattgcccgccttttgaccccccacatttaccaggatctggagaatcatccatctgttcttaagtatgagaagattaaggtgagtctgtcttacccgatctttcttggatggtgtcagcaacctaaaaaggctataatttcctcaagataaaaaagcttttcagcggccaggcgcggtggctcacacctgtaatcccagcactttgggaagctgaggtgggcagatcacttgaggtcagagttcgagaccagcctaactaacatggtgaaaccctgtctctactaaaatacaaaaactagctgagcatggtggcaagcacctgtaatcccagctactcagaaggctgaggtgggagaattgcttgaacccaggaggtggaggttgcagtgagctgagatcgtgccatgctactgcactccaggctgggcagcggagagagactccctgtcaaaaaaaaaaagaaagccttcagaagggagtagagccagctttttaaaagctggttactgggagaaaattgaaatacagaccagggttttttaatcccaattctgcctgttagccatgtaaccttaagcaagttatataagaattctggccaggcgcggtggcttacgcctgtaatcccagagctttgtgaggccgaggcgggcgaatcacaaggtcaagggatcaagaccatcctggccaacatggtgaaatcccatctctactaaaaatacaaaaattagctgggtgcggtggcatgtgcctggctgggtgtggtggctcatgcctataatctcagcactttcggaggccaagatgggtggatcacctgaggtcaggagttggagactagcctggccaacatggtgaaaccccgtctctactaaaaatacaaaaattaactgggcatggtggtgggcgcctgtaatcccagctacttgggaggctgaggcgagaggatcgcttgaacctgggaagtggaggttgtggtgagccaacaagaccgtgccactgtacttcagcctacgcaacaagagtgaactctgtctcaaaaaaaaaaaattgtcagctgaggccaagagttcaaaaccaggctggggcacatagcaagactgtctctttttttaaaataaataaataaattctgagtatcaggttcttctggacaataagaataatggctcctgccatatccttcctttttttttttaagaaaaatagaggccaggtgcggtggctcacacctgcaatcccagcactttgggaggccaaggtgggcagatcacctgaggtcaggagttcgagaccagcctggccaacatggtgaaagcctgtctctactaaaaatgcaaaaattagccgggcatggtggtgggcacctgtaatcccagctactcaggaggctgaggcaggagaattgcttgaacctgggaggcggtggttgcagtgagccgagatcatgccactgtactccagcctggcaatagagctagattctgtctcag

SEQ ID NO: 16889 - DNA, 2351 bp, Homo sapiens
gatgccaaaattacttttttccttccaaatatcaccttctgactgtttccaccatggttaagagggctgaataagatgatcattctttagatgacgaattaacccttgcttcttcgaaaggttttagggaaattaacaaaaaaattcccagatgccaacagccaccattcaaaagaccaccaatctattgcatcataccagatgccactctctcttcctagtagggatttctctcctcggtcctgatcaaggtgttataatagagacattttcattatagacagtgtcctgaagggattccagctcaaatataggaattcttaaacctagctgaaactcccaaagtgatttcattgctgggcatattttaacatacttaggggaaagcaaatctttaaacaaagcaaaacaccaaactacagttttaaaaagaagaaaggagagcgtattttagtttcaaaattacattacattttaatttaattttccttctaattttcctgtcagcattttatttacaaaaactgtgcagcaaacgagggaaaatcttccaacacaaacaactctgtaatgactaaattggttttattcatatattttagacatttggttaacttggatctttttcataagttctttgtgatgctttgtaaggttagtgtaactgaagtgtttgtgagtttgatttggtcccacagtgcttaattcagtggatattttgctagaagttttaatgtaaacttgggtggttaactgactattaagtgtaacctattgtgatttctaagaggagtcctgccaagaactgtatgtccaaaactgatctgttttaacagttagtgaggaacagcttccgagataaagtaagttcatttttctattgctaattttgctttttaaaatagcagtgttgtaagactaatatttccacttaccaccaatagagggagcattaattaactatgtcatggaattgttttgatattttggaaaacaagtgattccacccataaaatgaaaagagaagattgaccttaagaaaaaaactcttaaagctaggagacaatgacatgaaatcactcaatacatgttacaaatgaaagaaggccaaaagccactttaaaatattttaaactgtttcacagtagatttgaaagtgtctttgttcaaatttagcaaagtaggaagaattttcactaataccgcctgaaaagttgatcttaggtgccattatgggccacgtgtagctttctgtttctcaaatctgagagagacccatttgccttaatgctgatttgccatgtaaaatgctaagcaattgggttagaatccaccttttcttttggtagaacatgtagagaaaaagctgcaggtgacttgaaaccctgaggcgtctatcatcctttccctgtaaaggaagtgtctcttaaaaaaaagggagtgggggaggaggtggaggatccctaaagaattcttaatgaggtgatataatcattgtagtccatgacaaaatggaccagccaggtttgcatagcagtagacatattcctactgtacatttatccttcccaaatatgtcacattctaaaatagttgacaaattattttgtggaaagaggaagaagctggattggagtgggagatctaatctggaggagcaaagaggtagttgtttattgctatgttcctggcccatcaaatggccactttccaaactgacccacattttaggaaataaaccaatctggacctgtttcaaaaggatagagatgcttttagattgtcaattctcacttttaagttaaacaatcacaaatatctttagaaatagggaaagacatttgcttcaaaatcaaagaatgagtgtggatctttttaatttttttttgtttcaagtcctacagtcatcttacatttagaccttcatggtagggtgatatgagtgctaaaaaaatttctttctagtagccaggaaacagatagataagataaaagcaaatgttccagatttaagacttcttaggatgagtacaaggaagagagaaatagtatggaaaggacattttttagcaatttataattttaaaatggaatttgccaaacaagggagaggaaaaaaagtcaaaggggaatttttatctcaagatatttagatatggtttataaaaaaataatattttctaccactaaaaacactggtattatctcagcatcatgggcaatttttccttattacatgccaatatttgtacaaaaagggcccccaaatgtgtgaaatataatcctaaaaaagaaaataattggaacacatggatctgttacaattctacacagggggaaacaagctaagc

SEQ ID NO: 16890 - DNA, 1893 bp, Homo sapiens
ttttattcctcgcattcagcaccttccaaaaaacaagtgacatttctaatattcaggtttcctcctctcccctttaaagttgtccatgtagaaatttcatatattaaggaactaagatttctttgataagcaaatgtttttcttcggaatgcgatttcatcactgtgtctaggggagggagtgttatttttagaaagggagggactaacgcttggtagttacagtaattagagagaattatactttagcagcaatgagattacttcatctgccttatatttgagagctaatttgtacaagtagctcctggggctgtgaagggcttgccaagagtaaaaggttcaaggagtgaaatagttaatgagattcgtgatagaaatgggaatatgattgtccacaaaagggaacatcttccttttggagggtgttttttagtatatcaactagtattgtttgcctttcagcctaaaatccttcctcttaaagattgtgcttgcttggctggatttttgctgatgctgtttaattttaagctcttttccacatggagctattccagctcatttttaaaaatttatttaatgcttccaaaaaatatcctgagttattactggcctttcttccttactgtatacccggtgcctggcaaaaagtaggtgctcaacaaagagaggaaggcagggaggggaaaggtgagcgagaatgagagggcgtcactcttcagacatttggggaatgcgatgataaggcctcagtaagatctgcctggattcaggtttctcatgtgtaattttttgacttttttcctcaccttaagcacgggctacaatcattagagattgtaccttcttgcactttcctgattgttgttgacgaaataggccatttagaaaaacagttagctattgtggcagcgaaatagtttcattcctattggcaagtgtaaaatgaaccttttctgcatgtaagaaggatcctgctagagtttcgctcccaacactgctataggcctggcacaaaaatggaataaatataaagccctattcagaaaatatgttacatcacaggaactgtaaaatggggggattttttatacctcctttgttgttcctgagcaaattacatcatcatcaccaccaccattaataggtgacattaaacacctacagtataccatgtacttcacaggtagtaactcattcagtcctcacagccaccttctgagttaggtgttattgttattcctactttgacagatgtgggaacagagcccctcctccccacacagccccttttatgtaacttgactaagatcaagcagttagtaaatggtagaaagaatatttgaatctacctagtgagtctctagtgcatgcttttgtccggtatcctggaaagcctcccacaaaaagctaatctttgccccattcaaaacatgcaccctgaagaagctgtttgtacaggattgggtttattctgttattaagacaaaggcatcatggcctttgggtgagaggcccgtgtgtgtttgggatttggcaatcagcattccatctctgtcatcaccattattgagaaaatagatggattggttccctctctgcagtcctgtggagcagttggactgctctctctgctctcaggatgatactgtgagaacaatttaaatatgctaagcacatgtcaggaaacagttttgtggtctttggacactcgctgtagccattccgttccatttcaggtgattttattcatttcatttgtagaataaaataaatccatttcacacgcacacacacacacacacacacacacacacacaccctctatacaccactaaagcctcccattaaacccatagaagacttaaagagctaaaagaggctataatat

SEQ ID NO: 16891 - DNA, 2409 bp, Homo sapiens
  CDS (26)..(2056)
agcgcgagccccgccgccgccgagcatggacgaccccgactgcgactccacctgggaggaggacgaggaggatgcggaggacgcggaggacgaggactgcgaggacggcgaggccgccggcgcgagggacgcggacgcaggggacgaggacgaggagtcggaggagccgcgggcggcgcggcccagctcgttccagtccagaatgacagggtccagaaactggcgagccacgagggacatgtgtaggtatcggcacaactatccggatctggtggaacgagactgcaatggggacacgccaaacctgagtttctacagaaatgagatccgcttcctgcccaacggctgtttcattgaggacattcttcagaactggacggacaactatgacctccttgaggacaatcactcctacatccagtggctgtttcctctgcgagaaccaggagtgaactggcatgccaagcccctcacgctcagggaggtcgaggtgtttaaaagctcccaggagatccaggagcggcttgtccgggcctacgagctcatgctgggcttctacgggatccggctggaggaccgaggcacgggcacggtgggccgagcacagaactaccagaagcgcttccagaacctgaactggcgcagccacaacaacctccgcatcacacgcatcctcaagtcgctgggtgagctgggcctcgagcacttccaggcgccgctggtccgcttcttcctggaggagacactggtgcggcgggagctgccgggggtgcggcagagtgccctggactacttcatgttcgccgtgcgctgccgacaccagcgccgccagctggtgcacttcgcctgggagcacttccggccccgctgcaagttcgtctgggggccccaagacaagctgcggaggttcaagcccagctctctgccccatccgctcgagggctccaggaaggtggaggaggaaggaagccccggggaccccgaccacgaggccagcacccagggtcggacctgtgggccagagcatagcaagggtgggggcagggtggacgaggggccccagccacggagcgtggagccccaggatgcgggacccctggagaggagccagggggatgaggcagggggccacggggaagataggccggagcccttaagccccaaagagagcaagaagaggaagctggagctgagccggcgggagcagccgcccacagagccaggccctcagagtgcctcagaggtggagaagatcgctctgaatttggaggggtgtgccctcagccagggcagcctcaggacggggacccaggaagtgggcggtcaggaccctggggaggcagtgcagccctgccgccaacccctgggagccagggtggccgacaaggtgaggaagcggaggaaggtggatgagggtgctggggacagtgctgcggtggccagtggtggtgcccagaccttggcccttgccgggtcccctgccccatcggggcaccccaaggctggacacagtgagaacggggttgaggaggacacagaaggtcgaacggggcccaaagaaggtacccctgggagcccatcggagaccccaggccccagcccagcaggacctgcaggggacgagccagccgagagcccatcggagaccccaggccccagcccagcaggacctgcaggggacgagccagccgagagcccatcggagaccccaggcccccgcccagcaggacctgcaggggacgagccagccgagaccccatcggagaccccaggccccagcccggcaggacctacaagggatgagccagccgagagcccatcggagaccccaggcccccgcccagcaggacctgcaggggacgagccagccgagagcccatcggagaccccaggcccccgcccggcaggacctgcaggggacgagccagccgagagcccatcggagaccccaggccccagcccggcaggacctacaagggatgagccagccaaggcgcgggaggcagcagagttgcaggacgcagaggtggagtcttctgccaagtctgggaagccttaaggaaaggagtgcccgtcggcgtcttggtcctcctgtccctgctgcaggggctggggcctccggagctgctgcgggctcccctcaggctctgcttcgtgacccgtgacccatgacccacagtgctggcctcctgtggggccactatagcagccaccagaagccgcgaggccctcagggaagcccaaggcctgcagaagcctcctggcctggctgtgtcttccccacccagctctcccctgcgcccctgtctttgtaaattgacccttctggagtggggggcggcgggcagggctgcttttcttagtctgataccaagcaaggccttttctgaataaattcatttgactttg

SEQ ID NO: 16892 - protein, 677 aa, Homo sapiens [sequence omitted]

SEQ ID NO: 16893 - DNA, 1821 bp, Homo sapiens
cttggagactatttattacatgtatttttaagactttagataaatatccccaaattgccttccaaaaactttacagttctataaatgatatatgagactactgtttcttcacatattcaccaacacaatacttttttatttttgctattttgatggggagaaaagtttctcattttaattttaatccacattgtaaattgtgtagtgaaacatttttacacataattattaataatttggaagtttcttttgagaattacctgcttataatggcacattcatcttttatacctgagagttcttgagtttttaaaaactttgcatttagtccccttccaaaaataatctaataatatttaccataaatgggccgggtgcagtggctcacgcctgtaatcccagccctttgagaggccgaggcaggtgaatcacctgaggtcaggagttcgacaccagcctggccaatgtggggaaaccctgcctctactaaaaatataaaaattagccgggcgtggtggtgggtgcctgtagtcccagctacttgggaggctgaggcagaattgcttgaacccaggaggcggaggttgcagtgagctgagatcatgccattgcactccagcctggatgacaagagcaaaaaactctgtctcaaaaaaaaaaaatttaccataaatgacatacaaaataaaagtaataatctagaaatagtcaaaaactcaaaacgatggaaaaggaaggccgcattaaatagagctctcataaataagcatcaaatctgagctgtccaacaaaaagggaagccctgtaagttatataattttaatcataaaggaagaagcacattagtcacaaaagagaccacatttattcctggcattaaattctaaaacagatttctcatttgggctcttacataggggaatacagagtgacagtataacagtatccttaatgacagttttacaacaaatacagaagcaatttttatgacttttatatcttgaaactttttatccacttatagtacataaagtactctatatagtactttaaaaactgtggtttatcaatgtttaaatgtttttggacttttttgtgagaaacagttattagcaataagtttttttttcaaaggcatttcttctccaagctaggccaagtgataaaattatagagcaaaagctaattagaatggcaacaataggccgggtgtggtggctcacacctgtaatcccagcactttgggaggccaaggcaggtggatcacgaggtcagaagatcgagaccatcctggctaacacagtgaaacactgtctctactaaaaatacaaaaaaattagccgggcgtggtggcgggcgcctgtagtcccagctgctcaggaggctgaggcaggagaatggtgtgaacccaggaggcagagcttgcagtgggccaaggttgtgccactgcactccagcctgggcaacagagtgagactccatctcaaaacgaaaaagaatggcaacaatagaaaattgtacttaggctgggtatggtggttcacacctgtaatcctagcactttgggaggctgaggcgggaggattgcttgacctcggaagtttgagactagcctgggcggcatggcaagacctcatctctattaaaaataaaaaagttggttgggtgtggtagtgcatgcctgtagtccgagctacccggtggtggggggcggtggggttgctgaggcaggaggattgcttgagcctggagatccaggctgcagtgagctatgatcatgccactgtactccagcctggcaacagagcgagaccctctctc

SEQ ID NO: 16894 - DNA, 2825 bp, Homo sapiens
atctttactttgtgttgggagcattccagttcttctcttctaggtattttgaaatatacaataaattattactaacggtaaacaccctaccttaagttttcttctttaacatcttaatgtagtcaattatataaatatattctatttttaaacttgggtgagttaaaaacatatttgtctcaaaattctcttttgctgtctgaaatatccagattcatatctcgcgttgttgtctttgtgctaaccagcttctcagaaatattatttcacaacttcatggctttgcttagttggaggaattttggcacctggcttcttccttgctcagatccagagggcaggtagtgtttaagaaaacaggatttgcaattaggaagacctcagtttggattaggttcatccatttgatagttggtgaccgtggaccaagttacttctctgaatttcttttgcacagctataaatcaaggattataatccttcacaaaatcataagaatcaaagccaaataatgcatctaaaggtccagcccagggcttagcacactggtataacacaaactagctgttgttattataagtgtaaatcctgtggtatgcccctttatgacctgcagatgacattttccacttctactattgatcataggtaccttcatggttaagaacatgcattttttgtcattgcaattttattcccaaatctattcatgtattcagcagtgaaccgaatacccgttatatgccagataccttgctaggctgggctgtgggtgatacctgttccacaagacaaatgtgggctcaaagagacatgctctctgcccttgtaaagcttgcagggaagataggcaattgagtatttggtagataggaagtgttctgggaggcctctcatatagtatgtgagagctctcatataggggataaaggaagtcacacctcacaccaagacctgaagccacacacctggtgtagaaagggcggagagtcttctaggtggatggaatagcatgtggggaagagtttgtggtatttgaggagtagggaggagaccaggctgtccagagcagggcatagaagatgaattggaggctggacaggtataattatagggagactagcttgcaggtgtttatggagttaagatgagaaacaatggtggcctagaggagtagcagtagcaatgtagcaaagtggatagattctaaagatatttagcaggtagaattaatgcgtgatgtaaagaatgagagagagtcactcacaggctttattgagcaggtgggtagccacaagtttgaataagtgggtagatgagaagggaaacattggaggggaggagagggctggaggagtgttagatgctactgaggagataagcaaaataaagtctgaaaactgatcattaggcttagtaacctggaagtcactaatgaccccagaaagcaatttcctggcttccttcctaggagccagactgcaatggattgaagagggagcagaaggtgaggaaacagagtggtaactcagtcaagaggtttgggtgagaggggaggagacagagagggtgacaattggacaggggcaagagtccaaggaggcatttgggtgctctttttttttttttttgtctacttctgctttttattgtgagaagtttgggcttatggaaaggctaacaggatggcaccagtaaagaaagagacactgtgaacactggagagacacagtgatgtatagctaggtccttgggaagcaggtcacagagcacagctgaaaaattggaggacataatctccaatgtaattgaagaaaagaattgttggcttggggtgatttcttgctttgttttgtttggtggcaggaaattgaggctcttctctgaagttgcttctgtttttcccatgaggtgatagtaaaatcatcccccaagagtaaggaggcacatcggagagtcagacatttgaggatgggggagaatggagagctcattgataaataagacaatagaggtttgctgagcagggttgttgaactgctcataatcatgaacttggagtgatgctagtctctgtggttgtggtttactccagtattacctagcagaccaggggtagtcatgaagatggctgagccagggttggggtattgccaagttgatgtgatgaaaagacagtgtagcaaggagatgtagaatattggcaggagacttaatgaccagtttgagtgtctgttacgtcccttataaaaaaactatgggcatattgtagttggtgctggttagatttatttatttatttatttttaatttttttttaacccctggaagaaaagtgtcattacactggaggaatgcaatttggcaatgacctaagacagcgtttggtccctagaacagcagcattagcatcactagggaaattagaaagacagattctcagcttccaccctagatccactgaaccaaagactcgggctggggcccaacaatctgtgctttaacaagcacataaggtgattcagattagtgctaatatttctgaataattaatctaagagaaaagcctatgaatggtcaaaaagttggacattaacagtaatattaatgaaaataaatgtgagttctttaacattgggagcttgtctgtcttgtgtagcattcccaacactccgaacatctgggtcataagaggggcaaaacgtatgtggaatgaaggactgaatgagtttataaaatagtacaaagatgaaggagagctgggaggagcttccatataataatctacagtttacttgaaagctcattaaatctacctgtaccct

SEQ ID NO: 16895 - DNA, 1965 bp, Homo sapiens
  CDS (1183)..(1584)
ttattattgtgaacttagtgacaagtgtggcactattacccatttccttgtctgcccccaaccctggggtcttgggcagagaacaggagttcttgccattttctcccagctcccaccttgtgctggcttgcgggtgctgaggtcatatttgctgggtgagagggtgcaggccagatatgagccaggcctggcagagagggttttggtcagcagtgatacctgcagtgttctctgcagttggtttgggctggccctgctcctgagaactcctgggttgtcccttcaggcaaccagggaaggctccttggagcagcagcatctccccttaccactcgccgacaccagcttccgcctgacccagagaaggagtttggggacagccacagcacgtccagggctcccaaggcagctggcagagccaatgaggagaccccaacacccatccgacggctgcagctctccctgacgtgtgtcacccgcagccctggtcccagccgctgtgcttctcagggcctgcctgcccagcccgggtggatatggtgcccaggcgggccccggggacacaatgagggccattctcagagccaggcagagcgtgtggggcagtcctgtcagtcctatgtgcaacagctgggatattgtttagggagtgctggcatcaggctggggctctcctcctctggccctgccctttgggatgagcaagcccccaaaggccttcctgggttcctctggtgcacgtgccctggagttacccttctgaaggaggtagacttgtcctcctgtcctgggtgcctggggtgcaggggtgtgaattgggctatgtcaagatatgctgggcagtactgtgaggtgggggcagaggggagaaggtgtcccaggaggagccttcctggaggggatgatagtccagcatgttctgaagtgggagtagggtgcggcaggagtagggtaccagagaatgagtgagtcaggcagcagcctccactgcgccttggacacaggtggctgacagtgtccacctggactggctttgcaccccttctgaggtcacagttgtgtcccttgaaaacttgggcaggagcacctgactggcccagcttgggtcatgccctaggcccagcagtgcgggaggccaggaaagtaggcttggggaggctggcctctcctccagtttgaagcatggcaggggttccgggggaggctgctggggggcctgcgagcatgtccagagcaggaatgcttggggtggtgtgtgctttgctcgtctgggcttatctggccgtggggaagctggttgtgcggatgacgttcactgagctgtgcacgcatcatccatggagtctgcggtgtgagtccttttgccgctccagggtcacagcctgcctccctgctccagccccctggctgaggcccttcctctgccccatgctcttctcagacaggaatcctgtggaatgtcatctctttggggaggccgtctctgaccctgtatgcaaaggccttctcccacattatttttggcaccccactttcttccccgtgaaagcaaattgtttggtgtctttccgtcccactacagtataggcccggttcagacagaggccttgtccactaggcctgcgctatctctgcggagcccagccaaagcaggggccaggcgaatcttttgttaaaagaacaatgcgcgctgggcacagtggctcacgcctgtaatcccagcactttgggagtccgaagctggaggatcacttgagcccaagagtttgagaccaccctgggcaacataaggagaacccatctctacacaaaattagctgggcgtggtggtgtatgcctgtagtcctagctacttgggaggctaaggtgggaggtggctgaggtgggaggatcacttgagcctgggaggttgttgcagtgagagccatgatcgcgctactgggcaatagagcagaacccagtctc

SEQ ID NO: 16896 - protein, 134 aa, Homo sapiens [sequence omitted]

SEQ ID NO: 16897 - DNA, 1741 bp, Homo sapiens
gatcacgccactgcactccagcctgggcaacagagcgagactccatctcaaaaaaaaaaagtcacgattctgtgaatactcagttctgagttcgaatcttacctctgtgctcacactgctagcagaatgaccgggtaaatccctgtgcctctgtttcctcctcggtaaaatgggcttgatgctggccgggcatggtggctcacacctgtaatcccagcactttgtgaggccgaggtgggcagatcacctgaggtcaggagttcgagaccagcctggccagcatgatgaaaccctgtctctactaaaaatacaaaaattagccaggaacgatgtcatgtgcatgtaatcccagctactcagaaggctgaatgaggcaggagaatcgcttgaacctgggaggcagaggttgcagtgagctgggattgcgccactgtactccagcctgagccacacagcaagaatccgtctcataaaaaaaagggctgatgctgtccacttccaggccccattatagagatgcagtagagatcaggtgtgtcctgtacctggcactgggtctgatgcttaggaggccttcattcagtgacttgagagtgcttttttttggtggttatcaaataacaatagtgaacattcatgaagcagcagctacatgccaggcttctatgtctattgcctggctcagtgcccctaacaactctgtgaggtagatcctaatatctccattttacagctgaggacataaggcacagagaggttaagtaacttatccaaggccacacagctggtaagtcaagaagcagattccagacttgactccagaatcttatttgtaatcactgtagtacatggccttccagttctgctcaagagatagtggaacagttaaattacagactcagacaaaaaaaaaatcaaaaattaaaaaaaaatttaaaaacaacaaaaaataaaaagtatagactcagctagctgctgtaataaaaacaaagagatcccagggtagagtaatttaaataaaaaggacgtttagtccggagggtcctccaaggacccaggtaagttcttccagccccaaaatgagtttccagctctgggactgaggccgctgcaccagcagccatcatttcccaatcaggaagaagtggggaaagagtaggggacaagcaacaactctttgtaaaggcgtcacccagagatggtacagagcacttctgcttatatcccattggccggagcatggtcacataaccatctctagctgcaagagagtctgggaaatgtagtctctggctgggtggccatgtgcagtgctcatactcttaggggtttggttaccaagaacgaaacagggaggatggattctaagggagaagtaacagcctctgccacaatcaggattcttctctgagatccaggctgggcctggagtccctgggaggatagaaattggaggtctgggctgggcgcagtggctcacacctggaatcccagcactttgggaggccaaggccagtggatcacctgaggtgaggagtttgagaccagcctggccaacatggtgaaaccccatctctcctgaaaatacataaactacccaggcgtggtgctgcatgcctatagtcccagctactcaggaggctgaggcaggagaatcacttgaacccaggaggcagaggttgcagtagccaagattgcctcatggcccttcagcctaggtgacagagtgagactctgtctc

SEQ ID NO: 16898 - DNA, 1834 bp, Homo sapiens
cagttacagtttcctggagggagtggatattttcctaagcacttgggctatatcagagaacagaataataccatacattccagaaaatgttgtcatcttcagcttaatactaaaaccctgaacaaaaaaagttttggccaggcacggtagctcacgcctgtaatcccagcactttgggaggccgaggcaggtgaatcacgaggtcaggagatcgagatcatcctggctacagtgaaaccccatctgtactaaaaaatacaaaaaattagctgggcgtgatggtgggtgcctgtagtcccagctacctgggaggctgaggcaggagaatggcgtgaacccgggaggcggagcttgcagtgagctgagatcgcgccactgcactccaacctgggcaacagagcgagactccatctcaaaaaaacaaaaataaaaaaaataaagtttttgcttcagaacaccttgtggagctcttgaaacttctggcgagggcgtcacctgtgtgatgtggggtaagaagtcttcttcgttctatccgcagaaaccatagaatgtggctttcatcagttggttgaccaggttggcttaggtgttacagtgccagcaacatttccatgagcttccttgctcagtgcctctctctgccgcctgcactttctgtcatttctaggctccccatcgttgcagacagatggaatcgcggccactcctgtcccacctccacctccccccaaaagcaagccctatgaaggcagccagaggaactccactgagctcgctcccccactgcctgtccgaagagaagccaaagcaccaccccctccacctccaaaggctcggaagtctggcatccctacttccgagcctggatcccagtaaggatcttgccctccctgcaacaccgagtgccttagacagctgctgcctgagaactggcctccagccggtgtcctcattccatggggctccctgctgactgcatttcctgatctgggatgatgtttaccagcccaaaaccagtcatgttcttccaaaagcttctctttgatagaattttgaggccatgccacctcccttccagtccacatggaattccagaatcagtcacagcctctgattttttccaagaagagattgccttcaccattgttaaatgtcagcctgtacggcagagacatggtggtctgcacaagcctggacaagttcttccatattgatggtggagcaacccctgtaatctactccttggaaggattttttgctttgcttatgaaaagctgtgcttgagacttaggtacttttctcacgtggacacactgatcccatcccatattgcatctttgaagagatggatatcaagtacactttggtagctgaaataatcatatctttctgatgtctattgtatctcctttgaggaaaagaacacacatttttaatggagattggctgctttcaggtatgtgtgtctatcattgaaagagcatggactcaaacatcagccctgagttcttgagtccacccaactcccatcttcttgtggcacaggaaagctgccctctccctctcccaccacactcctgactaatggccttcactgcgtcgcagtcactccttccctacggacttctttgaagctcttccttttgcacatacggctttttttttttttttttttttgtcctattacctcctctgagcgcaaatcactggctacaagggacttaccagtctggattcagcagtttcttttctaaaacccatttgggtgactcagcagccgcatctgctacctgattttatcctggagaatacagtgcaatatttctctttgatt

SEQ ID NO: 16899 - DNA, 2079 bp, Homo sapiens
gatcacgccattgcactcctgcctgagcaacaagagcaaaactccgtctcaaaaaagaaaaaaaaaaaatcagccgggcatagtggcgggtgtctgtaatcccagcaactcgggaggccgaatcacttgaacccgggaggtggaggttacagtgaaccgagatcgtgccactgcactccagccccggcaacagagagaaaaaagaaaatgtggtcaggctctgtgttctactgtcttccctcctgttttctttccctttgtattatttttgattttctttactatcatcttagagagatcctaagagaaaactgagacgaacacatgtgtttaggcctgccatgtggaaatggcggtctctattcattctatttacacggaaacatttaacaagcagctcttgaggaggccagagaggtgcaggcctagccctgtcagcaccaccctccacagatgcccaaacagccccagcgcatttctttaccttgatttctttcctactcatttcctccagctgtgcaagggtaaaggcaaaagcacaaagacctgggttggaccctgcctccatttgccgcaccatgatcttaccacatggattcttagagcgtaactgctgccccatggaccaggttagctaagagaggttccatgaaactgctgttgcagaaatgcttctaactataaaatgccaaacctgggaaagaatgtttggattctcatagcctggatcagtaggacactgccttggcgtgctggtgccccacccccaactcacccaggccaggggaggtagagccccagcccctgagaccctcaggcatcctgcagtttccaggccctacagagggtcccagaaacagccccagcaacaaagtgaggggccagaaactatgcaaagatggagggaggctgagaaacaagtcagtgctttattaacctggcaaaggggcagctaggcggcctgagcagcccctgccagaccctcctctgcactcctctgcctaagtcacggcccaagccctggacacgtaggagtgtaggcgggcaggggcaaggccaaggaaggggtggagttgtccaatgcagatgttaaggtccaacccgacttccttactgagtctaggtgtgggggcccccctctcaccccttcctccctgcacagctctggctcttcctggagtcaggaggctgtgtgtcccacatctgctgtggtctggaaggtgatcccatccccaggcaatggggaggccaggaagggccagagccagacgagggcccagcggggccccagggctgcctgcaggttgtggcagggacccaggtcataggagtgctggccccgagcccactcccatgtggtctggccccgcagcagcagcatcccatggaagagcagcccagccccgcacagcagcgcacccgccacgcacgtgtccgtcacgaaggccaaggcaaactgtgccagagacactctgcctgcaataaaagagcagagagggccagggaggggcagtggggtccggctttcctgccacctgctcccctccaccacaaagcagggctcattcctccgctcagcaaaccctgtgtcgatactcgctggccagcccgtgctgggtgacaagaacgcactggtaaactgggcagacgcagccccctacttgggatacggcttcattcctgcatcacagacttggtgagcacctcctcagccctggaggcggtgccaggcactagagggtgtctctgcccttggggagctcacagacattaaagaggccattcttggctggatgcggtggctcacacctgtaatcccagcactttgggggggcgaagcagatagatcacctgaggtcaggaatttgagaccagccttgacaacacggtaaaaccccgtctctactaaaaaatacaaaaattagccagacgtggtggcaggcgcctgtaatcccagctactcaggaggctggggggctcaggcaggagaatcgctttaacctgggaggcagaggttgcagtgagctgagatcacgccactgcactccagcatgggcaacatagcgagactcccatctc

SEQ ID NO: 16900 - DNA, 2507 bp, Homo sapiens
  CDS (7)..(345)
cttataatgagtttatcaggacataaccccatcatcagtcaaggtgctcccatagtatggaatggctggaagtggggggtagttaaaaagagccatgtgggctgggcgcgatggctcacgcctataatcccagcactttgggaggccgaggtgggcggatcatctgaggtcgggagttcgagaccaggctcaccaacatggagaaaccccgtctctactaaaaatacaaaaaaaaaaaaaattagctgggcatggtggcgcatgcctgtaattccagctacccagctacccagctacccggctgaggcaggagaactgcttgaacctgggaggcagaggctgcggtgagccaagatcgcgccattgcactccagcctgggcaacgagcaaaactccgtctgaaaaaaaaaaaaaaaaaaaagaaaaaaaaagccatgtgtgcgaagctaaaggagttgggctttatctagagtgcagtgggtgaaggtttgtttgtttgaggcagggtcttgctctgttgcctaggctagaatgcagtggcatgattatggctcactgcagccttgatcttctgggcttaaacaattctcccacctcagcctcctgagtagctgggactacaggtgtgcgccatcatgcctggctaattttttgatttgtcgtagagatgaggtctccctatgttgcccaggctggtctcgaactcctgagcttaagcaatcctcccaccttggcctcctaaagtgctgggattacagatgtgagccacagcacctgactgccctgaaggttttaagcaggaaaataatgtgatcaaatttggcatctagagagatcactgtgtctgcaggatggagtatgtcctggaatgaagaggtcagaagcggggagactagttggactagtctgcacaagaaatttggtgagatgcgacagtggcttggaccaaggaatgacaaaagagtatgaggacaggagaacagaaggagagggggaacaagctaatgctaaaatttatatagaagggggcagccaagatggctgaatagagacagctccactctgcagctcccaccaagaaggatgaaaatggcaagaattctgcatcttcaattgaagtaccaagattctctcattgggactgacgaggcagttggcatgacccatggagagtggggaaaagcagggtggagtgagggtctacctgggagctgcatagggcaaagggagctccctcccccaggcaagggaggcagtgagggactatgctactcctccctgaaaaccatgcttttcccacagatccttgtaacctgtggataaggaggtcccctcatgagcccacgccaccagggccttgggtgccaagcacagagctgtgcagaatcatggcagctgctcaggtgggcggctgttcgagtaggcactgagacacgggagtttttgcatactgtggctctgggaactcaagtgaggcaggagatccatccactccatgggaagggggctgaagccagggaccaaagtggccgccctcagtgggccccaactccctataagctaaaatgactggcttggaatacccaccagttcagcaggctggagactgccctaaagaccaagttccgggcggagaggggtgaccaccatcactgtggctccagtcagctgttttcccctgctgcaggtgccagtaagactgggcattttggacagggagcaattccccacagtgcagcacagtggctgggatagtttgtggccagactgcttctttaagcaggaccccaatccactcctcctcaccaggcaaggcctccctgtgggaattgcagcatccccagccaggtgtttatggacagaactctgatatccctgagaggagcccctaggaggaggggtgcctgcagtatggtggatcagcagtcttaatgttttctgcctgctggctctggtgagtcagggcagcccggatgagggggattccccctaatgtagcacacctgctctgccaaggggcagccagactgcttatttaagcaagaccctgatcccgttcctcctgactgagtgagatgtcccaatagagttcgccagacacctcatacaggagtgttccagctggcatcaggttggtgcccctctgggtcagagctcccagaggaaggagcaggctgccatctttgttgttcggcagcgtccactggtgataattccaggagtgggaaggacccagggaaatagcgtctggagtagatccccagcaaatggcagcagccctacagaagagggacctgactgtgaaaagacaaatagaaagcaagagcaacaacaacatcaatgaaaaagaccccacaaaaaccccatttaaaggtcagcagcaggctgggcacggtggcttacacctataatcccagccagcactttgggaggccgaggcaggcggatcacctgcggtcaggagttcgagaccagcctggccaatatggtgaaaccctgtctctatt

SEQ ID NO: 16901 - protein, 113 aa, Homo sapiens [sequence omitted]

SEQ ID NO: 16902 - DNA, 2865 bp, Homo sapiens
  CDS (1194)..(1496)
gagaaagaataggtcagaagcaatagtaaaagacataataacttgagaatcttccaaaactaatacagacttgcatatttgagaatcactgtagctctaagcagaatcaataccaaaaaacaaaaataaagggaaaagagaggaaaaattgccaaaacaaagaaaatcttaaaatcagccaaaggaggaaaaagatacattaccttcaaaggagcggcagtaaagacggacagtctactttgcaaagaaatggaaatcaaaatacagtggaacgatatcttcaaagtgttgtaagaaaataactgccaacctagaaatctgtatgaagcaaaaatatctttcaaaaatgaagtgagaatatagacatcttcagacagacaaaattagaattcatcaccagcagatctacactagaggtactataaagaaagttcttcaggtaaaaggaaaattatcccagctggaagcatggagatgcaggaaggagtaaagagcactggaaaggatagatagacgaatacatctaaaataatgtgaactgtgtaaaacagtaaaaatattgataggtgcagcaaaccaccatggcacacgtttacctgtgtaacctgcacatcctgcgcatgtacctggaacttaaaaatttttaaagtaaaaataataaatggcaacagcaacacagaaagctggaagagagttctgatgggggaaaaacacaggttatttttcctcggctctcactctacaacagtgatcatcacagaggacttctttgaccaaatgtgtggatttctccccacgtgccaagcaagcagtcagttctgcagtggacaccagctgggtcggtctcaacacagaagacttctgtgagcaaatgtgtgagggtttcttctcacacatcaaacaagcaaggagttctgctgtggatatcaggtgggtaccctccaattccatttcaacattatctacctggagataactcagatctcacaggttgaagactcagtctccaggactgtccctccttgagacaccagttgcaagtctgggcctccagaacttctgacccactagcttcaagttgggattcccaccacccctctttgggttcagttaatttgctagagtggctcacagaactcagggaaataattacgtttaccaggttattacaaaggatattatgaaggaaacagatgaagaaatgcctagaacaaggtatggggggtgggtgcttccatgccctctctgttgcaccgccctcctggcatctccatttgctcgggcatttggaagctctccaaacccaatccttttgggtttgttttgttttgttatgttttttggttttttggttttggaggcagtctcgctctgttgtccaggctggagtgcagtggtgcagttacggctcactgcagcctcaacctcctggactcaggccgtcctcccgcctcagcctcctgagtagctgggactccaggcacgtaccatcatgctaggctaattttttaaaaaaaattttgtagaggtgggggtcccactgtgttggccaaactagtcccaccttggcctcccaaagtgctgggagccactgctcctagccccttttgggtttttatgagaacttcattatgaaggcatcattgattaagccattggccattggtgatcaacttaaccttcagcccctctaccctccctggagattggagggtagggctgaaagtcctaaccttctaatcctgccttggtgtttatggagaccagcccccatcctgaagctaacaagaggctgccagctatcagtcaactcattagcatacaaaaagacattactttggagtttggaaggattttaggaattatatgccaggaagcaggatcgaagaccaaatatatatttcacaatattacaaagataaatatagtttaaatgtcctcaggtctttgtaatttatattagattttaatgagtcagagatagtaatatctagggtagtccttctcaatcacatttggtgagagaatcacatcataatgttcaaagacagcaaacttcaacctgtgggtcaaatctggcctgccacctattttagtaaataatgttttattgggggaacaccgctatgcccgttagtttacatattgtctatggctggattcatgctgcaccgccagaattgagtagctgctacagagacattgtggtccacaaagcttacatttattgtctagcccttgatagaagagatttgacaacccctaggtattgtggactgagtgtgtgtgttccccaaagatttgtatgttgaaattctaacctccagcgtgatggtgttaggaggtggggcctttgggaggtatttagttcgtgaaggtggaaccctcacaaatgggattagagacacagagttcttgcttctttctgtctactctctgccatatggggacacagcaagaagaatgccatctgcaagccaggaagagggtcttcaccagaacttgaccatgatggaaccctggtcttggagggtctatagaacccagcctctagaactatgagaaatgtttgttgtgtgagccacccggtctatggtatttttgttagtagcagccagaactaagacatctgtgctaaggcatctattatatattatgaattaacttctttacatttagaatgccttgtaagaactgaaaaaaaaaatagtcactcagaatgttttctgcaggacataattctttcatagaacttgagttgattaactctagagtaatcactaaaaggatagaaagagaatttatagctaccaagctaatagagaaggagaaaggaaataaaataataaaaaccatttactgtcc

SEQ ID NO: 16903 - protein, 101 aa, Homo sapiens [sequence omitted]

SEQ ID NO: 16904 - DNA, 1864 bp, Homo sapiens
gaatattgtgcatttaaaagagatgaggtttcaccatcttgcccaggctggtctcaaacccctgggttcaagcgatcttcctgcctcagcctctcaaagtacagagattacaggcatgaaccaccgtgcctggtcctatttttaattttttgaggaaactccatactgtttttccataatggttgtactaatttgtattcccaccagcagtgtgcgagggtttcctttcctttacatcatcaccaacacttgttcattgtttttatagtagccgttctaacgagtgctaggtgatatctcattttggtttgttttttatttatctatttttgatggagtatcactctgtcacccaggctagagtgcagtggcatgatctcagctcactgcaacctcagcctcccaaatagctgggattagaggtgtgcactatcacggccagaaaatttttgtgtatttagtagagatggggtttcgccatgttgcccaggtaggtctcgagctcctgacctcaagttcaggtgatctgcccacctcagccttccaaagtattgggattacagacatgagccaccatgcccaccctaattaacagtatttgtcaaattttaatgtgcatcagattcttaggtttcagctggcatctgtttccagctcttggtgctatttgcaaccttgtatcttaggatgaaggcataaaggttttcaagcagcaaaaccttccagggttagataagagtgtttcactgtggatctgtgagcacctatagccactgtgtgcatccctctgggaccccagcagctgcttctgagaaaacagagggatggagaagaggacatcacccagatggtggaaacatctatcaaaagttaggatgtcctctggaaagcctctttgggtgtctgatttcatatctccttcctcatcagagaatggcgtcgcctcctatttgatgagaatttaaacacatctagaacatgtgcttatctttttcctatctcctgtctctgggatcacatcatactgcctccaagaatcctgtccttaacccccttccttagaatttacagcatagcctggaaacaaccaagcattcatctttattctaaagtacctagaacagagctggatctgtgacagatgctcaatggctgtttaatcaaacaggaaaaactcatatttggagtagggagtagggggaggcaaaatggtactctcaatgaattataatattttaaaatttgtcaatagagaatataatacaaaccagagaagcataaaggaaggtcatgctaattttcatgaggtagtttctaactccaggaacaaaatggtgaaagggcattctaagtcaaaggaatttatcatgtaaagacgggagtaacacacacacacacacacacacacacacacacacacacacaccccactctgctacaaccacaacaaacactttgttgttcttcaaatgcaccaagctctcttcagcagtgttttgtagtgcgtataggacatctttgaaatattctggatatttaacctttgtcttcttggcatgttaaaaatatcttctggcggctgggcgcggtggctcacgcctgtaatcccagcactttgggaggccgaggcgggcggatcacgaggtcaggagatcgagaccatcctggctagcacggtgaatccccgtctctactaaaaatacaaaaaattggccgggcatggtggcgggcgcctgtggtcccggctgcttgggagactgaggcaggagaatggcgtgaacctgggaggcggagctggcagtgagccgagattgcaccactgcactctagcctgggtgacagagtgagactgtctcaaaaaaag

SEQ ID NO: 16905 - DNA, 1750 bp, Homo sapiens
aattgcgagcgagagtgagtggggccgggacccgcagagccgagccgacccttctctcccgggctgcggcagggcagggcggggagctccgcgcaccaacagagccggttctcagggcgctttgctccttgttttttccccggttctgttttctccccttctccggaaggcttgtcaaggggtaggagaaagagacgcaaacacaaaagtggaaaacaggtaagaggctctccagtgacttacttgggcgttattgttttgtttcgaggccaaggaggcttcgggaagtgctcggtttcggggactttgatccggagccccacatccccaccacttgcaactcagatgggaccggaggcggtgttaaatggggagacgatgtcctagtacgagctctggtgaccccaggactctgcgctgctgcgcttggggcttgcccgacggtggagaccggggagcatctctgggcgtggagacccgggcgcagtaccccgggctcagaggggtcgggggttcccgggcgtgctgagggcgctgctgccgggtggggagagctgcaggtccggcaccgagcgctgctttgttcggagggccctgagctggctagaaacccttctggttgcaggtcggccagtacctacggagacaaatgccagcactgagtcttcactcggttcttaagaagctggtctgttctgacctgggaattggctatatgctccccgggactggagcggcacagtcccggactgtgaatccgggaactcgagttggaggtgtcccaaacggtccgtggtgctattgctcactagaggccttgggtctttgtttgacctgaggggtagggaggtcctgcctacagtctccgtgcgctcagctgagctggtgtccctggcgcagagcgcggacgagttttgtttccttttctttttcttttttttctttcctttaagtctcggtctgtcgcccaggctggagtgcaatggaacgatctccgctcactgcaacctccgcctcccgggttcaagcgattctcctgcctcagcctcctgagtagctgggattacaggcgcgtcaccacacccagctaatttttgtgtttttagtagagacggggtttcaacttgttggccaggctggtctcgaaccctcgacctcaggtgatccaccggcctcggcctcccaaagtgctgggattataggcgtgagccaccgcgcgcggccgagttttgtttcttttaaaaacaagacttaggagagcctgcggagacccggaggtggggtgcccaatcctccctctcccacgttccctgcagccccatcttccagaccgttgctgctggtctctcggggcagcttctgcctgggcgcagatggggaagctgggccgagttggtgcagtggaatgaccgggagtaaccccggcgggcggcgcagaactcggagctccgccgcggggctgggctgggctctgccgtgagggtgggggtgctgggcgcgcgggctgcggtggccccccggagactggcccgcagcgcctcctagccggaggacctaggaatcggccggctctactaggtgtctttgctcgcggttccgactgtgaatccggtgaagaccggtggttgcagacggggaggaactatgaggctgaggcaggagaatcccttgaacctgggaggccgaggttgcagtgagccgggatcgcactaccgtactccagactgggcgacagagcgagactcctctc

SEQ ID NO: 16906 - DNA, 1826 bp, Homo sapiens
tccagtggtacagttacagcctttttctgctgagttcaagggattttcccaacgcagcatcccaaagcgttgggattacaggcataaaccaccacacccagcttcatgttttgaattttataactcccttttcagtgagcctttccctttttctgatgagcaagccaaaattatcagtataaaaaatttaaaagagaagtttttctcccttcctgctgctttttctctgtctttctctgaaggtgtgtggaggtgggtgtgtatgtgtgtgtgtgtgtgtgagtgtgataggatctcactttgttgcctaggctggagtgcagtggcatgaacttggctcactgccaagcaatcctgcctcagcttcccaagtacctggaaccttaggcacaagtcaccacacctagattattttttaaaaatttttgtagagatggggtctcactgtattgcccaggctggtttcaaattcctgagcacaagcagtcctctcatcttgacctctcaaagtgttgggattacaggagtgagccactacacccagcccctgctgctttcttgatcttgccgttcagtttgcacccaatgctgacttgtggtttcaacgctgtatatgcggagtctgacttccagagcacttttgtaatccaaatgccacgtatttcttagccctcttccaattgtgatataagaggattccgagacccttgtgatgagatgtcttttgctgaagaattctgtttttcagaatctgggaatggagaaggtgtcattcattttgtcctcctgaacaaggctgtgtatgcacacatcaagagtggtggtgatatggtttggctgtgtccccacccaaatctcatcttgaattgtagctcctgtaatccccacatgtcgctggagggacctggtgggaggtaattgaatcatgggggtggatttttcctgtgctgttcccatgatagtgaataagtctcacgagatctgatggttttataaagggcagttcccctgcacacgtttgctcttcctttgccttccaccatgattgtgaggcctccccagccatgtgtaactgtgagtccattaaacctctttcctttataaattacccagtctcgggtatttctttattagtagtatgagaatgaactaatacaactgggctgtccatttttggaatcagagctttgaattgtggagttagctagatgtggattatactcctgactgtgtcactccctgggaaagttgtttaacttcacccttggcattggaataatgaataaataactccttgatttcttatgggaggatttcagccccaagcctacgatcaggcatagatgtcagctgggccagcacattgaggcctctgttctggtcctacttagagtcacaagtacctgtaactaatattggtaatgatgatctgaaattgtcaaaacagtctgttctttgtaataagctctacacacaaggttgtttagatatttattacattagcacttatttttaaaaggtacaaatttaggccgggtgcaatggctcatgcctgtaatcccagcactttgggaggccgaggcggacggatcacgaggtcaggagatcgagaccatcctggctaacacggtgaaaccccgtctctactaaaaatacagaaaattagccgggtgtggtggtgggcgcctgtagtcccagctactcgggaggttgaggcagaagaatggcatgaacctgggaggcggagcttgcagtgagtgagtcgagatcgagatcgcaccactgcactccagcctgggcgacagagcgagactccactcagtctc

SEQ ID NO: 16907 - DNA, 2037 bp, Homo sapiens
attgtgtagctatacctagcaggaataaatactaagtctgtgtcagtattcttccccttggtttcagttatctattgctgtgtaaaaaaccatcccaactttgttgcttgaagcacccaggattcattgtttctcataagaattttctgctggtctcatgcggacttgctcgtgtcctagctgggatggctggattgttcatcttgcagttggtgctggacaatggtgggctctctctcagtggctttcatgcacaaggaggctcacacaggcttcttgatacagcagcctcagagcatcagaagggcaagagtggatgctgtctggtctttgaagtctcactcagaagtcacctgttgtcacttctgtgttctattagtgcaactgagtcctgaggcttgcccaggtttgcactgaggaaatcgattccacctcttgctgagaggagcagcaaagaatttatcgccacttttaacccactacaacctcaatttcaactgattgtctctaatgacttcttctgtaagcatccaaaacatcccttgattgaaactatctcaaggtgacctatcttccttcaacaatattttgtggttcgaaactatgtcattaagagagtgactttgaaaacctatataaggacccagatgtgaggtgactgcctagtctgaggaataatgactttaagttatatttgtagagaggtggtaaagccagcgaagcagacccatggagaaatgcaaatctgtcatcagccttgaaggatgggacaaatttggtggtgccctggttaaggaggaacagcactgtgtcttgctggcaaagcctaggagactaatttgtaaaattaacatttctttgagaatatgctttgttactagaaagcagtttgatcaatgtactcttgtataagcaactagattaaggaacaaaagagacaccttaaagaaacacagtgagccttcagaggaggagagccttcatatcactgtaattagcaaacgtctcttatgcatcagttgggctgccatgaggctgtaattaccaggtcttagagtttgcctctacctacatcattgtataaaatgaaaaccagatgaaacaatcaaatgttctatgcaggagaaaaatggatgcaaaacaaggcttgcaaaactcttaagtgctctatattgctaaaggttaactgcattgcctgacataaggaaaaaccaggaaactactctaaatgaggagtagcatcaagaaaccacaaaagaaagagctcgacataataaatacattattaaaatgcatagtatacagtgtaaaaggcagtctgcaatttttgaattatgtgtcctataaaagtacatcaggtaaatatgtgtaattggagtccctggtgctctggcaaagctcattttgctgaccttcagaaaactacactgacttttttaggagtattattttgatttgaaaaagctcttctttgccagtaaggaaaagtacagtatttacagaaaatgagacaaccacagtgtacttaaagtgtatgtagtgcatgcatgttctctgcaagaaaattaaaagtctctgtttttcattcagaagtaattagagaatgtcttttgtggctgctggaaaacagatgcaagactcctagaagtctgaagtgtaaaattaaagtagaatgtatcattgggtgtcctaatcttcaggtaatggcccaggcctgggaaaagtgaacagactttgtgttcccagttgtaaatgtgctccatggagtctatgatcatgctcactcaagatgtgacaaagcataaagagtcattttggtccagaaatccctgttggtacattaaactgggtgctgatattgactatgatacctggaaaaaaggcctcccatcatttcttaaagaagataacagttgtaccaggcacaacggttcactcctgtaatcccagcacttcagaaagccgaggcgggcggatcatttgagatcaggaggtcgagaccagcctggccgacacagtgaaaccccgtctttactt

SEQ ID NO: 16908 - DNA, 1897 bp, Homo sapiens
  CDS (615)..(968)
acaggcgggcactctctgcgggtcccgcggctcccgcggcttccggcccactcagcgcctccagaggcctcaggtgagggtcaccccccgcagcttggggtcactcccctgagcccccggatcttcccatgggtcctttggaggcctgggttttggagtttgtccttcgttaagtgccgcccgccgggcgcggctgctccaggaccacagacgagtctcgctctgttgcccaggatggagtgcagtggcgcgatctcggctcgctgcaagctccgcctcagcctccggagtagctgggactacaggagcccgccaccacgcccagctaatttttttgtatttttagtagagacggggtttcaccgtgttagccaggatggtctcgatctcctgaccttgtgatccgcctgcctcggcctcccaaagtgctgggattacaggcatttcgctggggatgctacttgatctctcttcagcctcagtttcctcacctggacagtggagctgaacccaccccccactatctgaccctgctctctgggctgtcttttgggaacccgccctgctgaggcctgctccccaccctccatggctgtcagccccccaggagaagaatgtctgccatatggaggctgctggcagcaaagggagatgaacaagccaaggttgcccggcctgcatgccggcccagggctgctgctgtgtcttgccatcaaccctcccctgacacccaggatgcctgcctcacccagaagcactcctacgtcaggcctctgagggggagcgcttcatgccactgttatcaaaagaagaaaccatcgaagcagaaaggccaatgccacactagacagccaggagcccagcagaacaagtggccccctaaggcactttggggaccacaccccgccactgaccccagcacagtctggttcccagggcttcaggatcctcctggggacctctcagcatgattgacacaggcagacgggacctgaaggggctgctggtccttctgaaaatgttcaccaggtagtgtgagtgtggggaagccatgaacaatgtgtgggactctaccctgcacctgctcagagcctcagcccttcagagccactactaatgatttgctgtgggtggggtcaccctgatacttctctgaggtggctttttcttgcagtttttctgagtaactgacaggaatccttgactgcatgccgcctaaactagggtgtgcacagccctcgttctgtgcaaagagggtgcaaagcagcagagtgtctgtgacccatttgccacctaatgttactacaagatttgcaagaaccggtcacttatcagtaaccatttttatttaaaaagataaaatagagctttgcaggaaagtgctgcaggctcccacgttgccgggcagacgacaacctgggcgcctcgcccagctcctccccacagccattggcatccactgtcaggtttcaatgttcttggacctcagggccttcgtcctctccaatctaaatgcagagagacatttgacatggactctctcaggtgttttgcaaaatgcaacacattctcattgactctggtcactctgctgtgcactacatgtcaaaacctcttcctcctccctgagactttggtcctttaactgacaacccccctcccattccctccctctgccactctctgacccctggtcaccatcgatctacttgctacttctatggggtcaacttgtttagatcaacacttctgggacctcacgtggaattggtctctctgaggtagtggagatgctaagtagtgggatttcctcattccacattgtaccccatgaatgaatacaagcatgatttgccaattgaagcaatacaataaagacagaagaaatgtaaaatgc

SEQ ID NO: 16909 - protein, 118 aa, Homo sapiens
MSAIWRLLAAKGDEQAKVARPACRPRAAAVSCHQPSPDTQDACLTQKHSYVRPLRGSASCHCYQKKKPSKQKGQCHTRQPGAQQNKWPPKALWGPHPATDPSTVWFPGLQDPPGDLSA

SEQ ID NO: 16910 - DNA, 2398 bp, Homo sapiens
actagcagcagcggcagcagccctagtcccgcggtgcggtcgaattggtccccagccctccgggagcgcaccacaaagcagccccaacgcctctccctgcgtccgcggctcctcagcgctcggctccgtggtcaacttcccctcgctgggctcggctggcgggcgcggagggcagcggcggaacggcgggctgtctgctcgcgctccccgcgcacaacacttcaccctctcgcctcgggtctcgggggccgctctgggatcccggccaccagcaattgtccggaaataatgcaaaaggtgtcccaaggctcctgaccagtgaacaaagatttgagaaagacagccaagctcatgttttctcctgatcaagaaaatcatccatctaaagcaccagtaaaatatggtgaactcattgtcttagggtataatgggtctctcccaaatggcgatagaggaaggaggaaaagtaggtttgctttgtttaaaagacctaaggcaaatggggtgaagcccagcactgtgcatattgcttgtactcctcaggctgcaaaggtaaaaaaaaaaaaaaaaaagctacataaattaacttggagaatttgaaagacttttatgtgttgtttgtattctctagcattccccttacatttctatttcagaaattgccttttgtttggattggagaagagactttggagacatggtatttgaagagctgccatatggaaggggaattggacttttaaaaaaaaaatgacaaaccaggatcagtgggtggaaattagaaggaaacactctgtttccttattaaaagaggtgggatgggggacagggctttatctagtacttagaattatgcagctgtctgccctgagaagtgggaagttcccactctgttactagaggggtctccctggactggatgaagaatgtgatgtataatatgtgtattcaggtattagaagcacatttggatgaggtaatttttaaactaagggtctttacttaagattctttgtattggttgtattcatttttggtttataacttcatatatttgagcatagtaccttgcacaaagtagacctcaataattattaagttgaatcaaagctatgaaggcaatatccaactgcatctacaatataacttctcaaccccctagcctatttcatgcttctagcccccttgtattcttctaacaaaatttccagaagctggaccaccatttcaggatacttgggcttttcctagagtgacagacaaggagggggaatttcacatctttatattttctgtgaattcatctgcctccaattttataacactgactttgtgttacaaagaatttaatattgtaatgagcaaataagaaaaattagaaagagttctttgactcctggaagtacctgtatctttagctaagtagccctaggatgtacattaatattataccatctgaagcatatctttgtaaattaaataaacaagagacagaaaaattggcatatgatgtggttttaggttgcagcttcagtgtctgaaggtaattggcttttcagctttgttttatatccagtttgatttgtgaaagaatccttaggccttgactaggactcctctgttactatttgggagccagttggtgcagaaaagggacagtttctttttgctcctttggcgagaaggaatatactaagcaggtggtggaagtaaacctcagattgattgaatctgaggagcttcttacagtagctccccccggagtgctcttgacattttgggtatgccactttttcattgttcagtactttcccacatactacaggacatttataggtccttcacccacaaaatgccatttgagcctgcaaatcctcgtaacagccaaaaaatgcacagcatattttcagatgccccttagactgctaatactacctctggttgaaaaccactatcagggaaaatatttctaatccctgcctctgtaataccatattctgtacttttcttcctattttactctgccatgccctcatgttttcattgttatctctttttcatctttcatctttactaggcaataagaatcttagggatcacagattgactcttggctgggtgcggtagctcacacctataatcccagcacttgagaggccaaggtgggcggatcacttgagctcgggagttcgagaccagcctgggcaacatggtgaaactccatctccaccaaaaatacaaaaaattagccaagcgtggtggcatgccccgaagtcccagctacttggcaggctgaagtgggaggatcacttgagcccgggaggcagaggctgcagtgagctgagatcatgccactgtactgcagcctgagtgacagagtgagaccctgtctcagttt

SEQ ID NO: 16911 - DNA, 2219 bp, Homo sapiens
gttttgtatgtgcctaccactttatattcattgtatattcaccccgtatttatgtattccttgcatctgccctgagaggcagagtcatggatggaaaaccaaggcctggcttaagaccctgcccaggtatagctggtaacgtgagagtcattctcaagactgcctgcctccagtgcccataccctttccgccacaccacaccttggggcttgctgttgtagcctgtgtggtcactaggcatgtctgggctaaggacgggcaagtcccacaagtggctgtttcgtgtctcctgcagtctcctggctgatacttctctgtataagctggtgattcttgggctctttcctcatctccaaaaccgttgttgggatggctgggtggatggatgggtgggtaggtagatggaattcccaaagtaacacaaggggcattgggccatttgaggaagctgcagacagagcactggccaccaccaaagccactggagcttgggagtcaggcggccctggggggtccttgctgttgctgcgtctcccacaccttaatcagagcatcgccaatgcaataaagttaatggagccagtcatcctatgaaggagccaattccgtgcaaagatgatacatctttgaagttgatgaggcctattaattgagcttatgccccttaaaatgaattagattcttgaaatctaccacacagcagtacatccatttagtgtttctgtcaccgaggaatgaggagccaccagcacagagctataggaactgtcttcctgctgacatctagcatggcctacggctccttgggagctccacagatgtcatgcctggccagccattcttgttcttagcaaattccccaaatcggcataaatagctccaggaagaaagtgataccgatgatctatgggcctctggaagcgcatccagccagccctcagccattagcccctacctcaggatcagttagcagagatgcacaagaatacagctagactgccagcacttcaaaaatggccactgcacaggtggaactggtgcagggtggtccccgggctccagtagggtaagcagacatggtttccaggaggtgtgtagacctggaactgactgagcagagtgagtgcagtcagtgagctcagtcagtgactgagcagatctgactgcagcctgaacgggaatcatcacgcggcatcccctggacccccaaagatgcaccgaagctctgctcagtctcagactcctcccagttaccaccactcgcagttgcttaagagcacaaagtggcacttgttttgcccacagaacatctgctgaagacaaaacttgtgtttatagctcttcacttcaaaagactggccgtgttataaaaagaaagggaccatctgtccctcttctggaccccagcgcctcttggaagagatttctgtgcaagaaggcagtgagaagtcagcgtcgacttcagggaactattttggggccggaaaagaatagtgcctacccgccaaggggaccgtcgccggcagatgaaagccagctttgaggaggccatgcgatgggagatgctggcccggaggaggtgggctgtgcgccaatgatgctgcccagatattccagcagagcagagaccccagagcagagaaccaactggcaggaccgagggatgtgagggaaggcgaaggggcagggctgtgaggcactgcagctcccaggagcaggcgtgagaaatgtcagcaacagcttgctgccacgcagagtcagatatcatgtttgcatcacccatgtgcgttccttcacccgacttctggggccattcttatctgcaaggccccttagggcagttctgcctcttgggaacaccttaggctgagtgatcgccttcccgtggctgagagctgagaagttcttccagactgcacaggtgtccggtctgtctgtgatgcccgcttaagactcatctgccttaagcccctgggcaccaatatagaaaagtcatgtgagtccaggagaagctgggcggaggtgaggtggagccaggattagcacggggtggggcctgcagaggggaggaatttcccaggcttcctggccggcatctcccaggctgagcatcttccagactgaaactccctaagaagggcttggccctccccgcctgcacggtgtttcatcggtttggaacagtcctgtttccttcccctcccctcgtccccaacagg

SEQ ID NO: 16912 - DNA, 2125 bp, Homo sapiens
gaaaaatatgaataagggctaccaattgttttagttttaatcaaaactaaaaatatacatctatgtctttactgatttaaactcacataaaactgccttccaaaataaatgcagaattgggcacttatttgttctcatgtctgtcctctcagagccaataagctgtaaaaaactctcaaaataaaactctgttttattttctgttttgccccggtttctatcacataagtgctcaataatatatgctttacataaatgctgaatgaggaacatatatatctatataaactggggagcaatgcaagactggaagaatgtcttgatgtgttggagaagttgaagaagagattgtgggatagctatgacacatagattgagctacaccacgaatctctccatgtaacccaggaacccaaggatatgtgatgagatgtttgtggaagcaggaattaaaaggaagatttcttttaataatgccttgcagttgcgcagtgatttagaccttccaaaaacacttttaattatattatctcatttgatcctcaaaacaatcgtgggaaataggcaccccagtcattattatccccattttgcagatgaagaaactgagatagagctttaagtatcttgcccaaggttaaataagtaattagtgagctgagacaaaccccccactatttctgtcctcttactcagtctcactccactgtacctttgtgcaacaatgtgaagcacatccaagatgatatttagtgtggggacctctgcgtagagggacaccagtttcttgtcacttccatattagcacagaacaagctgacccactgtaactaggaaacataagtgaatacattcttttaatttaaaatttttttgagagcctgttctctacaaagcacatactaggctctgcggcaatgcagaaataaataaaacctagtccctgttctttggagatcacagagcagtgaggcaggccaacatacaaataacataactacaacagagataaagcacagggatatgggaaagtagagagcactgggattaattttgagtccactttcctctcatccagtccccagcctgaaagatatgaactgtggtggcccacacagcgggactgtaaaccatgtgacaagagtcatttcttaccccttattcatgtttgtaaactccacagtagttggttctttgccttgcatagagtatgtgctcaataaagacctactttctgaaaggttcacagagttcagcccaacacaggacaagttctagaaggcaagaagttaacctcaagattcaaagtagctctgagaattaagaaccagccagacccttccactgagcctagacccaattaattacctctgctctaattaagggaatcagtaatgtaagtaattgtaatatgggcgatatagtttgcctgtgtccccacccaatatcttattttgaattgtaatccccatgtgtcaagggagagaccaggtggaggtaattgaatcatgggggcggtttctcccatgctgttctcctgataatgagcgagttcacgagatctgatggttttatgtgtttggtagttcctcctgcattaattttccttcatgctgccttatgaagaaggtaccttgcttccccctttgccttctgccatgattgttaagtttcctgaggccttcccagccatgctaaactgtgagtcagttaacctgtttcctttataaattacccagtcttgggcagttctttacagcactgtgaagacagactaatacagtgggcttgttgacatagttttgcccttttatgaatgtgattatctcaattttattatgttaaggaaggacacagtggcccacacctgtaatcccaacactttgggagtccaaggcagaaggatggcttgagcccaggagttcaagaccaggctgggccacaaagtgagaccctgtctctacaaaaaattaaaaaactaactgggcatggtgatgcatgtctctagtcccagctactcgggaggctgaggtgggaggaccacttgatcccaggaggttgaggctgcagtgaaccatgttaccactgctgcatttcagctcgggtgacagagcaagaccctgtc

SEQ ID NO: 16913 - DNA, 2480 bp, Homo sapiens
aaaatttttaattaactttttttaaattaaaaaaaattattaattatttttaatagacaggatcttgctatgctgtccaggctggtcttgaactcctggtctcaagtgatcctcctgccttggcctcccaaagcgctggtattacaggtgtgagtcactgcacctggccaagtttattttttctgtatacatttcttcagccacttcaatcaaacatttaattaacatgctataatgaatgacttttcttactaggctaacaaatgaggcacttggaaacttactttagttacagcctcactttctttttttgtgaggaaattctgtgttgacatactctttaatttctttttaccttttctgactgattttctgtaatttgggaatattgtgatgactgcttattctaataatattaacatatagcattcttttagcacataaatagtttcatttgcatagtaagcgccaggctttgccatcgaatttgataaaataatccatgcttcatggtaccttagagatgggatattttaagtccaattctctctctctctctctctcatttttttctttttggagacagggcctggagttacccatgctggagtgcagtggtgtgactgtagctccctgcagcctcgaactccttggcctcaattgatcctgccaccttaccttctgagtaactgggactacagtgtgtgtcaccacaccttttttttttttgacatgagggatatatgctggtaataaaaataaaattttggggtatggcaataggcatgctactcaaaatgctgccaagttacaaagtgtaactatgatttgtaatggatagcagcagtgacaagtgatgagaatggtctcttgtcatgactactctgttatagtgtaaaagcagccatagacagtagataaatgaataagtatggctgtattccaataaagttttactcatggacactgaaatatgaatttcatataattttgtgtcacaaaatattaaattttttttctagccattaaaaatgtacaaagcataattagctgtggactgtacaaaagcaggaagcaggttggacatggcttttgggccatagttggccaacccctgctagagaacatctatacatagcagccttttgagtagttttgttcatctgaggtcatgaaaaggaattagtattggcagggtgcggtggctcacgcctgtaatcccagcactttgggaggcaaaggcgggcagatcacctgaggtcaggagtttgagaccagcctgaccaacatggtgaaaccccgtctctacaaaaaattagccgggtgtggtggcgcatgtctgtagtcccagctactggggaggctgaggcgggagaatagcttgaacccaggaggtggaggttgcagtgagccgagattgtgcattgcactccagcctgagcaacaggagcgaaactctgtctcaaaaaaacaaaaaacaaaaaaacaaaaaaacaaggtggcacagctggcttgagcaactgaactggaaacaagatgcaggaccccaacgcagacactgagtggaatgacatcttaacgcaaaaagggtatcttaccccccaaggaaagtctgaaagaattggaagaggaggcagaagaggagcagcgcatcctccagcagtcagtggtgaaaacatatgaagatatgactttggaagagctggaggatcatgaagacgagtttaatgaggaggatgaatgtgctattgaaatgtgcagacagcagagactggctgagtggaaagcaactaaactgaagaataaattttgagaagttttggagatctcagggaaggattatgttcaagaagttaccaaagctggtgagggcttgtgggtcatcttgcacctttacaaacaaggaattcccctctgtgccctgataaatcagaacctcagtggacttgccaggaagtttcctgatgtcaaatttatcaaagccatttcaacaacctgcatacccaattatcctgataggaatctgccccgatatttgtttacctggaaggagatatcaaggctcagtttattggtcctctggtgtttggtggcatgaacctgacaagagatgagttggaatggaaactgtctgaatctggagcaattatgatggacctggaggaaaaccctaagaagccgattgaagatgtattgctgtcatcagtgtggcactctgtcctcatgaggagggacagcgattctgagggtgactgaggctacagctgctatcacatgccgaactttcttgtgacaaatgtctggattttttaaaaaaggaaaaagcaagaatgaatccttctggtttttagttttgtataaattatgtttcaaatctttacattttggaaataatcattgctggaaattctgttaaatattttggaacttttttttaaattatagtatttcctctaaaaaaattaaaaccagccattagt

SEQ ID NO: 16914 - DNA, 2256 bp, Homo sapiens
ttagtaacggatatacatttgtaaaattacagactggggttaggagtgcagactgttattgtattgtgttcttgtgcaaaaaaaccccaggtgtatcatgggaatacatctttgaccttggacttccttgtgtcctgctggcagaggtcactagttttgacacctggtgagagatgtgaagtgttcctttatttacttatatttatttatttatttatttgaggcagggtcttgctctgtcacctgggctggagtgcagtggtgtgaacatggctcactttaccctccaactcctgggcttaagcagtcctcctacctcagcctcctgagtaggtaggactacagacgagcagcaccatgcccagccaatttttttatttttaattttttgtagagagaggatctcactatgttgctcaggctggtctcgaattcctggactcaagcagtcctcctgcctcccaaagtgttgggattattggtgtgagctgctgtgcccagccaatgcttcttttatatatttatttagatttggtgtttgatttttttgttaataagggaccttctcaaagatacttttaaatgaaaagacaaagggtcagaaaatactggtttttttttttttggaaacagtctcattctgtgacccagactggagtgcaatggcgttgatcttggctcacagtgacctccgcttcctgggtccaagtgatgcccctgcctcaggctcctgagtagctgggacaggctcatgccaccatgcttggctaatttttttgtacttaagtagaaatggggtttcgccatgttggccaggctggtcttgaaatcctgacctcaagtgatccatcctcctcggcctcccaaagtgctggaattactggcgtgagccactgcccctggccggttggctgctattttaacttaaggggtagaagactggaaaggaggacacatgcaatacagtgtgtatgagtatgtgtgtatttatatatgcttgttgtgtgtgcttagagtgactctagaaagctgtggaagagactgataacaatgctgttggggtaggtagattatgtagtcagatgtcagagagacttattttcatgtgtaaccttttgaactgttgatgttcttattaccattttgaaaaaaaaattgaaaaatcgaggcatgtggttaagcttttaaaaactttatttctttggatttggataggatggtcaaaagaagggggaaaatgatgttaatttctcctgtgcttttcagtcagttcttaaagagctgtaactgtatatttctgtaaacacttattttcatttttcagacttgttggcagaattagagtagtggtatgattatcaagtgttgtttctgtttcatgactgggtccttagaccagtggtgaatcagtgatgattttttttttttttttgagccacagtcttgctctgtctcatccaggctggagtgcagtggtgcgatcggcttactgcagcctctgcctccagggttcaagtgattctcctgtctcattttgtttattttttttgtacactcatcaagatggtcttttccattgcacacaggagtgtgtggcattactgagtgtcatcatacactcactgtattttatttaaaagagatagactgggcgtggtggctcacgcctgtaatcccagcactttggaaggccaaggtgggcggatcacaatgtcaggagatcgagaccatcctggctaacacggtgaaacccggtctgtactaaaaatacaaaaaattagccgggcatggtggtgggcacctgtagtcccagctactcaggaggctgaggcaggagaatggtgtgaacccagaagacagagcttgtagtgagccaagattgcgccactgcactccagcctgggtgacagagcaagactccgtctcaaaaaaaaaaaaaaaaaaaaaaaaaaaaaagatagcagcatggctgggcgcagtggctcacacctgtaatcccagcactttgggaggccaaggcaggcagatcacgaggtcaggagttcaagaccagcctgaccaacatggtgaaaccccgtctctaccaaaaatacaaaaaattagccgggcatagtggcgggtgcctgttattccagctactcgggaggctgaggcaggagaatcacttgaacccaggaggcgggggttgcagtgagccgagatcgcaccattacactccagcctgggtgacaagagcaaaactccgtctcagaaaag

SEQ ID NO: 16915 - DNA, 2428 bp, Homo sapiens
tttgttacaaaactggatgctgttaaaatcctctggaaaatatttttggttttttggtttcactttagcgggcagttaacctggttaggttcagactgcctctgtgggctgtggatccagtttgaacttacttttcaaaaccttcgtattgctgttcaggtcccaggtgtgccatccatgccattgtgcagttctcaacgcctttcctctgccgccttgggtcagttcacacatgggcatgttggtggtaaacttgagattgtatacacaaatttagaggacgtttcttctctccgtgacttcccttgtacacaagctcccaagagtttcttttcgtggttctttggtgagaaaactggaattttagcttctttgtgcttttcatacgttttctgtagaggggctcatttcctgaacaaaatggagagagagaaaagttagagaaaaaaataaaatgaattccctcttccatactcttccgatcatcgtctttttcctagttcttttgtcagaagaactctcttttagagtttaggagacagctaccagccacaggtgtgcagactcaggattggggcttgctttgaggcagagctgagagagaagaaaaattaccagatatccacccctccccattgtccctctcccattcatcatcttttctagttctctagccagaaggagtttctcttggaacttttctctgtcttcactcactgcacagttaatgagatttgggctgtcctcaagtctaagctgacatatgtgggagaaaaaaaccaggaaactcactactgttttgagttttgatttctctcgccagtctgcttgcttcaaattacttttcagagtccttgtatatttgctttatgtattctttccaggatttttagtaataatcaatggacaagatagggtggagtgtgctttctccatcttagctagaactgggaccccgtcccccactcgtaaaatataaataatgacttagcatggcacattaggtgggcattagagacaccagggaagcgattacaaatataaatgcccaggttgtatctccagataattaaaaatctttcaggagtaggatccagaaaactatatttaaaagttctctaggttcttgatatactatgtaggttgtggtctgaggaccactacatggggatcatttggaaacttgttagaaatgtagactcaggttccattccagacctgctgaattggaacaagatccccagatggtgcctacgcacagtaaaatttgagcagcactgccctagcatgattctagtgtgcagtcaatgttgaggaccactgtcttagaggattgcgtaaaagcaaatgacgtgtatataaatttagattgtaatattctctgagtataaactcattaggtgcaagctgagctcaccctccatgttttctgtgttcctggttaaagtaagttacctttgatgaaaaccacaggttcatctttgacttcaaatcagatttgttgctattgaagctaattggatcccagctcagctttgtggcttggattcacaccatataaaatcttcaacagacattcattcctttgttcagaacacacaaccttctaacgtgaacctccaattttctaaattcattctttttctacttcacctgaaaccacagatccatggcacttagtttctctgtaacagcagctctaccatggtgtccagaaattttagcccctactatcaagaacaaaacatccttgtacatgtttatacatctttttgagtaggagttttccaccagttgcagggattccctgagtctagagtaatgccacaatgctgctcccttttactcctttctaagcatttctgtcagggagaagacttagattcagttgttcactttaacattttccttagatactctcttagaaaagttgtattctgcgcacttctgttatgaagggagtaagggattgctgagatttgttaagttaccaaactagtcttgatagatgtatgattattacatatccaccatcacttcatttagctgggcaagtattatcagtttggttcatgttagctaattaggtcactggtttgttcctaggacagtgttgggctggtcatataagttagaagcacctgggagctgggcatggtggctcacgcctgtaatcccagcactttgggaggccgagcgggcggatcatgaggtcaggagatcgagatcatcctggctgacagagtgaaaccccgtctctactaaaaatacaaaaaaaattagctgggcatggtggtgggcacccgtagtcccagctacttgggaggctgaggcaggagaatggtgtgaacctgggaggcggagcttgcagtgagctgagatggcgccactgcactccagcctgggcgacagagcgagactccatctc

SEQ ID NO: 16916 - DNA, 1239 bp, Homo sapiens
gcattaagctgggcacagtggctcacgcctgtaatcccagcactttgggaggccaaggccggcggatcacgaggtcaggagatcgagaccatcctggctaacacggtgaaaccccatctctactaaaaatagaaaaaaatcagccgggtgtggtggcgggcgcctgtagtcctagctactcaggaggctgaggcaggagaatggtgtaaacccgtgaggctgagcttgcagtcagccaagattgtgccactacactccagcctgggtgacaaagcgagactccatctcaaaaaaaaaaaaaagaaagaaaaaagaaaatgagcacattactgtgattttacagcaattaaagtgattataagataataccacaaacataggtacaccagcaaattgaataaccaaatgaaatggcaaatctctagaaacacaaagcctaccaagactgaatcacaaacaaagaaaaaatatgggtaaaccagctgggcatggtggctcccgcctgtaatcccagcactttcggagtgcactccattgcactccagcctgggggacaagagcgagacttctcaaaaaaatagaaagtaggggtaaacctataactagtaagaacattaaattactaattaaaatcctttcaacaaagaaatacccctgactggatggttttaccagtcagttctaccagacatttaacgaaaattaatgccaatcctttgcaaactctttcaaaaacttgaagaggaggaaatactttctaactcgttctatgaggccagcattgccttgatgctagggtcagacaaagacactacaagaaaacaactgaccaatattgcttatgaacattggttaaaaaattcttaggaaaacagtgccaaactggttgggcacagtggctcatgctggtaatcccagcactttgggagattaaggcaggtggatcacttgagctcaagttcaagaccagctgggcgtggtggcccatgcctgtaaccccagcactttgggaggccaaggcgggtggatcatgaggtcaggagatcgagaccacagtgaaaccccgtctctactaaaaaatacaaaaaaattagccaggcgcagtggcgggcacctgtagtcccagctactcaggaggctgaggcaggagaatggcgtaaacccaggaggctgagcttgcagtcagccgagatcgtgccactgcactccagcctgggtgacaaagtgagactccatctc

SEQ ID NO: 16917 - DNA, 1613 bp, Homo sapiens
agagtgtgcaaatcctgcagcagcaactgacatatccaggttctatgatcaggactgactaggtggttgccgtgacccatagagaacaaggaaagatgggctggtggattggcccacctgggagccacatggggcaaggggagccctcaccctcagccagccaagggaggcagtgagtgagcatgctacccagcctgggaaactgctttttccatggatctttgcaatccacagatcagaagatcccactcatgagaccacaccacgagggccttgggtgccaaccacagagccatgcagattctcaacagccactcagctggagtctgcctaaaactaccgagttcccaagttggggaggggtggtcatcatcactgtggctgcctgctgcctaaaccctctgagttccctgggggagggggagcaatcatcactgtggttgctggctgcctaagacaactgagcttcccaggagaggggcagtcatcatcactgcagctgcctgctgcctgaggaaactgagctccctaagaagggacagcagccatcactgtggctgctagctgcctaagacactgaactcctggggaggaagggcggcagccatttctacagatccaggctgctgtttttcctttgctgatgccaggaagactggacggcttggtcccaagaggtattccccacagcgcagcatactggctgtggcagatcatggccagactgcctctttaggctgaccctgacccatccctcctcactgggtggggcctccctgcaggaactccagcaactcaagccagggaattagggagagaactctgatctctctaggtctgagtccctagtgggaggggtggctggctgttgtctccacaaaccggaagacttgttctttccccctgctcactctgaggattccaggcagcccagatgagtgggattttccccggcacagcatacccccttcccaaagggacaatcaaagtgcttcattaagcaagtcctggatcctgtgcccctcaactgggtgaaacaccccagtgggtcaccagacaccttatacaggagcatttctactggcatcaggtgggtgcccctcaaggacagagatcccagaggaaggagtggggtcccatctttgctgttctccagcaccctctggtgacatcttcaggtgtgggagggacccagataaatagggcttgaagtgaatccccagcaaaccacagcagccctacagaagaggtacctgactgtcgaaagaaaaacagaaagcaacaacaacatcaaccaaaaagtccccacgaaaacctcatctaaaggtcagcagcctcaaagatcaaaatgagacaaactcatgaagatgagaaaggaatgaaaaacccctaacaactcaaaaggccagagtgacttgtttactccaaatgatcacaacacctctacagcaagggcacagtcctgggtggaggttgagatggatgaattgacagaagtaggcttcagaaggtgggtagtagcaaacttcactgagctaaaggagtacgctctaacccaacatattggaacgaatcccagaacttaaagattggttctctaaaataagacagac

SEQ ID NO: 16918 - DNA, 1882 bp, Homo sapiens
ctgagtgttaataatagctaatacacattgtaattacctggtattatagattatcatgcttaagtgtacctcaatcaccatgagtctgtatcttctaatatcttttactgactgatatggtttggttctgtgtctccacccaaatctcatcttgaattgtacttccataattcccatgtgggagggacccagtgggagataattgaatcatgggggcagtttcccgcgtactgttcttgcagtagtgaataagtcttatgacatctgatgattttatcaggggtttccgcttttgcatcttcctcattctctctctgcctgctgccatccatgtaagatgggagttgctcctccttgccttccaccatgattgtgaggcttccccagccacgtggagctgtaagtccaattaaacctctttcttttgtaaactgcccagtctctggcaacttatcagcagcatgaatggactaatacactgacccataaggaagtgtctttgtttggactaatgacattattttcctacctatttggaacaattcatttaaaacttctcaatattaagaattgtgacaaggattcttctttagttttacataatttcacattatctttttggataaataatttgagtctttatttcctcgtagtaccttgttctcttatcaccttttcttcttttggtcagccatatccagtctttccataacattatttagcaatacttttaaagcacctactctgtgtcaagtactatgctagttgctggatttattacagagaataaaatagacattttctgtactcacaacgtttagagtctagcagggaaaatacatgtaattatacaaagtagaggagagagagagagagacaaaaagggaaagagaaagaaatacacctaactcagatttttgcattccaggtgtcaaaggggttaccaggttaagatggcagaaagaaggagaaaaacggggcctgtcagggataattaatagcattttaaagcctaggagcaagagaaagtatgatgacacagaggacctgaaaatagtggtagaggctatgatagactctaccttttcacaatgaggaaatatggagctcattaatttatatatatatataggtttgcctgacttcgtccaagtacatggaagttttgatggttcatgttgcagtgaagatgagtgaactaaacagagaagctcttacgttgtagaggagtttaaataaacaaggtacagtcatagcattatgctgttatagctggagggtttgcaatgtatttgatcaggagttaagcaaataactaaagagtcaagtggtcatggtataagttggtaagttttgatatggtgaggtagagagtcaaactagagaggggctgctcactctaaagttactcaaaatactctatttatctaacaaagcatgggcttaaaacctctgaatcaacccaactgtcttatttcctagctgaggaaaccaaggcctagagaagttagagaccaaagtctcacaacaagtgagcagcaaagatgggactggaacacgtctcctgactttcacttcgctcacttgctattgtttaaagaaccttttctagaggccaggcacggtggcacttggggaggccgaggtgggcagatcacgaggtcagcagatagagaccatcctggctaacatggtgaaaccccgtctctactaaaaatacaaaaaattagccaggcatggcagcaggcacctgtggtcccaactactcaggaggctgaggcaggagaatggtgtgaacccaggaggcggaggttgcagtgagccaagattgcgtcactgcactccagcctgggggacagaatgagacatgagactccctctc

SEQ ID NO: 16919 - DNA, 1918 bp, Homo sapiens
tagcagtttagtccttaatctgtggcttcttaagacctctgagttccatgttagaatattttaatgtattagtttctaggaaataggagtagctgaaaggagaggaggagtgaacattcttaagcatggagttatgttctaggctgcgattgacatatgcagtctaccactatgcaaggacgaatgaggtcagtgttgtaggaacatctggtggagtaaaggcatcccatcatctgtgaagtggagtccgcctgcctacccagaggttgctgtgaggattaagaaattacatatggaaagcaactggcaaagtgttttgcttatagaaagctctaatatgctaattgccttccccgtttctttatataatttataaggaaactaaaaaccagcgattaaaaccttagctttggtttctatatgtgtaaaatatagttcttatgtttgtctctcattaacctgtaagtttcttcaaatctgggagcatgtctaattgctgtgtatatatcttcagtcctgaagatgatagtagaaaacagttcttctttgaaggtttgttacatggatggatggatgattaacttgtgccagaacacacaggagtcaacagtgaaactgggccaaggacccatgtctcttactcttaacacagtgtttctttctagtcctgtgtttttctgtactatgtacctactatggatcatgccctgtgttttgcaatgaagacctctaactttatttccattccaaggagagggaggtttcagcacactcctggaacaaccagctttcttttcccttccgcctagtgctgcccccacctgcttagggctctcttttttggcttcaccaattgttgctctttggcatgaagagatgctttgtgagccagatgggtctctgaacggacgtctttgatggagagtttaccacttgcacagccaagaaagggaagtcactagaaggacttctgtgtgggctggcctggctgctcagcatttcagactcctgttgtttacaagtcttctccagaagccctggaagaatgaactgtaaggcctggactatggaatggtacctgtgcaccagcaattcctgagcaagcagcacagtgagtagatgattcctggaaacctgagttcaggtgaaaatgagagacagcagtctccttgtccctgcctatgggcttcctcatggccagttctacctctgttctaaatatattcttcactgatgaaatttcaacttcatttattcttctgtccttgaggaaaagtggggaagagtaaagaggtcttttctctgcctcaaatttttatttgttcttatttgttgatacttatttgctggagatagcttagtggtttttttctctttctttttgagacagggtcttgctctggtgcccaggcttggagtacagtggtgcagtcatggctcactatagccttggcctcctaggctaaagcgattctcctgcctcagcctcctgaagtgctgagactacaggcatgagctgctaggcttgggttgattatttcaattaccatttgctatgtaacgaggctccaaaacttagaacagaaaccagcctgacttggtttaagcttctaaaaatttattcattagaaggatctggctgggagcggtggctcatacctgtaatcccagcactttgggaggctgaggtgggcagatcacaaggtcagcagttttgagaccagcctggccaacatggtgaaaccccatctctactaaaaatacaaaattagctcggcgtggtgccgtgcgcctgtaatcccagctgctcgggaggctgaggtgaaagaattgcttgaacccaggaggcggaggttgcaatgagccgagatcgtgccactgcactccagcctaggtgacagagtgagactctgtctcg

SEQ ID NO: 16920 - DNA, 1681 bp, Homo sapiens
  CDS (507)..(1196)
gggccatcgtgttgctctccgtgctctgcaatggactggtgctgctgaccgtgttcgctggcgggcctgtccccctgcccccggtcaagtttgtggtaggtgcgattgcaggcgccaacaccttgactggcatttcctgtggccttctagcctcagtcgatgccctgacctttggtcagttctctgagtacggagcccgctgggagacggggctaggctgccgggccactggcttcctggcagtacttgggtcggaggcatcggtgctgctgctcactctggccgcagtgcagtgcagcgtctccgtctcctgtgtccgggcctatgggaagtccccctccctgggcagcgttcgagcaggggtcctaggctgcctggcactggcagggctggccgccgcgctgcccctggcctcagtgggagaatacggggcctccccactctgcctgccctacgcgccacctgagggtcagccagcagccctgggcttcaccgtggccctggtgatgatgaactccttctgtttcctggtcgtggccggtgcctacatcaaactgtactgtgacctgccgcggggcgactttgaggccgtgcgggactgcgccatggtgaggcacgtggcctggctcatcttcgcagacgggctcctctactgtcccgtggccttcctcagctttgcctccatgctgggcctcttccctgtcacgcccgaggccgtcaagtctgtcctgctggtggtgctgcccctgcctgcctgcctcaacccactgctgtacctgctcttcaacccccacttccgggatgaccttcggcggcttcggccccgcgcaggggactcagggcccctagcctatgctgcggccggggagctggagaagagctcctgtgattctacccaggccctggtagccttctctgatgtggatctcattctggaagcttctgaagctgggcggccccctgggctggagacctatggcttcccctcagtgaccctcatctcctgtcagcagccaggggcccccaggctggagggcagccattgtgtagagccagaggggaaccactttgggaacccccaaccctccatggatggagaactgctgctgagggcagagggatctacgccagcaggtggaggcttgtcagggggtggcggctttcagccctctggcttggcctttgcttcacacgtgtaaatatccctccccattcttctcttcccctctcttccctttcctctctccccctcggtgaatgatggctgcttctaaaacaaatacaaccaaaactcagcagtgtgatctatagcaggatggcccagtccctggctccactgatcacctctctcctgtgaccatcaccaacgggtgcctcttggcctggctttcccttggccttcctcagcttcaccttgatactgggcctcttccttgtcatgtctgaagctgtggaccagagacctggacttttgtctgcttaagggaaatgagggaagtaaagacagtgaaggggtggagggttgatcagggcacagtggacagggagacctcacagagaaaggcctggaaggtgatttcccgtgtgactcatggataggatacaaaatgtgttccatgtaccattaatcttgacatatgccatgcataaagacttcctattaaaataagctttggaagag

SEQ ID NO: 16921 - protein, 230 aa, Homo sapiens [sequence omitted]

SEQ ID NO: 16922 - DNA, 3109 bp, Homo sapiens
tatgcttttctgtacactgctaagttacagcatttgggtttggaattttcagtagatgtttgtttgtccctggattggtttttttttccttctgtttagtgaacagaaacagattccatgccctcagggtatggtagcaccagccactattaagaagcccaaaggacagaacctgaagctttgacaatgtaccctagggctggggggagttcaaaggccaaagacgttcagcaccagggaagctggaaggagccagcagggtgggaccacggtgatgaggaagtgcctggggagggaaattttggtgtatacagcattctactaacagtctttccacccttccccctttttccaggtttggacagtgccaataggtatgtctaggctttgtgacttttacgttttccctcttgaaatgccctgcaaggatgttaccgagaaatgccctgaatttctgaatcatcttatggggcagaagaattggccatttggaggatgttgttttattttgggtgttttgtcttgttctcctattgtaatatgacacacgggttctatctctggttgctgtcagtattgagactggaaaactcagtgttgccacctttcacagtatctacacagtctcttctctggttagcatcctgaggaagaacactgctctgagaaggccgccttcctcattccagggcggaatctgttcactcatccagcccagacccagcaggagcctctttcctgtgtgtgaggctcggcgctagatgctggatgtgcaggggtgggcgtagaggagggcttaaaccacacgaacgcacattaccaactgggatgggtctgtgaggaaggacaacaggaaggcactgattagaatagaggggcagggaagccattttgggaacttggtatttgagctcagacctgtgcaaaggaatgttagctggtgaagaaaaactcagggagtgtgctccaaacagcagggatagcatgtacaagctgtgaatcaagagatgggcccatggggacccagaaggacgccagtgtggccgcagcctggtgaatggcaggccaatgtctgtacgatcaggagctggcattcctgtgggccctcttgtggggctcagtttcattcttaaagtagtggaaaagctgttggaaaatccttgggcttgaaatgacataatttgattaatgtttttaaaagatcgactatggtcgctgtatagaaaatagattagagagggcagagtggacacgggacaccggtggcagaggttgaactacggaggcactagtagagaagggaactgtagggaaagcagggctctgggcagggttgtgggacaggcaagtgtcgggaatggctgcttgtgctgtggcttgggaaactgggcaaactgcagagaaagatgctcttacttgcccttaacttgtgggcttttgtgatccctggaatccgtgcttgtgatgagtaatatttgtgagtaaccagatgatcattctattctcccctctcctcacccaccctacccccaccctcaccaccacacaggtcatttgtgagagaaacaaaagccaccaattcagatgtcaggaaagaggtgaccaatgtaatctcaaaggagtcgaagctggacagtctggaggctgcagccaaaagcaagaactgctccagcccccagagaggtggctccccaccctgggctgcaaacagccagcctcagcccccaagggagtccaagctggagtcatgcaaggactcgcccagaacggccccgcagactccggtccttcagaagacttccagctccatcaccctgcaggccgcaagagttcagccggaaccaagagcaccaggcctgggggtcctatcaccttctggagaagagaggaagaggccagctcctccccgtccagccaccttccccaccaggcagcctggcctggggagccaagatgttgtgagcaaggctgctaacaggagaatccccatgtagggccagagggattcagcattccccaaatttgagagcaagccccaaagccaggaggtcaaggaaaatcaaactgtcaagttcagatgtgaagggcttgtcgtgatggaggtggccccctccttctccagtgtcctgaaggactgcgctgttattgagggccaggattttgtgctgcagtgctccgtacgggggaccccagtgccccggatcacttggctgctgaatgggcagcccatccagtacgctcgctccacctgcgaggccggcgtggctgagctccacatccaggatgccctgccggaggaccatggcacctacacctgcctagctgagaatgccttggggcaggtgtcctgcagcgcctgggtcaccgtccatgaaaagaagagtagcaggaagagtgagtaccttctgcctgtggctcccagcaagcccactgcacccatcttcctgcagggcctctctgatctcaaagtcatggatggaagccaggtcactatgactgtccaagtgtcaggtctgtctctgcagctctctcttggggattaacatgaaaatggtcttggttgcaatgggtattgctctccgaggacccgctcagatccttgatccaccagaaaatcagatgggaccatcaggtgatggacccaaagaaatggagactcttgtcctctcttttctgccttctctgggtaggattttctggattcatgattaaatggtccagaggaagaagatggccatagagctagagcagtgaaagattaatttgaaaatatagtgtggccagtgtagctggaaggttttgaagactggtacaaaaccagattatgggccgggcacggtggctcacgcctgtaatcccagcactttgtgaggccgaggcagcagatcacaaggtcaggagatcgagaccatcctggctaacacggtgaaaccctgtctctactaaaaaatacaaaaaattagctgggtgtggtggccggtgcctgtagtcccagctactcgggaggctgaggcaggagaatggcgtgaacctgggaggtggagcttgcagtgagccgagatcgcaccactgcactccagcctgggcgacagagcaaagactctgtctc

SEQ ID NO: 16923 - DNA, 2335 bp, Homo sapiens
tgcttgatttaaaaatttcagtcttgttaaatttatctcataggattctgacttcctcctctgttatcttgaatttcattgggcttgctcaaaacaggtattttgaattctctgaaaggtcaagtatctgtatcactctgggattgtcactggtgccttatttagtttatttggtgaggtcatgtttctcgggatggtctcgatgctttggatgtttgttgatgtccgagcattgaacggttagatatttgttgtggtcttcacagtcttggcttgtttgtacccatctttcttgagaaggctttctaggtattccaagtgtgttgtgtgttgtaatctaagtctttggttactgcagctgcatctgcattagggggcacctcaagccgagtaatgctgtgactcttggcagatgcgtggaagcactgtcttggtgatctggggtaagatccaagagaattccctgcattaccaggcagagactcttttccccttctcttgccttcctgcaaacaaatggagtctctctccatactgagctccctggatcctggggcaggggtgacacaagagcccatatggccaccaccactgggactgcactggatcagacctaaagccagggcaacactgggtcttgcctaaggcccacagtgaccactgcctggctattgctgatgttcacccaaggcccaggggctgttcagtcagcagttggtgaacccagccagacccatgtccttcccttcaaggcaataagcttttctccctgctggcccaaggtgggttcccttctggccctgggtgtgtctggaaatgtcatctgggagctagggcctggatgagtgcatcagggctctgcctggcaccctatcctactgtggctgagctggtgtacaagttgcaagacagtcttctttactcctcctcctcctctcctgtagcagagagaaggaatctctcccaaagctgcgagctgtactgcttggggttgggggaggggtggcacaagcactcccttagccaccctggctggtgtctcactaatttgtgtgcaccccaagtccactggctccaagggcagcgcagcaccagggctttcccaggagttgcactctttgtggcctagactgtctttcaagtttatttaagtttatcaagtttatttaagtgctctggcactttagccctcagtgatggggctagtttgaactcaggttctgactgctaggatgggacagtttccctctggctggggctggtctaaatgttccctccatgggcactggctgaattctgccccatgttgctttctgctgtgacaaggcagcagtgagttacaatgcaaagtctcacaattactgtgctctccctcccctaagcacacagattctctctcggtgtcacgaggctgctgctgggggacgggggtggggtggtgtaggcaattcaagactgtctttcctaccatcttcagtgcctttctccttgatacgctgttaaaaccaggcactgtgattgcttacctgatatttgttttttatgaaggggctttctcgtgtggatagctgttcaatttggcattcctgttggggggtggacagtgattgctggagggttttatttggtcgtcttgctccacctcatttcctgacatagaatttttggttggagatacttttcaactggaattttgaatgggctacttcattgattgtttatgttcattgcagctgttaagatatctgatgcctgtttatcttaatttgggtttcaccaaaagctatgcttagtagatgacgagctgagaaaaggacttgggtgcaagtaattcatttgggaattgacctcggaaattaggggcaggtaagacataaggatgagaaaagtcaataaggaaggatattattgaaaaagttactcctgtgggcaactgcactcagtcctgctgggaccctctcagagcccatgaaacacaccttagaattgtcccatgcaggatcaaggaaactgggatgtctgtctcccaattactgccctttgttgcttgagggttttacttggagaattacctccctggcactccagcccatcccatactcaggctgaacatgcttctctggccagagaagagattcaggcagagaaactcaggaacttgaggtagaaagacctcaaaccatatgagaactgtccaccaaagctgccatagaactttggcttgggctaagaagttacaaaccttatgtgcataacattagtagcaacaaaaaaaagcactgacatctcagatcagaaacaaaggtagagacattctgcagagtagttgaacacc

SEQ ID NO: 16924 - DNA, 2613 bp, Homo sapiens
  CDS (2123)..(2458)
ggagctccaaatgtcgttgggtggggaagcaaaatgtagagaaacatttaaagcacactgtaataataaatgcaattataaactatatggaggagggtgcagaggagggaatgtgtctggtgtgtgatgtgtgtgtgtgcagtgggggtatcacagagagtatgacatctgagttgagggtagcaggtgcctggagtctcaggtggctgctcacccatctgtgcaggtgtctctggggctgctggtctcacctgtggtctgcagtagacacaattggctgagcaggatatgtgatactgtgtggttggtgtggagttttgaagaaggggctgtgtttgggccacgtaggctctactcagagacctgaaaccacttcagaatggtgcatatgtcgaaagagctggctgggggccttgcccaaaccaactgaggtcttaaagtccggggaaaaaaagtctgggttccaactagaattctagaaatatttctagaacacacagagagggaataagtccctctatcacccttattaccaagccttgtggttccctgtgattttagataatgtctgatatttttctggctatttgcctagtaggatttaaaaaatattttcaaagtgaagctgagagagaatcttggaaacacacatacctgttgatcatgggccctgcagaattggcccttgggggctttatttggttatgtgtgcctgggtggtctttaccagcttagactctatcatgggcccccatgaagctccattctcaatactgaataattattacttcccttgttgagtttctttttctgtcatgccctgggggcttctgctcttctcaccagaaagaacatttgaatctggattcttgtacacctgggttagaccctgttcagaggtgtggccaatttatcccgatctcctggaaggctgttgtgatttccatctaagaaatgagggtcttgagaatcaaccagtcccaagattagcctgttatcctgttatctactgagaccccaaatttctcaccaatgttttgggagatcctggaaaagatcccttcagtttggggtgtcaccaagacttctacacaacccaggactaccattgacctcagagctgtaccccacatcttgaagtaaattgatcccaccaggtcccacgtttgttatctctgcctaaatgttagcttctccatcctcaccacatgatgacctgctgtgtccctctgagcactacccagtggctgaaaactctgcaaatgggccacacttttgcaaaatacttgtatctgacacttaggtcttgtttgaagattttcctttctggaaggttttacaagaagactgatagtctttcaagcccccacatcacaggcttagggacggcaccaactttctcccagggatctaactggctagttcaaattatcactcttttaccttcatataaaatgtctcccccaaacctttttcccttctttgtcattgttatctgctaagccactggtcatttccccatattcgtagtctttttttccatcctatctttctaatatttgttgtctttaacaaactgtgttctgtgtctgtgctcctccttccctctcagaccattggaatgcaagtccttcttccctttggaatgtactctggatcccttcccctgctttgacccccagactttgctccatctattattgcttctccatcctggatccttgacatttgtcaccccactggccttctcaagtgcaatcagtaaaaatgctgagaactcttggatcttaatcttcatgactgagttttttttagttgtatagttatcatctgcctttcttcactttgcatttcttcttgaatccattgcagattgacttccactcccactccttcactaaaagggctcttaccaagatcaaatctaatgggtacattttagttcctatgtgatttggcctttcgatgtcaatcatcactcccagccattgattttggtgacccacttccctgtgatgatcttctgatctagtttctcaggttccttcgctagtcctttttctttccctgcccctgacatattgacatttcctggagttggttttgtccttgattcattctcatgtcattctgcacacagtctctgcatgaactcaggcagacccttcatttaatgaccaccttagggctgatgattctcaaatctgtattccccgatcttgcatttgagctccagccccactcatcctctcggatgttctgcaggcccagcaaactcatcatgtccaaagtgaaactttttctctttcctgtctcctctcctctgatctgttctttcttggaacaccacccaagaacgtcacctcctccatcagattgtgagctcctggagggcaggagctgtgtccttctattcatcttcctatccccagaaccttgcacagatcctggaatgtggtaggtgctcagtaaatgtgtgttgaataaatgaatgaatgaatgaacaaatgaatgaatttgcttacttcaaggcaaaagaaccatgaaactgtattttgagtttctatgttatggcagtcagcaaatcctattaaatactttgtgtttccaagc

SEQ ID NO: 16925 - protein, 112 aa, Homo sapiens
MSFCTQSLHELRQTLHLMTTLGLMILKSVFPDLAFELQPHSSSRMFCRPSKLIMSKVKLFLFPVSSPLICSFLEHHPRTSPPPSDCELLEGRSCVLLFIFLSPEPCTDPGMW

SEQ ID NO: 16926 - DNA, 2513 bp, Homo sapiens
aggcaggcggatcacttgaggccaggagttcgagaccagcctggccaacatggtgatacccgtctctactaaaaacacaaaaattagccaggcatggtggcacacgcctgtaatcccaggtacttggaaggctgaggcaggagaatcatctgaacccaggagacaggttgcagtgagccgagatcatgccactgcactccagcctgggcatgagactctgtctcaaataaatagataaataaatgattttaaaaaaataaaagctgaggagtgacttggttagatccgtagtttaaagaagtcattttggggccaggcacggtggctcacgcctataatcccagcactttgggaggctgaggcaggtggatcgcctgaggtcaggagtttgagaccagcctggccaacatggtgaagctccgtctctactaaaaatacaaaaaattacccagccgtggtggcttacacctgtaatcccagctactcaggagggtgaggcaggagatttgcttgaacctgggaggtggaggttgcagcgagccaagatcatgccactgcactgcagcccgggcgacagagagactcaaaaaaaaaaaaaaagtcgttttgggaaccagtcaccgcttctttttgatagcccctggttttgttaggggaagcaaggggttcagcaaaatgaatatacttcctggcttcctttgcagctaggggtggccgtgtcacagtctggccaaggaaatgaaattgggagttgctgtgtggaaactcaactctctggaacttcttccttcctcctgcctctgcacaaatgtgacggcagcagctgaagccaacatcttgcgaccatgagagaaaaacctggagaacggacgagtcctcaaccctgacttcagaccaacctacacccacctctggacgtggggctaagtgagagatggatacactgtttcatttaggccctgctcacttaggtttctgttattcacaccccaacgaaaccctccatggtccagggcaccgggcaaagtacagaagggcacgagttttacttcccgcttccctggagaccaccaaccctctcacccttccagcccagcctctgccacttcccagctgtcggtcctcctccaaacagacgtgcatgccaacacccggtgggtgtgaggcttgtaggcccaagtctagagaggctgagtctggcaaagcctgaaagcccctgtcctagcaagccaggccacaggtctagagtatccgagaccagtgaataaggggacggggggtgctactgaggctgtgagaagccccaggaccagcccagggtagttagaactgagtgaggttagccgggactaacctcactcagatccctcctccccagttcccctccatccactttggtttggaagcctccccagagctctcccaggctgtcatcagctctaaactctctgcctccacaaaaatgccctgggcaacctgtaactcacagccctgctgtcttcagagtataaactggagacagatgtacccagaattgaggacgggtgggaaatgaggagaaatgaaggctgaggaggggtcattctcacagtccctccctttcggtcacaggagggtgttgcccatgcttttgggtgggtcccaggcccatagctgcaaatattcatattggctactcttcagtgagcaaggggtatatgccaggcactggcattgtgcttgacatacatcatcatactgagtcctcacggaagatgtattattcccatttcacagaagatgaaactgaggcttgaggttaagtgatttgtccgtgaccacaaagagttttcgggactcaaacccagatctgtcactgggcaaggtggctcacacctataatcccagccctttgggagactgaggccagcagatctcttgtggccaggagttcaagcctggccaacaatggcaaaaccccgtctctaccaaaaatacaaaaattagctgggcgtggtggcacacacccgtaatcccagctactcaggtggctgaggcaggagaatcacttgaacccaggaggtggtggttgcagtgagcctagatcgtgccactgcattccagcctgagcgacagagtaagactctgtctccaaaaaaaacccagatctgtccgactctgacacccaacctttaatcactcactttctgtcaatgtcacctccgttttgaccagccaagctagacctccctggagcctgtggagaagccaaggtagaaaagggttggaaaagaatgataaaataggccaggtgcggtggctcaagcctgtactcccagcacttttggaggccgagacaggcagattgcttgagcccaggagttcaagaccggcctgggcaacataatgagaccctgtttcaacttaaaaaaaagaaatggtaatgaacaattgtcaattctgagcagctgggtatggtatgaccctgtgtactttttctgtattttaaaatgttctcaaaataaaacttgttt

SEQ ID NO: 16927 - DNA, 3253 bp, Homo sapiens
  CDS (1579)..(2352)
agaccagttgagggctgagaggtttcagacatgacgcccccgtgccccaagttcatccgtgtacagtgcccaagggcagagacatgttcctctagaaccatcgttcattcgtcagctctcggaaacaaagcactggtactgtgctgagcactgtggcaccggctctgctgggctcctggatgctccaaggccctgctccctggctgactgcccattttctgtcctcctcccggcttcaggtgcgagacaagaagcttctcaatgacctgaatggagccgtggaggatgcaaagacggcccggctgttcaacatcaccagttctgccctggcagcctcctgcatcatcctcgtcttcatcttcctgcggtaccccctcaccgactactaaggcccgccaggcacggctgctggcggagacaagcactgagacatgtttattctcatggtccctgaaacgcaggatcccatgaggttggggcagggcagggcttcttgtcctggggcccccttgagctgtgaactgggcagcaaggccatcagaagctgagtacagcaagggggcagtgagcttggccctcagtccaccccctccgcctcctggcctccgccctgcctgtgtctggggcctgggggcttctcccctcgctgctgcaccctggcttccagcgtctgcgtccctgccctcacgtgccccttcccaggctcctggggccccttggacctgacacctagcaggaagggcttatgcaaaattgtcccaggttgggaggactcactctgtgctccccgaccctgcctcctccacgatgtgaccccgctcagagcccttgtgtctgtgaactttcaatgaaatacccatgcagctccagcccagccttctactttgtgtccctggcagggcctggagaagtctggaggctttgcaagcctccctcaggaactgcctggcggtcagggccccgggtgctgtgtcccaacagactgcaggggacggtctgctccatcacagctgtgccagacagtgaatgggaagggggggcatttggtggaggtaccccaaactcgagtcacttagagggtcaggcagcctcctggggggacggaagggggtggggcacagcctcagctgcctgcattggccaaatcagagcaaaggaaaccacaaattcactcggaaggaagcagcaggcagagacgatagacgcctggctaacccctgtccctcctggagggctctgggacctggacaggcccctttacctctctcgtgcccatctccttagctgtaaaataggaaaatggcctttcacttctataatcactgtgaaaatgaacggaagatgcctttcaaaggctgaggccagcgccctgacggcccatggcatgtgcagtccacaatgtgggaggcaggatgcagggatgggctctgtccccttggaactcaggcacagtcatgggggtgccggtcagccctgaagacaagctgatgagggtgcactaggaaaagtgcagggcatcggcgaggcacacgaaggaggtggggaggtgaagatggagaagaagccgaggcagtggccatgggtgtggagcttcgcgctgtgggtgcccagctggtctgggaaaccgcaggaaatcccgcagctcaggtgcgcagtgggaaggacttgctattccgtgggaaggcaggcaaaccttcccagggaaggggcatggccgtgcgcctcatgttttgggaagctcgtgccctctggggtagcgaggccagcttggaggggagtccagtggacagaggtggatgcaagtggagggagctgagcctgggctggggctggcagcagagggctggacagcagggcgcctgcgtggcagctgtgcagtcagtggggttgactggtttggaaggtaaggtgggggagaagcccggaggattcctgtcccttgacttggacagcccagtggagagggctgtgtaccaagggcaggaaaccagggagaagaagatgttgactttaagataccaagcagagaagggaagagccttctgggctggagacgtggggtgcctcagaagggaggaccttgagctagcagcagatgggacaaacgcaggggacagggcacagccgtggcaggagtgcagcgagcaagattctggtcacagtcctgacccagaaacctgcagaggaagggagggtggccagcacctgcccgtgggcctggggtgcagcccaggcagaggtggatggagggggtgctcagggaagaggggaggggagtgtgtgacctcaaaatgggagggcttgggggtcagagtcgagagaggggacagggtggggaccatgtgggactcttgagcactgacccttgaacccaggcagtggtgggatgggagggcaggaggcggcgggctgcgaggctgatgcggggctgcacggagctgtcattgagcctcttggaggatggtgggagaagtgccaggggcggctgaaagccttgctgagactgtgggcagcctggttgtgggcacttcggatgcttgcaccattagacccagaggcttcctggacaagcctgggctggaagaggatggcagaggctgctgggccttggaagagagagggtcctggcttctagttcctggggcagctaaggccaaccccagtgtccaggtgtcttccatgttatgcctgggagggaagaaagtagaggggcaaatgctttctttgcctattttccttaaacatttggtggcagtgctggtggctgcctgggacaggggccaggaggaaacacccctgcattagggaagccctcagccagcttttccctgggatgttcctgcgcctggctgaagctttctgagttcatgttggggaaatggaacggtcaccttccagccagtaaaggcacccctagctcttgggatgtttgtatccaactccgggcaatgtggggctacaaaggcccctggcttccataccctggggaccgggggagggctggtgctcccgcggtgggtgtccgcggtgaggtcaggcccccacagcaggtgcattctcgccctcagcaggcaggcaagcaggcatcagctccggcgctggtctctggcttcgaagtctgtgtctttgcctgtctgtactcctgcctgacctgctggcgctccctgtccactgcactcctcccacctcatttttatgtgattttgcacagtgcctggcagacatttgacattcaataaacattgtacgaacg

SEQ ID NO: 16928 - protein, 258 aa, Homo sapiens [sequence omitted]

SEQ ID NO: 16929 - DNA, 2143 bp, Homo sapiens
taggcagcagtgtgcctgggagacaagcagagatctcacggattcctttatttttcctgccatagcagcaaattttccttggagcactatttgaaaattaacattactgaaaaaattaagcccacttaaagggactctagtttttatctaaattataaaaggtgagaagacagttctgaaaaaaatgtatcaccttgaaactagaatgctttagttaatggggtaagctagaagtaagctgcctttgataactcatgtaagagcagcatatgaatggatgataactgtctttcttccatttaattcagctacttcctattcaatctcaaatctcagttggaaagcaatttccctcacttgacccatttttcttctgcattatatctttcttctggttcttcaacacaaaaagtttgaaaagacttgtaagcagattcagacacctggtttgggctaagcgtatttcattatttggctttccagttggaaggataacagttttacttctttacattttgttttgtttcttggttctttttgagacaggttctcgctctgttgcccaggctggagtgcagtggtacagtcacagctcatcgcagcctcagcctctcaggctcgggcggtcctcccgcttcggcctccagagtagctgggaccacaggcatgcactatcatgcctggctaatttttaaaattgtttttgtagagacagggtcttcctatgttgctgggattgcaagtgtgagcaacctcacctggctgctgctttactttgatatcacaactttcaggagagatatatgttaaatgactgagactggtatagagtcatatgggtatagaccaagcttgcccaacctgcagcccgggatagctttgaatgcggcccaaaacaaattaataaactttcttaaaatactatgagatttgtgtgtgtgtgtgtgtatgtgtgtgtttaagctcatcagttattaatgttagtgtattttatgtgtggcccaagacaattcttcttcttccaaggtggcccagggaagtcaaaagattggacacccctggtatagataaaagcaggtaattggcctagcctgggcgacacagcaagacccttgtcttttaaaacatgaaaaaattagctgagcatggtggcacatacctgtagtcctagctactcaggaggctgaggtgggaggatcacttgagctgtggagttcaaggttacagtgagctacgatcctgccactacactttggcatgggtgatagaccttgtctcagaaaaaaaaagaaagaaaagaaaaaagtaggtggggggtataaaattcttgttttagtaacacgggcaatgtaaagatgttataattttagtaaagatatatgaaataagcctcacatatccatattgtaaaatgtctatctgagacccaagtctctggaatttgttatctaaattaatctattagtggtatcattaacacatgcattagttacaggtgtcttgtaataacatttatttcacaccttgggtgataaagtgcttgaattggtttctgtctttgccagatcaaattctaaatttcctaaaatagctaacatgaaaccagtctcctttatgaacccttctctgacttctctcatgataaactttctcttctctattcattcctttggtcatctcattcagtcctgtgacattaaataccacatacgcactgaagacaccaacctagactgctccccagactcaatatttccatatccagttgcctgttccacatcttgatggctttttaatgggcatttccactgaacagatccagaactgcacccctgttcttgccccaaaataacctcaggaggttattttgtcttcactgatgaattctgtcaaacatagaactaatatcgagccttcacaaacatttccagagattaaaatctgctctgcttgcattccttcccactcactgaaaagcactgccatccttccagttgctccactcaaaaactttggagtccccattgacttctctctttcactccatgtatgtccatcagaaattaagtaagagatttctgaataacccataggttaaagaagagctcacaagggaaaattagaagatatttttaagtgagtt

SEQ ID NO: 16930 - DNA, 2869 bp, Homo sapiens
tattgtttaatgtagtagactacatgggaaaataactctactttgaactttttaatttaatataaacatccccttgttgctggacaacaagttttgtttacactgccactaacagaatatcataatatgaaacatgatattcatttgaatatttgaggggtacttcattataagggagtgggattccttttctagctttcttaggcagagtctctcccatctacaacaataaggccatgctcaagtctccagaacaatgatcatactgtattactatttttcactatgtttccagacagactggtaaattcctttttgtttgtttctttttgttaattctaacgttaattgaaaacagtggtttttgttgttgttgtttttgtttttgttttgagacagagtctctctctgtcacccaggctggagtgcagtgacgcgatctcggctcactgcaagctccgcctcccaggttcacgccgttttcctgcctcagcctcccaagtagctgggactacaggcacccgccaccacgcccggctaattttttgtgtctttagtagagatggtgtttcaccgtgttagctaggatggtctcgatctcctgacctggtgatccgtctgcctcggcctcccaaagtgctgggattacaggcatgagccaccatgcctggctgaaaacagtattttaagagcaatgttctgagctctttttgagctttagctacatggttcttgcattaacctatgatgtaggcacccttatagaatatacagctggtgctaaataagtatctgttgaatgaatgggtaaacaaattcaatgttacagatgaggagaaaaaaatctggttttgttaccttcattttctctttttctagcacatgccttgtccataggatagtcaggatgacagtgggaagtgtcagaccagcctaaggttcaagttcatctctctgactgaaaaagagctgccggtgatagagctctgctttgagcttggaataatgctggtgctttacatgtgtgttgctaagccccactaaaaccctgagacatggggtattattgtccatatcatacaggtaaggtaagtgactagtttagacttgtacagtaagtaggaacagagaagcatttggaacccaggtttattggcagttgagtcttgtgctctttctagatcccacagcttcccatttgtcttgataagagaagatgtctgcctctccgaggtagtgttgtactggttcccttccctttctcctcaatgactattttgttggttaaagataaacttggaacattctccacagggaagtgatggaagtgtccacgctgacaaaatgctatcatgaaatgccttttttctgccctgtaatgaagagtgtttccgaggcaaattccaagtcgttgagttactcttccacaagccaaccattaaatctaagaaaggggaggtggggaaggcatcaaataaattttgaatacaggagagcttggtattgagtaccttcagaagggcagtatgttgacttcttttctctatatagaacctgaatttgcattgctcctgcttctatataaagctttatcttgggcttcataaagagtagctattttgggctagacacaatggctcacagctgtaatcccagcactttgggagatcaaggcaggaggacaccttgagtccaggagttccagactaccctgggcaacatagtgagactccatctctacaaaaaaatctaaaatcagccaagtgtgttgtcactttcctgtagtcccagctactccagtggctgaggggaaaggatcacttaagccgggaggttgaggctgcagtgagccaagattgtgccactacactccagcctggatgacagaacaagatcctgtttcagaaaaaaaaaaaaagaaaaaaaaaaagctattttgactaaactagtaacatttctcagggtccaaaccttatggaacaaagttatggaacaaattttctagaaagatctaatatgcctcctctgacccttacactaaagacaacaacaaaaaggccaggtttggtggctcacgcctgtaatcccagcactttgggaggccgatgcaggcagatcacttgaggtcgggagttcaagaccagcctgaccaacatggtgaaaccctgtctctactaaaaatacaaaaattagccagatgtggtggtgcacacctttaatcccagctactcgggaggctgaggcaggagaatcacatgaacctgggaggcgtaggttgcagtgagccaagatcgtgccactgcactccagcctgggcgagagagtgagactccatctcaagaaaaaaaaaaagaaagaaaaacaacaacaacaataacaacaaaaaaccctaaaacataaaacaacaaacaaacaaaaacacctcacatgttttcttgaaggagtgaaagtacgagttactgaaattcataaggaagcatgccctggctccatgtctgctccagtgctttcacccaggaagggcatggagtccagatggggcttcaacttgcatcccagctttgcagtcccatcaggaggggcaacaacactttgtgtccatcacaaagcttcatacaccccttcacttctggttcacatgagtgacaatacattttcttcacagttccggttctcagggcttcacattctcgtgacttcagagtttaaaggaaaataatcaatgggcaagtatggtggctcatgcttgtaatctctataacctttgggaggctgaagcaggaggattgctagagcccaggagttcaagaccagcctgggcaacatggcagtactgcatctctactaaaaaatgtataaaaatgtcttt

SEQ ID NO: 16931 - DNA, 2266 bp, Homo sapiens
tgctttagctattcagcaatattgagaaaaaacatgaacacatttatgactttgccttgaccattgacttttctaaaatgtgcttccttttcctttatttccctttttttatacaaagaaaatagcccaaatttctcctcttaggtcattccttaacctctcagagaaccagtttccccatgaattgggaataatgctctatttacagggctgtttggattaaataagatgctgtttataaagtgtctgtgccagggcaaagcatgtggtaggtgcttggtgacagcatgatccctgtcaccactctgtcaagtccagtgttgctgagatgtcacacctgacaccctctaaggctaccctgattgccaggagtggcccagggcccttctgcagtctccgggtgcctttagttataacctcttgtctgggtcagaccattagctttcatgtctgcttctagctacaactgtagcctcccttccttttgccttcaaatctgccacagctgcccggcaacaaaaaagattcctaagcatctcgaggtcctgtttaaatgggttagggtccaagcaagccctgagacatcaagtggttgggtcttttatacctttttcatctctacagccctgttctcttcctaaggccaggcccacaggggatactgaggaaccaccagccccttcaggcggcacagcagaccctgaagagaactgctctaacttaagtaccttctgacttcaccatttttccagcctctgggtgtggttctgatgaaccttaaacttgaaaggcacaggccagaggaaggacagtgttgacccacatgtcattggtgaggttatgatctctttgctattatcacctacttacccacctgaggctcctaggaaacaatgaatgaaaggtatagaaaaaaattaggaagtaaacagggcttttttcccctttatgaaaaaagtacacagaagtgttgaaacgattcaagtttaatttgttgatatatgtgtgtacttagacaaacactaaattctacaacatacataatgtcaacatgggaaaataccaagtttgtcattgcacataccaataaataaatacatttgctccagaataccaaagtttattcaaaaagtcaataaaagcacagttttgcaaatttgtctaaaacgccagataatcttgaacaaaaataaaatgtctgaccactccaaaataggaaaagacaatcttgtgcaaatagacatacacagtctaggcattgtggaaactggctgtgttcccagcaagagatactgcaccctcctgaccgagcagtcaggcttccctttcctagccatcctaagttgcgttctaggaaactctggatctcagcctcatctccagctttgcctggaccttgctagggggagggagggacaggagcacagaggaggagaggagagggatgtgatgtctttcttaggaaagaaaaaaaggcacagtgatgagctataaaggtagtgatgagagctataaaggtagtgatgaaagcaaggaataattttcattcaccccaaatcctacggcaagctttgacaatgtaacatctttatcttgtggttaggaaaatggacctagagagattatgtggtttgctcaaaatcacatagctactaagtgcagtagtgctttctataagaccaacttgcctttccacttggttggaaaatttaaaaaccaaacctgtcgtaatctatctgttctgcccctcccgcctgtatcatgagatgactgaaaattccaggtggccataaactcaaacaagagcctagcccttggcttattaccggtggctactacaaacctacagaccagagcccagggtagtatagagtcccaactctgggccctgactgcaggtcattcaggtcccagtcacagtgaaagcagactcattcagctatctggagaagtgtaatctgagggccacttggcatcctgagttaacacagggatgccgcagctggggtaaggaattagagaagggaaggccagtgttactgcagtaagagaaaaccaggaagtccatctaggagatgaaatttgtgcttgcataacagagccatggaaatggctatcccagcatctcccctcactgcagactccattgtaagcaaagcatggacctttttctttgaaaccaaccctgtcacttgttaaatttagaattacctctaaatgctaagtttatttaagaggtaaatgtcctgctattttcagaatggag

SEQ ID NO: 16932 - DNA, 1880 bp, Homo sapiens
agagtgtgacagaaatctaaaagatcaacttcatcgtgcaggaaggagcatagaaaaatagagaaaagaagaaaacagcaaaccattctgagtaccgtggaaacaaactaaaagtgggcttagaaggaaaacagaggaagaaggtctgagtagtcccagggacgccagaggccaagatgggaaagccacccaggcgagacaggggagatggaagccacagggaatcactatcacatacctctgctggacctgaatggtcctggcgccagctagagccatctggtcgaccttagacatgtcaaggcaggagccatctgatcgaccttagacttggcaagctggtggctaagtccagtgctcactgccgacatctgtctcaaaataaacaaaaagtccaacagtgaatatttaacaataacaaaaatataataccaaacaatattaaagaccaataaataagtgggagtgaacaaaggtaaaaggtaactaatatcacaattaaaatattctgctatctctcactctctctcttcccctttccatttgtcacacccaggctggaatgtgacaaaaaaatataaaaggtcaatttcatcatgcaggaatgagtgtagaaaaagggagaaaagaacaaagaagaaaaacaacagcaagtctctctaaaacttcagttagtttcactgtagaaaaaaaaattgaaagtggggttaggaaaaaaaggaaggaggaggataagttcaggtagcctgagggactagggaagccaagatgggaagaccacctgggtgacactgggaagatcgagaccacagtgaatcatgatcacatccctctgctgtacctgaatagtacttccaaaggcaggagccatctggtcatccttagtcatggcaaggcgagagccatctggttgaccttagataaggtgagagccatctggttgaccttagacttggcaagctggcagctaagtccaatcctctcagctgacatcttggagagagagacagacagacagacacaaacagcgagacaggagaaaatcttaattgtgttattaattacttttcacctttgttcactccaaacagaaaaaaatccaacagtgaatatttaacaataacaaagatataactacaaacaatattaaagacaaataaatgggagtgaacaaaggtaacaggtaattaatatcacaattaaattcttctaatctctttctatctctcactctcgatttctctctgtcaacttcatcaagcaggaaggagcacaggaaaatataaagagaaaacaagaaaaaaatagaaagtcactctaaggactgtggaaacaaactgaaagtaaggttaggaaaaacaaaggaaggatgtcgaaatagtctgagggaatcaggaggccgagatcatcagaaggccaccctgtagagacctggaagacgcccagggcacagtgaatcacgatccgatccctctgctggacctgaatggtactgctgctgatgagagccatcctctcgaccctagacttaccaagctggtggctaaatacaaccctcgtgggaagatctgtctcaaaagagaaaaatccaacagggaatatttaacagtaacaaagaactaaccataacaatattaaagacaaataaataagtgggagtgaacaaaggtgaaaggtcaattatatcacaattaagatcttctctctctttctccatttgtcacaaccaggctggattgttccaaaaaaaaaaaatctagaaggtcaaattcatcatgcaggaaggagggtaagaatatatatagagagaaaagaacagagaagaaatacaacagcaactcactgtaagtactgtagaaacaaactgaaagttgggttag

SEQ ID NO: 16933 - DNA, 2133 bp, Homo sapiens
tttaccattttttctttatgtcatccctcatagagacaatttttggagtagatttcatttaaaagaatacattgggctgggtgccgatagctcacgcctataagcactttgggatgctgaggcaggaggattgcctgggcccaggagtttgagaccaatctgggcaacatagggacaccctgtctctaccaaaaaaaaaaaaaaaaatttaaattagccaagcatggtggcacacacctgtcctagatactcaggaggctaaggtgggaggatcacttaagcccaggaggttgaggcagctgcgagccatgattgcactgctgcacaccagccttggggacagagcgagctctgtccaaaaaaaaaaaaaaaaaaaaaaaaaagaggctatgaggctacatacttccaacagtgcaaagcaaggggctttgagatgtttcttgacatggtcccagtaaagtgttggacctaaaattcaaaccaaattagatttctttataactggtgagaagtcttaataaaatagttttccttaataaaatttaactatttcagtatgtctgcttactgaagtttggaaatgaaaatttcccatttgttttctctggcacatgagtttatcagcctgctttgcaagtgctttaaggcaaataaatgttaatttgattgctttttgttgatttgatagcttgtatgcttgggccacctgttagtaattttcttttacttgtaacacttgcctgctgctgaatactaggcagtgagtcttattgagttgatgatccagggtgtttttatttgtgaaattcctctgttgtacatggttacagtttaagacaagaattgtattaatataaatgaatataaatggtactttctccattttaatcctggaaattaggcaaccttctgggttaaagcaagcgttctccgccactgactaacagtgagtgtataatggatctgtttccccacagatagccagctgtctgcattaattacaggactgcatgcatttctggtgaagagacttttatttctgtgtcaggcttgttctcattcctaagactaaagtggcactctctctcaatgcttgacacttagccaagaaccaaacatatccttcacccaattaagaacacatgtattaaacagtcagcacagatggagaggcatcctgcttcttgctctggctgagacccaacaccttcctgatttatttggaattaatgataaatacaaagcaaagagtaggctattggtgatctaaacaaaatggtgtgtaaataaatctcagctccgacctaggcactcacttgctgcccagaatgattcttcggtgctgtgtatgattatgtgcataaaaatctgttgagagctctgttgcctcacaaggcagatgattcaacgtaatgggtatttctgctgcctgagactgcataagctgaagcactggctgggaagcaatgtctttataaggcatctttccccagaggcatgagggtggacagcactgagggggtcatgagtcggcttagagaagtgaggagtttttgttactgtgtgttcttgattcaatttggagttcaggtataaatcatcatagctcttagttaaaatctgtctcaatgaatccgctatccatgagagaaaggttaacactgtctctgccacaaggaaaatatgaaatactgagatctaccctgcctatagcaaaactagatcaagagcctacctaaagctgtatacaggccagctagggccaaaactggtgcttaggataaatacagcattccaagcagagctataggaaaataggttttgtcattaaaaataaagttttggacaggcacagtggcttatgcctataatcctagcattttgggaggccgaggcagaaaggttgcttgagtccgggaattcgcgaccagccagggcaacaaagccagaccccgtctttacaaaaaaaatattaaaaattagccaggagtggtaatacttgtcagtagtcctagctacttgggaggccgaagcaggaggattgcttgagccccagagtccaagactgcattgagctatgattgcattgcactccagcctgggccacacagaacaaggacctgactataaatt

SEQ ID NO: 16934 - DNA, 1583 bp, Homo sapiens
  CDS (461)..(808)
ttttttagatttatcaactaatgagaatgatcgatttaatgaaatttgttatttctacatcagttattttttctccacactttttatatagatacttatcatcagcatttgtctacctatgaacttcatcaagtaaatttagcttcataaacatcataaaaagatcaatgaatactaccacatattcttttaactaaatgggatggtctaggatcttgtaacatattgcacaatgaagtttcctgttgaatgactgtctggctaaaagtacttcttgtccttaaaaatcatattgtacattcattccttcttaagtttcagaaaatttatctaggatatcatcatctgaagattcataacctgagatttcactactacctgcctctttacattcaccatctaataactgtgaaatatctttctttgtcagttttcttctctttgccattatgggtagaaaatgaaatattctgaattttcaaccgtgtttactgaaaccctcaaaaatacaaagataggatttccagccttcttttcaaaagatgagacaataccaccaaccaaaaaaagcctgggacctgatggattcacagccagattctaccagatgtacaaacaagagctggcaccattcctacagaaactattccaaaaaactgaagagaaaggactcctccacaacttattctatgaggccagcatcatcttgataccaaaacctggcagagacacaacagagaaagaaaacttcaggccagtatccttgatgaacattgatgtacaaatcctcaacagaatacttgcaaactgaatccaacagcacataaaaaaggtaatccaccatgatcaagtaggcttcatccctgggatgcaagattggttcaacatacacaaatcagtaattgtgattcatcacataaacagaactaaagaccaaaaactacatgattatctcaatagatgcagaaaagacttttaataaaattcaacatcccttaatgtaaaaaactcttaataaactaggtattgaaggaacatacctcaaaataataagagccatctatgacaaacccacagccaacattgaactgaatgggcaaaagctggaaacattacccttgaaaaccggcatgagacaaggatgtcctgtcttaccacttcaattcaacatagtactggaagtccttaccagagcagtcatgcaagagagagaaataaagggcacccatacaggaagagaggaagtcttctctgtttgcagatgacatgattgtatatctagaaaacccaatagtctcagccgggcacggtggctcacgcctgtaatcccagcactttgggaggccgaggtgggcggatcatgaagtcaggagatcaagaccatcctggctaacatggtgaaaccccatctctactaaaaatacaaaaaattagccgggcgtggtggtgggtgcctatagtcccagctacttgggaagctgaggcaggagaatggcatgaatccaggaggcggagcttgcagtgaactgagattgcgccactgcactcaagcctgggtgacagagcgagactccatctcaaag

SEQ ID NO: 16935 - protein, 116 aa, Homo sapiens [sequence omitted]

SEQ ID NO: 16936 - DNA, 1752 bp, Homo sapiens
  CDS (4)..(1518)
gacatgctcagcaacatgccaggcacagctgcaggctccagtgggcgcggcatctccatcagccccagtgctggtcagatgcagatgcagcaccgtaccaacctgatggccaccctcagctatgggcaccgtcccttgtccaagcagctgagtgctgacagtgcagaggctcacagcttgaacgtgaatcggttctcccctgctaactacgaccaggcgcatttacacccccatctgttttcggaccagtcccggggttcccccagcagctacagcccttcaacaggagtggggttctctccaacccaagccctgaaagtccctccacttgaccaattccccaccttccctcccagtgcacatcagcagccgccacactataccacgtcggcactacagcaggccctgctgtctcccacgccgccagactatacaagacaccagcaggtaccccacatccttcaaggactgctttctccccggcattcgctcaccggccactcggacatccggctgcccccaacagagtttgcacagctcattaaaaggcagcagcaacaacggcagcagcagcagcaacagcagcaacagcaagaataccaggaactgttcaggcacatgaaccaaggggatgcggggagtctggctcccagccttgggggacagagcatgacagagcgccaggctttatcttatcaaaatgctgactcttatcaccatcacaccagcccccagcatctgctacaaatcagggcacaagaatgtgtctcacaggcttcctcacccaccccgccccacgggtatgctcaccagccggcactgatgcattcagagagcatggaggaggactgctcgtgtgagggggccaaggatggcttccaagacagtaagagttcaagtacattgaccaaaggttgccatgacagccctctgctcttgagtaccggtggacctggggaccctgaatctttgctaggaactgtgagtcatgcccaagaattggggatacatccctatggtcatcagccaactgctgcattcagtaaaaataaggtgcccagcagagagcctgtcatagggaactgcatggatagaagttctccaggacaagcagtggagctgccggatcacaatgggctcgggtacccagcacgcccctccgtccatgagcaccacaggccccgggccctccagagacaccacacgatccagaacagcgacgatgcttatgtacagctggataacttgccaggaatgagtctcgtggctgggaaagcacttagctctgcccggatgtcggatgcagttctcagtcagtcttcgctcatgggcagccagcagtttcaggatggggaaaatgaggaatgtggggcaagcctgggaggtcatgagcacccagacctgagtgatggcagccagcatttaaactcctcttgctatccatctacgtgtattacagacattctgctcagctacaagcaccccgaagtctccttcagcatggagcaggcaggcgtgtaacaagaaacagagagttttgtgtacagcttgggaatgaaaaggttgattgtaaacccacagtatctagcagcgttgtgccaaattgcccttgtgtttctctccacccaaaatatcacagctgctttcctcacatttggttcatccgtgtgctgttcttttgggttctgagagggttttgccatgtttgcttgtatgaccaagtcaccaaggaaataaacaggaaggaaatcc

SEQ ID NO: 16937 - protein, 505 aa, Homo sapiens
MLSNMPGTAAGSSGRGISISPSAGQMQMQHRTNLMATLSYGHRPLSKQLSADSAEAHSLNVNRFSPANYDQAHLHPHLFSDQSRGSPSSYSPSTGVGFSPTQALKVPPLDQFPTFPPSAHQQPPHYTTSALQQALLSPTPPDYTRHQQVPHILQGLLSPRHSLTGHSDIRLPPTEFAQLIKRQQQQRQQQQQQQQQQEYQELFRHMNQGDAGSLAPSLGGQSMTERQALSYQNADSYHHHTSPQHLLQIRAQECVSQASSPTPPHGYAHQPALMHSESMEEDCSCEGAKDGFQDSKSSSTLTKGCHDSPLLLSTGGPGDPESLLGTVSHAQELGIHPYGHQPTAAFSKNKVPSREPVIGNCMDRSSPGQAVELPDHNGLGYPARPSVHEHHRPRALQRHHTIQNSDDAYVQLDNLPGMSLVAGKALSSARMSDAVLSQSSLMGSQQFQDGENEECGASLGGHEHPDLSDGSQHLNSSCYPSTCITDILLSYKHPEVSFSMEQAGV

SEQ ID NO: 16938 - DNA, 1762 bp, Homo sapiens
  CDS (1010)..(1495)
aaattttttatttcattttatttttgagaccgagtcctgctctgttgcccaggccggagtacagtagtgctatcttggctcactgcaacctccacctcctgggttcaagcgattctcttgcctcagtctcctgagtagctgggattacaggcacataccaccatgcccgcctcatttttttgtatttttagtagagacagggtttcaccatgttggccaggcttgtccggaactcctgacctcaggtgatccacctgcctcggcctcccaaagcgctgggattacagttagagtctccatgcccggctgattttaaattttaaaattaagccttgtatagcctgggcaacatggtgagacccttccacaaaaatgaataaataaataaaattaaccaggtgtggtgatgtgtgcctgtagttccagcgactggggaggctgaggtgggaggatcccttgagcccaggaggtcaaggctgcagtaagctgtgatcatgccactgtcctccagtctgggtgacaaagcaagaccctatctcttaaaaaaaaaaaaaaaaaaacccaggtgtggtggcccatggcctgttatcacagcactttgggaggccgagatgagagggttgcttgaggccaggaggttgaagctgcaatgaactgtgattgtgccagtgcactccagcctgggtgatagagcaagtactctgtctcaaaaaaaaaaaaattaaactggttatgaaagattgctgtattgtctttttctacgtgacaagcatttgttctccatcacgaataattcagtcaaaatcaattcatttctaaacaaaaagagttaagttttctgtttttttagactttaccatccagcacagctgacagtccattggcattactttaaagtaactttttgataactgatccctaaattgctttttgaatttgtttattctattcattattgttttgaaggaaacctttgtcaaaccaatccaagcgtggtagttagtaaactatgaatttaacggcacatttcaccagtaagaccctccttctcagtatggttgaaatccagtatcattattacttgagacagggtcttgctctgtcacccaggctggagtacagtgatgcgatcacagctcactgcagcctcaacctcctgggctcaaacgatcctcccaccttggcctccccacgttttgggattacaggtgtgagccactgcatctggccagtgaaatctattatttatcagatctatcttcatgaaaattttgtcttatttaaaataacattccaaccccttttctctcctttaattaacagagaagtacaacagttccatcctgctgttagaaactcatctgaggtgaaatttgctgttcaggcttttgctgcattgaacagtaataattttgtgagatttttcaaactggtccagtcagcttcttacctgaacgcttgtcttttacactgttacttcagtcaggtgagtaaatgagctgtgcttgcagagttggaagaaagcaggtggttcttgtgctgtttgggtgctttcttattccaagcttttcaaaggaggtctcaggctgatgctgtgtcacccttgcagcagccccacgaaggggttaccggtgttgccctgttttataggggttatcactgttggtcaccatccggaaaggctgtgcaatggaaaatactgttccatggttcaaataagaaaaatctctttaggaaaacataggttgaattcagcactatc

SEQ ID NO: 16939 - protein, 162 aa, Homo sapiens [sequence omitted]

SEQ ID NO: 16940 - DNA, 1669 bp, Homo sapiens
  CDS (2)..(871)
gatgaggatggaggccggggaggcagcgccgccggcgggggcgggcggccgcgccgcaggcggctggggcaagtgggtgcggctcaacgtggggggcacggtgttcctgaccacccggcagacgctgtgccgcgagcagaagtccttcctcagccgcctgtgccagggggaagagctgcagtcggaccgggatgagaccggggcctacctcattgaccgtgaccccacctacttcgggcccatcctgaacttcctccggcatggcaagctggtgctggacaaggacatggctgaggagggggtcctggaggaagccgagttctacaacatcggcccgctgatccgcatcatcaaagaccggatggaagagaaggactacacggtcacccaggtcccacccaagcatgtgtaccgcgtgctgcagtgccaggaggaggagctcacgcaaatggtctccaccatgtctgatggctggcgcttcgagcagctggtgaacatcggctcctcctacaactacggcagcgaggaccaggcagagttcctgtgtgtggtgtccaaggagctccacagcaccccaaacgggctgagctcagagtccagccgcaaaaccaagagcacggaggagcagctggaggagcagcagcagcaggaggaggaggtggaggaggtggaggtggaacaggtgcaggtggaggcagatgcacaggagaaaggttcccgtccgcaccctctcagacctgaggctgagcttgcagtgagggcttctcctcggcccctcgcccgcccccagagctgccatccctgctgttacaagccagaggcacccggatgtgaggccccagatcacctccagggacttggggttcccatctgaaatcctttatttttgtaccatggggtgggccccgggcctgagaaggaagaagcaccctctccccggcctcctctgtctgcacccgtggggctgtgacttactcctgcctccaggggcggggcggggcccccctgggacctcttaaggcccaaggtgggccccaggacctctgggcagagtggactgctcatggcagatgtgtggcaatgtctggctgtgtctctccggcacctgcgtcccctctcccgggctcccctgctgcatggtggatgtgctccttcctggcccggtcacattgcctccttgagccttagtccagggggtcactcctcccaccccacctacctcacagggttgttgtgagggtgcacagaggagcaaagtccctgaaggccctcaggcagtatataggggccgcccaccttcagctgccctgggatgggaaggacccagcccgacccctgggcataacactgtgtttgcaaatggagattcaggtattggggatgcaggttgtggggagctggcctggcagagtaggggtagttggcttggccttctctttggtgatcccacccccagccatttgcattgctggcccagcgcctggcctggggggcggggagaggcagcagaaggggctgggcaggggcggtggaggactcaggaactgcccggggagagtgggtatggcggctgagccaggggccctcctgtgtttgacttcccgggatgggtccttgcttctcagctgtgtccgaccccaccatgtaataaaacccaaaggaacagccc

SEQ ID NO: 16941 - protein, 290 aa, Homo sapiens
MRMEAGEAAPPAGAGGRAAGGWGKWVRLNVGGTVFLTTRQTLCREQKSFLSRLCQGEELQSDRDETGAYLIDRDPTYFGPILNFLRHGKLVLDKDMAEEGVLEEAEFYNIGPLIRIIKDRMEEKDYTVTQVPPKHVYRVLQCQEEELTQMVSTMSDGWRFEQLVNIGSSYNYGSEDQAEFLCVVSKELHSTPNGLSSESSRKTKSTEEQLEEQQQQEEEVEEVEVEQVQVEADAQEKGSRPHPLRPEAELAVRASPRPLARPQSCHPCCYKPEAPGCEAPDHLQGLGVPI

SEQ ID NO: 16942 - DNA, 2863 bp, Homo sapiens
  CDS (84)..(965)
gtccgtggccagagctgcagagagacaaggcggcggcggctgctgtgctgggtgcagtgaggaagaggccctcggtggtgcccatggctggccaggatcctgcgctgagcacgagtcacccgttctacgacgtggccagacatggcattctgcaggtggcaggggatgaccgctttggaagacgtgttgtcacgttcagctgctgccggatgccaccctcccacgagctggaccaccagcggctgctggagtatttgaagtacacactggaccaatacgttgagaacgattataccatcgtctatttccactacgggctgaacagccggaacaagccttccctgggctggctccagagcgcatacaaggagttcgataggaagtacaagaagaacttgaaggccctctacgtggtgcaccccaccagcttcatcaaggtcctgtggaacatcttgaagcccctcatcagtcacaagtttgggaagaaagtcatctatttcaactacctgagtgagctccacgaacaccttaaatacgaccagctggtcatccctcccgaagttttgcggtacgatgagaagctccagagcctgcacgagggccggacgccgcctcccaccaagacaccaccgccgcggcccccgctgcccacacagcagtttggcgtcagtctgcaatacctcaaagacaaaaatcaaggcgaactcatcccccctgtgctgaggttcacagtgacgtacctgagagagaaaggcctgcgcaccgagggcctgttccggagatccgccagcgtgcagaccgtccgcgagatccagaggctctacaaccaagggaagcccgtgaactttgacgactacggggacattcacatccctgccgtgatcctgaagaccttcctgcgagagctgccccagccgcttctgaccttccaggcctacgagcagattctcgggatcacctgtgcgtagctgccctggcgcaggggtggggggcttggtcctcagatgctgtcccccagctactggcccagggtcaggctctggggtggccgaggtgacgtgtacccaccctcctcctgttgccatctggcactgcagggcaagagagggggttgttggggctgcccccaccatgcacagccagtccacactgtccaaaggcagaggaggtggggtcggtcagggttgtccaggccggtctctcaggcacagctgggccaggaggcagggtgatggggggctctctagatttggggctcatcatcctggtcaaagtcctgcctgtaaccgctcccaggccccagaccctcagctctctcatctagaaagggctctcggcatttctccccagatcattgtaggatgccaagcatatatcacaggaactgagcagctatagtgtctgatcctacaggcgctttgtgatgggtcaaatgctcagtgtggctgagcacagatgactcgtaaaaaactccgtaacagcatctcaaaacactggtgaatgctaaggaaagtgatgcctcgaaagaaccataaaacccctcaggccttcatctaagtcatcgaacaccgtcttttcaaatgggactacctccagcgccctcctttcttcttggagcactaacagtcgaaggggggagctgattttggtgtgaattctgaagcagctcggttaagatatcgtaaagacaaatcttgaatcttaaaatcaatgtttctaccccactgtgtattcaagaatcacatttgcccaaagggcagcctggcctttgtcctggcccctggggggtgacttctgaaccttgcactttcccaaggggcaggagttacctttgtcactcatcaggggccctgatggtttatggtaactcatggttatggtgtgactcaagataggggtgtaggggtggccattccagaaagaccaattacatggttagagggtgcgggctttgagtgatgtgagaccagcctgacctctggggagggcatggggctggagactgatttcagtctcaaggcgtcctgtcaaggtcgctggaccccaaactcccctcaaaggcaaatttacacccatttactcagcagtgctcctaagcgcctgccaaatgcaacgccctttctgagatggggaaggtctctcctacaccctggaagaccatgaaagatgttgagggctgactgactttggctagtggatgggaagcctgggagagttcagagccaggctgagcctcatggagacaaatttgatcatgcgcataggggtacctatctggtggagacagaaggaggcactacattcagcagcatcctaccagccggggccagagcaggcaagatggacaatgctccatcacctgaatgcgccaggctgtgtcctagagagaagcttccagaagcctcccaacttcattagcccctgcagagggatgatgactccagcctctgtaggttcctgcttgagaaaactcaatgctgccaggcgaacttactgtttgttccagccaaaacctggtgacagggagataggccctggaacccctctttgagcagcagttcctttagaaagcttgcaattgtgggccaggcatggtggctcgcgcctgtaatcccagcactttgggaggctgagttgggtggatcacttgtcataggagttcaggaccagcctggtcaacatggcaaaaccctgtctctactaaaatacaaaaattagccaagcgtggtggtgcacgcctgtggtcccagctactcgggaggctgaggcgggagaatgacttgaacccaggaggcagaggttgtagtgagccgggatcgtgccattgcactgcagcctgggtgacagaacaagactccatctc

SEQ ID NO: 16943 - protein, 294 aa, Homo sapiens
MAGQDPALSTSHPFYDVARHGILQVAGDDRFGRRVVTFSCCRMPPSHELDHQRLLEYLKYTLDQYVENDYTIVYFHYGLNSRNKPSLGWLQSAYKEFDRKYKKNLKALYVVHPTSFIKVLWNILKPLISHKFGKKVIYFNYLSELHEHLKYDQLVIPPEVLRYDEKLQSLHEGRTPPPTKTPPPRPPLPTQQFGVSLQYLKDKNQGELIPPVLRFTVTYLREKGLRTEGLFRRSASVQTVREIQRLYNQGKPVNFDDYGDIHIPAVILKTFLRELPQPLLTFQAYEQILGITCA

SEQ ID NO: 16944 - DNA, 2527 bp, Homo sapiens
tgtttgcctttgaagatccttcaaacccaatgtctcaattcacctggactgttttaccccaagggttcagggacagcccccatctatttggccaggcattagcccaagacttgagccagttctcacacctggacactcttgtccttcagtacatggatgatttacttttagctgccctttcagaaaccttgtgccatcaagccacccaagcgctcttaaatttccttgccacctgtggctaccaggtttccaaaccaaacgctcagctctgctcacagcaggctaaatacttagggctaaaattatcctaaggcaccagggccctcagtgaggaatgtacccagcccacactggcttatcctcatcccaaaccctaaagcaactaagaggattccttagcataacaggcttctgccaaatatggattcccaggtatggtgaaatagccaggccattatatacactaattaaggaaactcagaaagcaatacccatttagtaaggtggaaacctgaagcggaagcagctttccaggccctaaagaaggccctaacccaagccccagtgttaagcttgccaacggggcaagacttcgtatatatcacagaaaaaacagggatagctctaggagtccttacacatgtctgagagacgagcttgcaacctgtggcatacctgagtaagaaaactgatgtagtggcaaagggttggcctcattgtttatgggtaatggcagcaatagcagtcttaatatctaaagcagttaaaatgatacagtgaagagatcttactgtgatctcatgatgtgaacggcatactcactgctaaaggagacttgtggctgtcagacaaccatttacttaaatatcaggctgtattacttgaagggccagtgctgcgactgtgcacttgtgcaactcttaacccagccacatttcttccagacaatgaagaaaagatagaacataactgtcaacaagtaattgctcaaacctatgccacttgaggggaccttttaggggttcccttgactgatcccaacctcaacttgtatactgatggaatttcctttgtagaaaaaggacttcaaaatgcggggtatgcctcagtgataatggaatacttgaaagtaatcccctcactccaggaactagtgctcagctggcagaactaatagccctcactcgggcactagaattaggagaaggaaaaagggtaaatatatatacagactctaagtatgcttacctagtcctccatgcccatgcagcaatatggagagaaaaggaattcctaacttccgagggaagacctatcaaacatcaggaagccattaggaaattattattggctgtacagaaacctaaagaggtagcagtcttacactgctggggtcatcagaaaggaaaggaaagggaaatagaagggaactaccaagcagatattgaagcaaaaagagctgcaaggcaggaccctccatcagaaatgcttatagaaggacccctaatatggggtaatcccctctgggaaaccaagcccctgtactcaaaagaagaaatagaatggggaacctcaggaggacatagtttcctcccctcaggatggctagccactgaagaaggaaaaatacttttgcctgcagctaaccaatggaaattatttaaaacccttcaccaaacctttcacttaggcattgataacacccatcagatggccaaatcattactggaccaggccttttcaaaactatcaagcagatagtcagggcctgtaaagtgtgccaaagaaataatcccctgcactgcaggccatgcatttcaatccctgtatctctaacctccttgttaagtttatctcttccagaatcgaagctgtaaaactacaaatcgttcttcaaatggagtccccgatgcagtccatgactaagacctaccgtggacccctggactggcctgctagcccatgctctgatgttaatgacatcaaaggcatccctcccgaggaaatctcaactgcacaacccctactatgccccaattcagcagaaagcagttagagcggtcatcggccaacctccccaacagcacttgggttttcctgttgagaggggggactgagagacaggactagctggatttcctaggccgactaagaatccctaaggctagctgggaaggtgaccacatccacctttaaacacagggcttgcaacttagctcacacccaaccaatcaggtagcaaagagagctcgttaaaatgataattaggcaaaaacaggaggtaaagaaatagccaatcatctatcgcctgagagcacagcaggcattcgagccggcaatggcaaccctctttgggtctcctccctttgtatgggagctctgttttcactctattaaaccttgcaactacaaaaaaaaaaaaaaaaaaaaaaaaaaagaattgcttaaacgcaggaggtggaggttgtagtgagccgagattgcacaactgcactccagcctgggtgacagagcaagagtctgtctc

SEQ ID NO: 16945 - DNA, 1862 bp, Homo sapiens
agcccggtaagccctcctcctcttcccctgcagcctcagggctggagccacagctgggagggctcccagatcctgaccatatcctcccagaggctgagccaggcctgggcactgtcccctcaaatgtgagaatactgggcagggggaggggagaaaggagggaatggagggctgagcctggaggcatgaaaggggcaacctaggcagcggtatgggggagtgctcagagcttggagtcctgtggaaggcagagaactgccccagcccctgcctctcatcccccaccctctgtgtccctggccgagaggttcctggaggacatttttccagcaaaagagggagggtggtgtctgggcctagatccttggatgggcttttctctgcctgcttgtggggtgcctagggcgagtgggcttttggagacaatttctggcctaacctgacttggacagcagcccccagaggcacagctctcccctcaggcatgggggcatgattccacctcgctagcccacatgtgttcttcacggagggctgctggcccgtctccctggggttaccctgagcagcagagctgtgtttgttgagactccatggggtggagggattgcgatgttgtcctctcagttcccggggctgatgtggaagctcaagggcttgccctggattcttcagggtagccctgccatccctagtgagtcagtgagttgggaggttgggggctggagaatcaggtagggaggacacagctagacctcaggccctgatgggaacgtactaggctccaagtgggacctgccaggagacaagaattgatgacagccacacctttggagtctcaagccctctgccacccatgcggtggcctagttcaaatgacaggaacacaaggtccagctggcccaatgggcaggtagagggctgcagccagggctggaactggccttgcactgcctctgggcccttctctacccacccagtagtattgttcaagcccaggagggaaaaaggccagctcagggttaatgttacctcagcaagtagctgagtggcactgagcctcctggtagccactgtaaagaaggacacagaatggtttgagggcattcgctaggaggaaggaagcagatggatactctatggagacagaatgtcctctgtgtttgctctacaggaacgggttgtcaaccttctgcagggccaggaattgtcatgaggctgtagtaggcagcagagcttggcggggtgaggcgagatcacaggtataggctcagggcctggattcaaatcccctgggctgccacttgttggatgtgtaaccataggcagagtaaggacctgccatagcaaattaccacaaactcagtggcttaaagcaacagaatagttctggaggctaaaagtctgaaatccaagtataggccaagccacactccctttgaggactccaggggaagatccttccttgtctcttcagcttctggtggctcctggcaatccttggccttccttggctgctgctgcatcactccagtctctgaaaccatctaccctatgtgtctgtgtggccttcacatggcattccttatttttgcagtggggtctcgctatgttgcccaggctggtcttgaactcctgggtccaagcagtcctcctgcttcagcctcccaagtagctgggattatgagtgagtgccaccatgcccggctcacatggcctccttgtaataacgctagtgcctgggtgcggtggctcacgcctgtagtcccagcacttttggaggctgcggtggacggaccatgaggtcaggaaattgaggccatcctgtccaacatggtgaaaccctgtctctactaaaatac

SEQ ID NO: 16946 - DNA, 2598 bp, Homo sapiens
  CDS (24)..(1064)
agaagcaaaagagcagagctaccatgtcctcttggagcagacagcgaccaaaaagcccagggggcattcaaccccatgtttctagaactctgttcctgctgctgctgttggcagcctcagcctggggggtcaccctgagccccaaagactgccaggtgttccgctcagaccatggcagctccatctcctgtcaaccacctgccgaaatccccggctacctgccagccgacaccgtgcacctggccgtggaattcttcaacctgacccacctgccagccaacctcctccagggcgcctctaagctccaagaattgcacctctccagcaatgggctggaaagcctctcgcccgaattcctgcggccagtgccgcagctgagggtgctggatctaacccgaaacgccctgaccgggctgccctcgggcctcttccaggcctcagccaccctggacaccctggtattgaaagaaaaccagctggaggtcctggaggtctcgtggctacacggcctgaaagctctggggcatctggacctgtctgggaaccgcctccggaaactgccccccgggctgctggccaacttcaccctcctgcgcacccttgaccttggggagaaccagttggagaccttgccacctgacctcctgaggggtccgctgcaattagaacggctacatctagaaggcaacaaattgcaagtactgggaaaagatctcctcttgccgcagccggacctgcgctacctcttcctgaacggcaacaagctggccagggtggcagccggtgccttccagggcctgcggcagctggacatgctggacctctccaataactcactggccagcgtgcccgaggggctctgggcatccctagggcagccaaactgggacatgcgggatggcttcgacatctccggcaacccctggatctgtgaccagaacctgagcgacctctatcgttggcttcaggcccaaaaagacaagatgttttcccagaatgacacgcgctgtgctgggcctgaagccgtgaagggccagacgctcctggcagtggccaagtcccagtgagaccaggggcttgggttgagggtggggggtctggtagaacactgcaacccgcttaacaaataatcctgcctttggccgggtgcgggggctcacgcctgtaatcccagcactttgggaggcccaggtgggcggatcacgaggtcaggagatcgagaccatcttggctaacatggtgaaaccctgtctctactaaaaatataaaaaattagccaggcgtggtggtgggcacctgtagtcccagcaactcgggaggctgaggcaggagaatggcgtgaacttgggaggcggagcttgcggtgagccaagatcgtgccactgcactctagcctgggcgacagagcaagactgtctcaaaaaaattaaaattaaaattaaaaacaaataatcctgccttttacaggtgaaactcggggctgtccatagcggctgggaccccgtttcatccatccatgcttcctagaacacacgatgggctttccttacccatgcccaaggtgtgccctccgtctggaatgccgttccctgtttcccagatctcttgaactctgggttctcccagccccttgtccttccttccagctgagccctggccacactggggctgcctttctctgactctgtcttccccaagtcagggggctctctgagtgcagggtctgatgctgagtcccacttagcttggggtcagaaccaaggggtttaataaataacccttgaaaactggatcggatgaattggctttcattgtgttcctagcatcttctcaaatcaacttcccaggactccagggtgaaggaggaaaagaggcatggcccaggccctggggtgtgggatatggtctccctaggggatgacagttgggatcaatggcctgtgacttctcctctcccttcccccatcctgggacctaactggaaataaaaccttgactgttgcccgggtgtcattttaccagtggatttctgccagggcttgtgtcctaggagaaggtttaagttaaaccagattgcccaggtctccaaacgatttgtcatgctgacctgagatcatcgaagggggcacctgcccccgggcaaggttgcaggggcaggatggggctgaagggatgagcagggtcccgggcccacctgctgatacagcattggccatgtgggggctgcaatcggatttggaagaccctggggcttgggggcatgtccagttttcccagctccctaaaaaatgaccatgcagcctggcgccgtggctcatgcctgtaatccaaacactttgggaggctgaggcaggcagatcaccggaggtcaggagttcgagaccagactggccaacatggcaaaaccctgtctctactaaaaatacaaaaattagccaggcacagtggcacgtgcctgtaataccagctacttgggagggtcaggcaggagaatcacttgaacctgggaggcggaggttgcagtgagccaagatcacgccactgcactccaggctgggcgacagagtgaaactgtgtctcaaaaataaaaataaaaat

SEQ ID NO: 16947 - protein, 347 aa, Homo sapiens [sequence omitted]

SEQ ID NO: 16948 - DNA, 2033 bp, Homo sapiens
tctgtttatatttcggtagccccatggggcgggtggccacagtttcagtgcagatgtaaatccggaagcctccagcacctgcagctcatagacagctctcgcccaccttctcccaggaccaagccagtcctgtccagtccagtgtctgagcagagtcagaatccacaccacccgccgcctgggctcagaaagttctgctttaagtcattatttctccactgtacgatggggaatgcggtgtgtgggggccatttacccaccaacacagcagctgtgaggcacacacggctattgaaaattcatggaaattgctgggtgtggtggctcatgcctgtaatcccagcactttgggaggccgaggcaggaggattgcttgagtgcaggagttccagaccagcctgggcaacatagcgaaaccacatctctacaaaaaaatcctccaaaattaaaaaaattagcccgagcatgttgttgcatgcctgtggttccagctactcaagtgatccttctgccttgggtttccgagtagctgcaattacaggtgcacaccaccacacctggctaatttttatattttttgtagagacggggctgggattacaggcgtgagccaccgtgcccggccgatttccccatttttataaggccaccagtcacatgggattaagggcccaccctgctccagtatgacctcatcttaactaatgccatctgccacaaccattttccaaataacatcctatgctgaggtcctgggggttaggatgtgatcatgtagattttgttgggactacaggcatgagctactgtggctggccaattgcagacagatggaactgtggccagccacttcaccagtgaagtcccaaacacccctctgcaggcatgataagctagggtagttcttatcttttcctgattcctgttctctgtgtgtttagtggggaccacagcaggcagggtggggtgttggtggaatttgggataagtggagtctgggcaggcctggagctctctgtctgccttctgggcccgtgttggctgaccctgttgccccctctgccctgctttggctgagctgaattatttcttggtccttcccttctgggggcttctcgcttaacctcctttgttgtccctgataaaggggccttgttagcccgcaccttccctccttcgtcacttgacttctgcctgctcattctttgtaccttagttttagcgtcacctcctccaggaagtcttctttgatttctcctcctccctaggtctcctctaggctcccacagctgcctgtgttccctgcatgacagctctgctttatactgggattgctccactgcactccagtctgggcgatagagtgagactccgtctcaaaaaacaaaacaaaaacaacaacaaaaaagaaattaaatgaaagttaaaaatttagtctctcagtgtattgatttgctagggcagccatgacagtctcacagatggagaggcttgaaaacagacatttatgctgccataattctggaagccagaagtctgagatgaaggtgtgagtagggctgggtcctcctgaggctgacggggatctgcccaggcctctcccagttcctgctggtggccggcgtccttgatgttccttggcttggagaagcgtcagccgcatctctgcctccatctccacaaggcgccctccctgggtctgtatccaaactcccccaactccttcaaccttttttattttaagagatgaggggccgggcgccgtggctcacgcctgtaatcccagcactttgggaggccgaggtgggcggatcacgaggtcaggagatagagaccatcctggctaacacggtgaagccccatctttactaaagatacaaagaattggccaggcgtggtggcgggtgcctgtagtcccagctactctggaggctgagtcaggagaatggcgtgagcccgggaggcagaacttgcagtgagcggagatcaggccactgcactccaccctgggcgacagagagagactccgtctc

SEQ ID NO: 16949 - DNA, 3609 bp, Homo sapiens
gggtgcattttgtaacagtcctgttcattatgactgttactccttcattgctatctaaagagcgtgtaggtaggtaaggtcatatggattgggcagaagtggcagtaggagtgggcagtaaggatagaaggaacgtatctcagtgagtgtgcaagttaagtacttggcataatgtaatagtgcctttcatatcctaaggtcaaactgtgggtatctttaaactgtctagaccacacgtgcatacaaatcctcccctggggatctcctgaaatgcacattctgatttgggagctcagggagggggtctgagagactgcatttctaaccagctctcagggtcacttggagtagcaagcacctccaaaactgctggaacctggaacaactgcagggagacctgatctgcccattagaccacatctccctgagggtctgggatgcatgtgtctttgtgcctcctgtaccaagagcagtgcctgctaggaagtggatgctcaaaatgatcttttcaactgaactgaagaggctgctgtcccagagtccgtttacgttagtggccttgggacggcaggggtgtggcgacccagtcatagcctgtacacttatttcggcccagcttggttatcgctttacagccgtctgcagataggatgtgtgaatttggcagcagaggcggggcttctggcaccggcaaggagtgatagctgagggcttggcagtgaggacaaggacagaacacccatggaagagagggaagaactcagtaactactgccatcagggataattagccgagcggcaagcagccctcctcatttcaagaggtctgtgttgtacacccacatgcaactctgtgcctcagtttcctcatttgaaaaatggagaaacttacagttcccctcttgtaggttatattaaggattgaagcttttagcgccttgccaggcttagcacgagagggcaataaacatgagttgcaattaggattggtgtgtaaagggttaagccccagccttcagggaggtttctccgagaagaaaaatcccattcctgaggttgcacataaatgtgttggtattttgccgctaaaggagtaggtgtaaattaacatgcaaagtgattcctccagaaggctgggggtggtgaaatgggcgaaggagaggttgctacttgttcgtcatcctcaggaaattcttaatggaagaggcagatgtcaggagctttctaattaatgggcagatgaggtgggagatgaacctgtcttgggggtgtgcctcaggggcaggcatggcgctgccagagctagcactggggtgaagttccagggacccttgcccgtaagaccttaaaccagaatgccacttagaggggacagcgcatgcttggctgtatgctgtagtgtttaagcctctttgcagctgacttatatttggttctttaaaagtcttagaagtggctggctaaaggtaacggggtgctgaagcatggctcccacacatctctgtcaccccaaaggtgctgggcacgagtattcagggaaaccttggctgtgtctgacctatgtttacttcagagctttatgcctagcacgggggtttgcacagggacattgaaagtaagaaagaagagagcaaagtagatgggtctctcggaaggctttgaaggggtcccaagcttctgtattttctgcaaacgcctgtgaaaactcccagaacattccttgatcaaaatggttttcttgtaccttctcacagggagagaagcgagggtgggggcagggtcgggatgtcatgggaatggaacgttcttaagctcagttgtatgtgatttttatttttctctgttgcctggtccattaattcataaactcccttagaaggctaaacagttcattagaaatatcctatttctgttaaatagcatagaaacatgtcatttacatttttctttaaaactcagaacttgagatcacttctgtaaaatgtgagccaaggctggctcttctccgggaggctctggcggtggtgggaatgtggggttcaggggatagagggcacttgcagtttaccctgtgactttgggtagcttttgaaattttgagccgtgtgtgtattgccttgttgaaaatcccatcatggcattgcttctttggggaaatctgatttcgtttgtatggtacctcttgcaggaatgtagagggtagcttttaatcaccttcttaacactgttcagtctctagaaactggcatattattcatttgcctcagcaggcgttaagattaacaacatattccatgggtgaaacttcgcagttgggcccaggaatagtctctctgctttatagcactcatcaccttgctggagagggaaaatcaatcaggtaaggagacatgtcttgattgtttagtgaagcagccacgtgaggaaattaagacttgtttccaggtgtgaaaaaggcctatgaaggaggaggctctgccagccattgaaagtgtgttctccgcatgtgtttgtgtattgtctgggcatgaagaggggtaacatggaatagatctcaaaacggggaggcagttatgaaggcactgagaaataaatgtagaaaagcagagaggaagcacggtgtaggaatcctggactcttaacagagcttgaagtaccttggagcctgagaacccagacatgtcccctcctgcctggcctcgggagtcctcctggggacttatcacacttgctgcatggcagttcctggatgcactggcccctcagcagtcacggcgtggagttagagagaccttcaccccacaggctcagccatggactcatgtgatcctgggcaagaggcaggttctccaggccacattttttgccttgggggtctgaagagcttgcactaagatgctaccctctgtgaggtttccagccctaaacaggaagtcagggacattccatgattatggatccgccaaagagctctgagcagtttggtgaccatgctgtgaaagtggatgttgagtgggaacaaccacgatcagatctagtaggaataatgggtctggtaggaggacgacgacagagacctctagtagagaagtgttactttgcctgtgttagcccagaaacatggagcagggcaccggttcgaccagaaggagcagaatggctcttgtaaaaataaaaagcacttggtaccagcatgcttgtggtccaccaggtttgtgccccatcagaggaatactccggaggaacttgggccgttcagaatagtgtatttccagtgcagctctggaaagagtgagcagtcgtggaccaaacatttcatggtctgatgaaaagctagtggatgctggccaggtgcagtggcactttggaaggctgaggcgggtggatcacctgaggtcaggagtttgagactagcctggccaatatggcaaaaccctgtctctaataaaaatataaaaaaattagccaggcatggtggtgtgtgcctgtagtcccagctactcgggaggctgaggcaagagaatcgcttgaactcaggaggcggaggttgcagtgaaccaagattgcaacactgcattccagtctgggcaacagagtgagactccatctc

SEQ ID NO: 16950 - DNA, 2950 bp, Homo sapiens
caatgttagtatgtatgtaaacatgatagtacagccatttttttcatatgtgagtaaaaataaaatagtatttttaaaaatatagtttgagcactgtataggtcctttttttgttcagactttttccaaaaatctaaacataattaatatactctttcagccacatgaataaataatgagtgtttcttgtaggtattggtttggagattgttttacggtagtatgaactgttaactggaaaagaaacctgagattgcagtcagccaagattgtgccactgcaccccagcctgggcaacagagactccgtctcaaaaacaaaaaagaaaagaaaccaagaaacctcaggcatgaacctaatttaatctccatgaaagaggtactacagttctagaatataccctttatgttcaggaatgcagtctatcattcagagttaatttctttctaggctctttgacaatcagtttttccctggatcagttcagtacatatgcattgagcacctgtgtgccagtcagccgagctatcacattgcacaattctaagaagcaccattcatgtctcatcatatttctatgctctgggagttgcctttcacatagaatatgtgtgattgttatccctagaattgtgcagtgaggcaattggctaggtgctgtgctgctttttctttctttcttttttttttaagagacggagtcttgctgtgttgcccagtctggagtgcagtggtggcatgatcttgcctcactgtaacctctgcctcctgggttcaagctgttctcatgccccattctcccttgtagctgggattacaggcttacaccatcgcacttggcaaatttgtgtatttttagtagagacaggaattcaccatgttggccaggctggtcttgaactcctgacttaaagtgatccacctgctttggcctcccaaaatgctaggattataggtgtgagccactgcaccgggccatgtgctactttttcttccttccatccttcctcccttcttcagtgtaaatatgagattaatttgtgataccttactttaaagaacttagagttcagtaaaggaagcaggtatagaaagtgctatgataaagctatacataggatggtatagaaccacagactaggggcacttaaaatgggcaagaaaatagcctttgtaaataaaatagaggcaagagatataatgctttacctgcaaagagctataaatacagccatgtaccatataatgatgtttcagttagtgaaggaccacatacgagggtggtcagaacagcaggctataccatatagcctaggtgtgtagtaggctataccatatagcctaggtgtgtagtagtaggctataccatatagcctaggtgtgtagtagtaggcgataccatatagcctaggtgtgtagtagtaggctataccatatagcctaggtgtatagtagtaggctataccatatagcctaggtgtgtagtaggctataccatatagcctaggtatgtagtagtaggctataccatatagcctaggtgtgtagtagtaggctataccatctggggttcctgtcagtacagtatgatgttcacataatgatgaaatcacctaacaaagcatgtctcgaaatgtatccacattgttacgtaacacatgactgtagttaattgttacaattgaaatactagatgtactcattgaaatccagaattcccattatctggattatttaatatcgttcaggaaatttttgccagtgcaatggtgcatgaaacaatgtcttttagaaatgaggtggccagatttctatttgcagataataattgtatatctaaaaatcctagaaaaagaaatgataacaaatggagctacttaacctttacatgttgaatgctgccactgttaaaatttctgagggggtataatagataaactatcccatagttcatctggaaaaataaggtggtgaaaattgctaagaaatttttgaaagggtaatgtaaacctagattaactgtttttgaaaggtagtacagaactgaatgcacaactagatatcaatggtatgtactcacccagaaaaaagacttcagtacatacatgtgagggcttaaaacattgttataaagacgggatcacaatgggaaaaggattattcaataagtagggcaggcattctctatgcctgctagggaagtgtgacttgttatactctttatgtacagcaattggcagtctgtgaaacttttaaattcatatacataaccttttgccctgcaattccacttctagaaatttatcctaccaaacaaagcacatagatgtgcaaaagtatgtatttacaagtatattctttgcaacttggtaatgtcaaagaattggaagcaacctaaatatctgccataggtaggataaccatatgctttggctttttgaacactaccagtttatacctgctgttcttggataattattaatagtgctttcattctcaatgtctcactttagataataaattacagaggattggtgaaactaatttgcccaatggaaaaaggaatgaagaagtgctttaggtactgagatgaaaagatctctaaggcataataatgtttattgagaaaagcatggtgtcaaactgtatggcatgctacaattgatgtataagaagaaaaaatgtgtatgtattcctatttgtttgtatatggtagactgtctctgaagacatatatggaagaacctgatcacattggtagtctccaaggagcagaactagatacctgggggataaggatcccaggagtgagccttttcattgtaaacttcattgtactttgagtttttaactgttcaaaaataataaaattagaaataaaatatttcaacaaacaataaaatgggatatttggggaagaaagttgtctcagggctctccaaagaagcag

SEQ ID NO: 16951 - DNA, 1798 bp, Homo sapiens
cttagctgcctctcagcagcagaaagatatctcaaactgatgtttcagtaaaatatgtgcgcattaaaaactgatttttttattgaaaatgacgacaacagcagagtttaaggatacaaatccttgccatgagccaccacagaaaggcatatactcaacctttatttatacgtacaaaaaacttctgccacagacttctatacataacctttatgatgtgtaatgtatatgaaatagtaattaaaccacccatctttgctgccttttatacttttctagtgttctccaaaaagcaatacaaattatacatttttgttcttgcatagtatatcattctatcattttgagatttaacattttaacactatcaccattaagtatgaccctgtgaaatttcatctaacaccaaagaagacaatagcataaactgtcttggttctgttgattttgtacatgtcttcaggttttatatgtgtgttattaagacattttgtactgtagatttactgactctcaattctggtattgactagagccaaactccctatagtacttgggggcatggttctattcagttctcaccccagttttcatggttttctgtttgttctgttctgccatctgatctagagtcgcctggcactgccagtgttccgcttagagttcagaactcttggcgacgatcccagtttttctcccagtcaggtaaactgcatactgggtagctgtatttcttttgtgcgaaaatccatgttggggcgatcaatgatgtgtggcacttgtcttcatttctgatttctggggaaaaaattatttcttatgcacagttagcaaagagctagttcttttatattactaccagttatgctaaaattgggggtaggaggagaggaatcacacaactttatgttgatttcaagaattcaaagaaataataatattcatcattttcttgagagtcccctgcctttaaaaaaaaaaaaaaaagattaaaagcatttaccagaaactgatcatagttctcttgttaactgtgtcactgtgtttgcttcctgggtgacatctggcctctgtttgtatggtacttctccatgccagacagtgaggggactgctcagtcaagccacaatgcaaggtgcactaagaatcagtactaataggaacagtttttgcttcctgtagtctagtacctggtgttaattgatgtgatcaatcatttgatagtagtttaaacttcttttggtgatgggtgcaacctgctacaggggttgtctgctttattatgattttctaatgttcttgacttaccaaacacacacacacacacacacacacacacacacacacacacacaaaattggtttaaagctgatgtaggaactatactccactgataggtcaaaaacaaagacaattagaaaatactcacattcatatcttttttttctttcttttttttctgtgcagtggattctccaagcagtgagaagtcacctgttatgacacctgtaagtcactcattttaaggaataagattatgagttagtgtgattttaatttataacatttgattggctcaaagagtattcaggccgggtgcaggcggtggctcacgcctgtaatcccaacactttgggagggtgaggcgggtggatcacgaggtcaggtgttcaagatcaggctgactaacatggtgaaacactgtctcttactaaaaatacaaaaattaggcaggtgtggtggcaccgagatcgtgtcactgcactccagtctgggtgacagagcgagacttcgtctc

SEQ ID NO: 16952 - DNA, 2633 bp, Homo sapiens
tataggttttgagtagaaactattaccctcacacctggaaagagtaagttagatctactcttacttcactttcttatcctcattgtcgtcattatcactgaagatgcataacgctgtttaaagtctgaaggatgatacagaactgacggtaaacctctctgaaccatgtttaactgcctaaggctagacacgcagtgatatcagaattaatattgttttctttcaaatgaaggattctgagctgtggaccagagtgaggatgtgtatttatgggcttctaggtggtaactgttcttgtgtctaaaccttaattaacataacactctttcacacgaataaaactttcattcattatggttttggcccataaaagttgaagttttttgtttttgtttttatttttttcaccaaatcagccctacagcgattcctccacccccattagcaaataccgtaatatatgtctctagtaatcatcctctcacaattctgcttttcctaattttgccgtgagtcaagtttcttgaccacaatgttatgctgaggaagatctaatgttttccatggagcagaaattgttagtcctcaactccaaggtctgccttgtcaagccctgttttccgtgtcttcataaaccttgtcaggcatttatttattcagcacatatctactgttctctgcacaagaattcataaggatctgatgaattatgtcccttctgagtggaatttattcccttctacatttctgcaaaacaggaaattggtagtaagtcaatttgaaggtactatttagctggcacttctgccctttcttttttaacagctgcctctatagacagaacgttgaaatgaaaagatagggaaaattggcagaaacactctgcatgtaattcctatttagacagttttaaacctattttacaaatgataaacctggaatatagtagggagagatttggtgatgaaagaatctagatttcttaactccttattaatacgtactttaagtattggactacaaacttgcatatgtcactggtaatcattgaacacatgttatcatgtaggcactatcaaattggagcctataattgatgaatgagggatatcactactcatctacagtaaagggtcctgaaatgcagaaatatggaactggtgtgactgtatctttggatatttcaagagaagccagaatacatgaattggattcgtgtgtgtgtgtgtgtgtgtgtgtgtgtgtgtgtgtgtgtgtgtgtattgggcatgtatttgacttttaaactttttttttttgagagagtttcattctgtcactcaagctggagtgccgtggtgcaatcttggctcactgtatcctccacatcttgagttcaagtgattctctcacctcagccactagagtagctggaatacaggcacacatcaccatgcccagttaatttttgcgttttttttttttttgtagagacagagttttaccatgttgaccaggctggtctcaaactcctgggctcaagcaatctgctcacctcagcatcccaaaatgctgggattacaggcatgaggcactgcacctggccaaaatattaacaactatttttaaaggcagtactagccaaagaaaacgtgacctgatagagattgtgacttcagaagtttaaggttttacctcctaaaccacatgcttcatttcatattgcattttaactgatgcccttttgttttattctgtagcctcttccccttactctttcttcctcagtgtcttcatctgtgaaataggaataagaacatttattttttgccttcaaacgaccaaggattgtggtgcatgtgaagattaatgaggtcatctggttaagctcttctccctgggtggaagaacaatggcttgtgaatactaagtggcatttgaatcatgtgtgctttcatggaaagagagctggtccatttagctccccgtctgcagggagttataaaagaagaaactagggaggaagaagctgaaaatatttcttcatgactatttcctctggtgaagcataaagtagcaatgagaattctgagatttgtttgcgtgatactttagtcatgcaccacataaagatgtttcggttaaggacaagttacatatgtgacggtggtctcataagattataatagaaattaaaaattcctattcctaagtgacatcatagttgccataacatcacagcacaatgtgttactcacatgtgcgtgatgatgctggtataaacaaatctattgtgctgccagtcatatgaaagtatagcacatacaattgtgtatggtacataatgctaatcatgataataaagattatgttattggttgacatacttactatcctatatttgttattttagaatgtaccacttctacttataaaaataagttaactataaaacaacctcaggcaggtccttcatgagatattccagatgaaggcattattacagagatgatagctccatgtatgttattgcccctaaagacttctcgtggagcaggatgtgaatgtggaggacagtgatactgaacctgaccctgtatatgcgtggattaatgtgtgtgtttgtgtctttttaacaaaacagcttaaaaagc

SEQ ID NO: 16953 - DNA, 3347 bp, Homo sapiens
  CDS (86)..(631)
gcagcctcagtcccgccgccgcccgctgcgtccgcccagcgccagctccgcgtcccgaccggcccgcggcagcctgcgccgcgccatggccacctccccgcagaagtcgccttctgtccccaagtctcccactcccaagtcgcccccgtcccgcaagaaagatgattccttcttggggaaactcggagggaccctggcccggaggaagaaagccaaggaggtgtccgagctgcaggaggagggaatgaacgccatcaacctgcccctcagcccaattccctttgagctggaccccgaggacacgatgctggaggagaatgaggtgcgaacaatggtggatccaaactcacgcagtgaccccaagcttcaagaactgatgaaggtattaattgactggattaatgatgtgttggttggagaaagaatcattgtgaaagacctagctgaagatttgtatgatggacaagtcctgcagaagcttttcggtaggagagttgagtgctgcaatggatgtgtgtttaattgcaggtggttggatcacctacttgtagctagaaggagttattctcagtttacagtggcttacctggaaatggattacaaatgtgtggagcatggaataacagctcagtgaaggctttagatgtcctcttggaatgtttcatatgaatgaattgtagagggagtctccatgactaggtgggcctgctccttctagcagccaagaatcatcagctagatgaaaagaccccactgtatattaataactagaaagcacgcctccgcctctccagaaaagcatgcctgtgtggcctctgtcggtatatttacatgcatgggcctgagtatgcatttttagacctctgtcaccttcagatgcatgtgtgtgtgttcctctgtcatctgtggacttgtgtgtgtgtgtattcctccctgggtcactttgcagctgttcatgtgaaaatgtaaggacaatggggagagaaaggagaattcaggggtaatgttagtgttgaaaggacaaatttcagcttgaatggagttaaggtgtcccccactgctcctaatctaactgtggcccaaaccgtcccctcagattctcgacttcaatccttagctgccctctgggcacctctacctgaatctgctttagactgaattcatccacttttctaaagctgtttcatcccctctgagttcatagaatcctctcccttcctcctctgcccccatgtatacagggatcagcaagacccatttctacctctcctgaatacatcctctgccattttgacttctctgaactattgaaaaaacttccaaactcacttctttgcttcccatctcacctcctccaacctattccctacacagctagcagaggaaacttttaaaatcacaagtccagtcttgcctgcacttatttataactcttagtgcctctctcctgctggacaaagtccaaaccccttggcacaacattcaaagcattccatcatccgatgacccccagctgtctccttggtctcacccacacatgtggctcatccgtgtagtaatacgtgtaaagtgcttaggatagtgcctgacacatagtagatgctcgataaatgtctgtcatcattggttttactattttttttacataccattgctgcatttttatatatgccacacatattaacatgcctgtacctttgatcatgctagtccttctgcctctaaggcctgccttcctcctttacccaccaggggaaaccattattgctcatccttctgatctctagaattaatcaaattaatcaaatgtgcctccctattatagcctttacagtactgtcacttttttttttttcttgagacagattctcgctgtcacccaggctggagtgctgtggcgtgatcttggcttattgcagtctcggcctccagggttcaagtgaccctcctgccttagcctcctgagtagctgggactacagggcatgtaccatcatgcccagctaatttttgtatttttttctggagacggggttttgccatgttgcccaggctggtctcaaactcctgggctcaagcaacccgcctcagcctcccaaagtactgtgattacagcagtgagccactgcgcctggccctatagtcacatttagaaaagatagtcatatacttttttttgtgttcctccccacacacacacaaatgtttctctctctgagggactatatatacacttgcacatatgtgcatatatgtataggtgtgtagatataaacgtgtacacacatatctgtatacatacatgtaagtatatatacatgccttattataagactttccatgtcatctgtagctgtttaggtaaatgtgtataggcttcccaagggcacgagccatgtcctatatatttatccaggcttctccagcaccatcaggttgtctagcatatgttgcctagcacttaatcaatgtatattgaggctgggcgcagtggcttatgcctgtaatcccagcattttgggaggccgaggcaggcagatcacctgaggtcaggagtttgggagcagcctggtcaacatggtgaaaccctgtctctactaagaatgcaaaaattagccgggcatggtggcgggtgcctgtaatcccagctactcgggacgctgaggcgggagaatcacttgaacctgggaggcagaggttgcagagagcggagatcacgccattgcactctagcatgggggacagagcaagactccctctcaaaaaaaaaaaaaaaaaaagtgtattgaatgaatgaatggctaatgtaatttctaggaagttaaactgatttggttctcagacatcagtattaatgagtgttaatatttaaaggcttgtaaactccaactgaatacagagaggaaatgaaaaagcttcggcacatgaagacatggctaagccgggagcctcaccacgcatctgtcccagtgactacagcttttaactcctccagcagacatctagtcaggatctgaaactgccaaaatgttctatgctaggctgtcaaagcaaggtagaacatggccacagagtaatggaacatggttgtggaggaatcttgcctccaggaatggttacaaaaccatccagcatcacatctatgcaaccccacgttaggcattgcgtacaagcagattagatcatttcacatttcacccttcatgctgaaaaggtgattcactatggaggtgatgcttcttttgtgaacttaagtttagaccctaatctcaaaggtctgaggcagggcatacacattcaaagcccataatgggtaggatactcaggtggagggaaccagtttgcggt

SEQ ID NO: 16954 - protein, 182 aa, Homo sapiens
MATSPQKSPSVPKSPTPKSPPSRKKDDSFLGKLGGTLARRKKAKEVSELQEEGMNAINLPLSPIPFELDPEDTMLEENEVRTMVDPNSRSDPKLQELMKVLIDWINDVLVGERIIVKDLAEDLYDGQVLQKLFGRRVECCNGCVFNCRWLDHLLVARRSYSQFTVAYLEMDYKCVEHGITAQ

SEQ ID NO: 16955 - DNA, 3355 bp, Homo sapiens
  CDS (2729)..(3046)
ttacaggcatgagccactgcgcccagccaacaccatttgttgaaagcactcttgcaaaaagcagttgactttactcatttgaggctatttctggattttctactttgttccactgatacttgtctatcccttcaccagtaccacactgtcttgattattgtagctatatataataagtcttgaaatttggtggtgatccctctcgctattctttttgtcagaattgttttagctattctaaattcctttgtcttttcatataaagtttagactaaccttccctggatctgcaaaacatcttgtagagattttgatagaaatggtgttatatctgtatatcaatttggtggcaattgacagctttactaattctttcaacacgtgaatacagagaatcttccatttatttaggtcttctttgatatcttttatcagtattttgttgttttcagcatacggttcctgtatgtgttttgttagatttacacgtatttctttttgttgttcttgtttttaggttttattttgcttcgtttttgtttttaacagagatgggggtcttgctttgttgcccaggctggtcttgaactcctggcctcaagtgatcctccggccttggtctcccaaaatgctgggattacaggagtgagccactgagctcggcctcttttttttttttttttttgagtgattgtaagtggtattgtattgtattccttttcttttcttttcctttcttttcttttcctttcctttcctttccttttttttttttttttttttgaggtggagtcttgctctgtcacctaggctggactgagcagtggctcagtcttggctcactgcaacctccacctcctgggttcatgtaattctcctgcctcagccacctgagtagcagggactacaggtgcttgccaccagcccagccaatttttgtatttttagtagagaggaggtttcaacagttgcccaggctagtcttgaactcctgggctcaagtgatccatcttcctcggcctcccaaagtgctgggactacaggcatgagccaccacgcccagcctggtgttgtattttaaatttcagtttacatgtgttcgttgttagtatacagaagtacaattgaatcttgtgtgttaattttgtatcccaggaccttgctaaactcttttatttggtctaggagtttatttgtagattctttgggattttctagtagaccatcgtgccatctataaataggaaccgttttatttcttctcttctgatctgtgtgactccccctcttttcttgcctactgtgctggctaggtcttccagtaccatctttaatagtgttgggagagtgaagttccttgcctttttctgcatcatgaatttgtatatttttacatttttctcaagacaaaaatccagtccttttatcccctgttgctcactatttactgtgactttttctattttaagtgggttttaaaggaggcttttcctgatgccagtttcccttgggaaatgaagggcctcttcctgtatcctcgccccttccctccccgttttcctggctttttaagggcatggactttgacgccccctagtggccgcgtggagccacgtctcctctcgcccctaggggagaagcgtggactggggacgtggggggacccggggacggctccatcctcctttccccatccctacccccaccccagtgtctcctgaggcacagggtccccacgggccgggctgaccccctgccccctggtgtctgcagacagcggtctcgggccccgggcccggccagatggtggcaccggtaaccgggtacagcctgggcgtgcggcgagctgagatcaagcccggggtgcgcgagatccacctgtgcaaggacgagcgcggcaagaccgggctgaggctgcggaaggtcgaccaggtagggcgcgggggctgggtgggaagaggagctcgagctgcacgcgctctcccgccaggcctcagagctcagagggcccgtccacagtaaggaaggtgcagagcgggcctcctaaccccagcggccaggctcttgcccccagtccctcctccccgagacccgggcggggctggtgctgggttgcgcagggccctccactggcctctccgtgggcttccgtcgctcggaggagcctcccttccccacctgcccttcgctgcccagggcatctagcttccaggcgacggtgtagacagccgacgccagggaagcccatgcctttgtgaatggtacagtggagtgtttcggagtgcagccccaggccagggttgaaatcctgactcacctgcttcctaactatgaggcctagagtgtttcctccccggtaaatggggtaaccttggtgcccgccatgcagagctgtgtccctggcaccctgtaggttcctggagtatcaggaggaaaacaacaggttggaagagggatctgtgcctagggtgggccagggacactgactctggggccctgcctcccccaggggctctttgtgcagttggtccaggccaacacccctgcatcccttgtggggctgcgctttggggaccagctcctgcagattgacgggcgtgactgtgctgggtggagctcgcacaaagcccatcaggtggtgaagaaggcatcaggcgataagattgtcgtggtggttcgggacaggtgagtagccaggcccgggcagcctctccgtctcaccccagccatgtccccaggacagctcactgtccctcctgccaggccattccagcggactgtcaccatgcacaaggacagcatgggccacgtcggcttcgtgatcaagaaggggaagattgtctctctggtcaaagggagttctgcggcccgcaacgggctcctcaccaaccactacgtgtgtgaggtagacgggcagaatgttatcgggctgaaggtaggctggtggccgcgccagggagggactgccgggtggtgggagggctcaggtctttgggcagcttgcttaccccacctgagcctcagcatcctcttcctaaggttgctgtgagggttcagtaagacggtgttcatagggctgggtgcggtgactcacgtctgtaatcccagtgctttgagaggccaaagcaggaggatcacttaagtccaggagcacgagaccagcctgggcaatgtgaaaccctctttccacaaaaaaactaaaaaattagccaagcgtggtggtgcacacctgtagtcctagctactcaggaggctgaggtgggaggactaattgagcctgggaggtcaaggatgcagtgagctatgatcgtgccactgcactccagcctgggcaacagagagagaccctgtctcc

SEQ ID NO: 16956 - protein, 106 aa, Homo sapiens
MSPGQLTVPPARPFQRTVTMHKDSMGHVGFVIKKGKIVSLVKGSSAARNGLLTNHYVCEVDGQNVIGLKVGWWPRQGGTAGWWEGSGLWAACLPHLSLSILFLRLL

SEQ ID NO: 16957 - DNA, 2026 bp, Homo sapiens
ctgagtgggtggacgtggtcgtggatgacctgctgcccatcaaggacgggaagctagtgttcgtgcactctgccgaaggcaacgagttctggagcgccctgcttgagaaggcctatgccaagtgagtagcggctgagggggcaactccagcttccagctccccctaggggtgggggctcatgactgtcttctcagagggtcctgcttgatgccagagtgctgacctggagctgcccacagggtaaatggcagctacgaggccctgtcagggggcagcacctcagagggctttgaggacttcacaggcggggttaccgagtggtacgagttgcgcaaggctcccagtgacctctaccagatcatcctcaaggcgctggggcggggctccctgctgggctgctccatagacatctccagcgttctagacatggaggccatcactttcaagaagttggtgaagggccatgcctactctgtgaccggggccaagcaggtactgccctgggtggggccttccctgaagggcggttcctgccccctggcctgtccttgcctctctggcacctgaccagggctgtggaaggtgctggctcctcctttcccctcctgcagcaccttatctctcttctggggacacccatctgagatgcctatcatgtcctgccctgactgactgtagttcatgtgtgcagctgcctgcctgggctgtgaattccaagaggacaggcttcatctgggtgctgagcagggcttggagaggatgagggtatgggaggcggagtgttaaagtgcgtgcatgggccaggtgcactggctcacacctgtaatcccaacactttgggaggctgaggtgggcagatcacctgaggtcaggctgtctcgaattcccgacctcaggtgatccactggcctcggcctcccaaagtgctgggattacaggcgtgagccaccgcgcctggccaaaacctgtgatttagagagctctggtgactgcgatgctggattagaaggaggagctaaggactagaggttgtagagtaattagtggaagatgatgagggcctgacctaggctggtacagtggtaataaaaaaaagaaatggatgtcactgcacgatagaatagacaggacttggtgaccagcggagtgtgtgggaaggttgagggtgaggagaccggaagagtctctgcagagtctctcgaggatgcacaggtggatggtggtgccttccgctgagataggacatctgggaggatgagcagagccgatttggggtggaaggcaatgattttaggcttgaagtaccgagtcgcgggtgcctggagtatatccagagggcagaaagcaagttacatcaaaggggtaacgaaggtgaatgcttcccgaggccgggtaggtgatgtcaacaggtcagactgaagcagacagatgatcattttacctgtgagtcaggtcaggctcctttctgaaacgcccggatggcttcccattgcacttacgtcaattccgcatttctttccatggcctgcaaggtctgatttgaattggccctgcttttttttcccacctcatttactacacatttttctctctgactgtgttccagccacagtgatcttagtgattttcaagcatatcaaatttgttcctgtgtcagagcccccttccccctggccaagccctcgccaccagatgttctcccactggttcctcatcaggtagctcgtagcttgcctggtatctcaaggaagccttcctgcctataccgccgcatctgaagaggttactgtgtccaccctgtcttgggtttttttccatagcacttgtcactacctgaaatacttatgtgctatctccctccttccattcattccatgaggccacaagtgtgttttgctcatcagtatctctcattgcctagcgtagtgttgggcatgttccacagcatggagagccagtgcttctgggcattgcagtaggtaccagtgagaaaaaaggggaaaatctgcatattgagtatttatt

SEQ ID NO: 16958 - DNA, 1859 bp, Homo sapiens
gagtaaacttttctctgcttctagaaaactgacttctcaatctctggaagttggaggttttgttgtggcaatttgcttgtgttgttttttaatgtggactgcgagaaacaggggcagttgaggtcatgttgaaatctgctgtggttggttctgatgtgctttctagtatgttctttctttagtgggaccaacagggttataataccttcctctgagttggaagataggcgcttctgacttattgccaagctcgggtaactgagctggactgcctctttttcttctctttccccccacatatgtgtgcatatctaaggtgaccacctatagaccgcatgattcctggtgactcaaggatgagggtgggagcaacagtaccagtggggggtggtaatgtggtcagctctgcaataagtgaaaaagcagacaagaaaatatgcagggaaagactgtgagtaggactggagtctcttttgattggtacaggttcttattgacaaaaagcatgtcatgatatatcctaggaaaaatacttgaatttagcatgaacttttccgtgagtggttcctcaaaaattttcaagagtagaagaacagcagtggactggcagatgcagatgttgtacaggaagaagaaccccctgctcaaaatactatccagtgagcctcaggatatatttttttttaaattttgcttccttgaaggagtaagatacttacaaaaagatgcatctagaaaacaaaaataaactctgaaatttaaaatgtgatatcagaagtgtacaacctaatagacaggttagaagataaaactgagaaagtctcaccaaaaaaacaaagtaatggtaagtcggggacaggagataaaagaattagaggacctgtccaggatgtccaatatttgaataatgggagttctaaaaagagtgaacaagggaaacaaaaggtaattattcgagaaaatatccctgcactgaagaatgggagtttctgcactgaaagggccagagatggtagctgcaaagagacacatcgagagctttaagaggtgaaagttttggcctctgtgcagaggaagtggtagggacaggtctcctcttggcttcctttaaacaagccctgaagaatattcaactcttcaaattattgcatgtataacgatttaaaaaacaaaaactttggtaaggttgaaaaataaaagacatcaatagatgttcatgaaagagaaaatccaaatgccaatgaatctgagaagatccagagattgtctcttaaactggacatgtgttgtgacaaattgagaaaaaaggaaaaaaatatctatctctctatctatatagtccactaggatgtgtggtgggtgagttcctgtaggacctgaccccgctgacacagctggtcaccttattgctgtgatgttgtctatgatttattctactcatgggtgagaaatgggatgtgatgcctgtgggttttgaaataacgtgtatattgtggagtggctaaatcaaaccagttaacatatgcgttacttcacatatttctttgtggttagaacacttaaaatttactcctttaggccgggcacggtggctcacgcctgtaatcccagcactttgggagtccgaggcgggtggatcacgaggtcaagagatcgagaccatcctggccaacatggtgaaaccctgtctctactaaaaatataaaaattagccaggtgtggtggcatgcacctgtagtcccagccactcaggaggctgaggcaggagaatcgcttgaacctgctgggaggtggaggttgcagttagccgggatcacgccactgcaccccagcctggcaacagagtgagactacgtctc

SEQ ID NO: 16959 - DNA, 3162 bp, Homo sapiens
  CDS (285)..(920)
gatttttttgtgaaactcagtgcttcctaagatgaaaatgtgttcatgctaagactggtttcttccttagcactttgtctggcttagtggagtttgatggctattacctggagagcgatccctgcctggtgtgtaataacccggaagtaccgttctgttatatcaagctgtcttccattaaagtggacacgcggtacaccaccacccagcaggttgtgaagctcattggcagtcacaccatcagcaaagtgacagtgaaaatcggggatctgaaacggaccaagatggtgcggaccatcaacctgtattataacaaccgaaccgtgcaggccatcgtggagttgaaaaacaagccagctcgctggcacaaagccaagaaggttcagctgacccctggacagacagaggtgaagattgacctgccgttgcccattgtggcctccaatctgatgattgagtttgcagacttctatgaaaactaccaggcctccacagagaccctgcagtgccctcgctgtagtgcctcggtccctgccaacccaggagtctgtggcaactgtggagagaatgtgtaccagtgtcacaaatgcagatccatcaactacgatgaaaaggatcccttcctctgcaatgcctgtggcttctgcaaatatgcccgcttcgacttcatgctctatgccaagccttgctgtgcagtggatcccattgagaatgaagaagaccggaagaaggctgtatccaacatcaatacacttttggacaaagctgatcgagtgtatcatcagctgatgggacaccggccacagctggagaacctgctctgcaaagtgaatgaggcagctccagaaaagccacaggtagtcccacgctgcaaagggcatttggataagggcttgggtcttgatcagaagactgcctcctaggtgagatcaccttaggtggggagcctgacagcttacctcttggggttgcaggatgactcaggaacagcagggggcatcagctccacttctgccagtgtgaatcgttacatcctgcagttggctcaggagtattgtggagactgcaagaactcttttgatgaactctccaaaatcatccaggtagagagcggggagcagcttttgggtgtgttttgtccaagtgttactggtgttgttttcacagcagtcctgctgctctctcatccagcagtccaggtcttggtgttgtccctgcccaatctagctgaaaaggcaggcagatggctgcaccaaacggcatctcccccaccgtgatttatggcgctggtcagaatgctgagttcatgctagataactgaacatactggtgatgggaaggtaacacagataagggttttttttagccattaacaacccatctcttagtagaggggttactggtcttaaaaaatttgatgccaagattctgttccctcttctgataacgccgtgtttgcaggctgtagggtaagggcataccaactgcaatcaaccagggtgggccttgtgtcagttgcaatgtcacagacctaatctccatgagatgggaggctggccatagacagaggtacctcatataaggagagcatccagtttaccttccccctcaaccccaaattgctggagtgccatctttgctacacgtgtattagcttctgacctttgtctttgttacatgggagttaagagcataagcctgccatctgagtctgagttctgactctgccacttatcttggtcaagccactttctccaagcttcagtttccttctctgtaaaatggagataaagcatctaaccagttgggttattgagaagattaagttatataatgcatgtaaagttttttctaaagcaaaactaattttctaattaacatcctcttcttattttaattgctaattcccattattgttgcctttttgttcttagaaagtctttgcttcgcgcaaagagttgttggaatatgacctacagcagagggaagcagccactaaatcatcccggacctccgtgcagcccacattcactgccagccagtaccgtgccttatccgtcctgggctgtggccacacatcctccaccaagtgctatggctgcgcctcggctgtcacagaacattgtatcacactacttcgggccctggccaccaacccagccttgaggcacatccttgtctcccagggccttatccgggagctctttgattataatcttcgccgaggggctgcggccatgcgggaggaggtccgccagctcatgtgcctcctaactcggtcagtacctacaccatggttatgggcctagtggttcctactgacactggcagccatgccaggagcgttagagagtgcacagaatagtgcttctgaccacccagcaagttaggtagcttataacaaaggaaagatggaaagagacacagggtgtaggtgagcgagcttggggagcattgaaacccaggtttccttgtaaatggcatgattggcttgtgcttttttggttccagtacagtgtcttgaggaaactctccctgaggccttgtgagggaagggaagggagacacttgaactcgagaaagactcacatgaaagaagcagagcagtggggcctggagattaagagcttggactctggattggaaaggctcagtttcagtatctgataccttgtactatacgccttggacagattccttaatttctctgagtctgtgttttcctcatctgaaaaatactgacagtaggctgggcacagtggctcttgcccgtaatcccagcactttggcacctgaggctggcagatcacttgaggtcaggagttcaagaccagcctggccaacatggtaaaacctcgtctccattaaaaatacaaaaatagggccaggtgctgtggctcatgcctgtaatcccagcactttggcaggccaaggcgggtggatcacctgaggtcgggagttcaagaccagcctgaccaacatggagaaaccccatctccactgaaaatacaaaattagacaggtgtagtggtgcatgcctgtaatctcagctacttgggaggctgagacaggagaatcgcttgaacctgggaggcggagattgtggtgagtcgaaatcgtgccattgcactccagcctgggcaacaagcgagactccgtctc

SEQ ID NO: 16960 - protein, 212 aa, Homo sapiens
MVRTINLYYNNRTVQAIVELKNKPARWHKAKKVQLTPGQTEVKIDLPLPIVASNLMIEFADFYENYQASTETLQCPRCSASVPANPGVCGNCGENVYQCHKCRSINYDEKDPFLCNACGFCKYARFDFMLYAKPCCAVDPIENEEDRKKAVSNINTLLDKADRVYHQLMGHRPQLENLLCKVNEAAPEKPQVVPRCKGHLDKGLGLDQKTAS

SEQ ID NO: 16961 - DNA, 2063 bp, Homo sapiens
aaaaagtagaaccaacaagccttgaggtctaactctgttcaacattaaagggaagagtgagtctaagaagacttcaggtttctagcttggccaaaccaattgagctttaagtgaaatgtgcgatatggtaacagagaaggaaaaagacataacgatagatttgagctgctggtgggaaattctggtttagtgcccagctggctgtacaggctggttggactttaggagggaggtttgagctggaaaataaagatggagagttgtctttcagttttagatcatcagtgaggtcataagggtagatggagtttacctgggaaaattaagtagctattcgatttggcttattattatgttaaaataatacttctctagtgaagtacttaatatgccagatactgtgccaagcattttatatacatcctctcttttactaagccctcatagggcaggtattttgattccaatcatactgattggaactcctaagaaggtatcttgcttaaggtcccacaacgaataggtggcagatccagggtaattcaggtctgtcagaacagtgattcttaattttttccctcctcagactccaggagtcacatgaagttatgcatcctgtctgaccgaggcacaggcacaccacatttttatattccgcttccaggatatcacaaacctgaagcccatcctccatggcccagagagaaaacccaggacaaaaccttggagaagactattttcatgaagacaaatggagaaggagcagtagagtaaaaagagaggtaagggaaggcattgagatggtttacagggttagatgttttgagtcaatcccattataattaccaatgctatctacctatttagttaacgttttattgccctgctgttttctccaggataattggaacagcatgtattggttgggtggaaaagatagaacttgagcagggagattgccaaagagtgaagatgtggctgagtgattgatgatggtctgaactgggtattcagggaagagaactagaagccaaccatgtagaatctatgcaggtgctcttaagacattggtttgactggaattatcttcttgttaggtcttaggaatctccttccaggtaactttttctatgattagacaattgatttgttcagggtcacagagcaaagtccacatttaattccacatggccaataaaagtgaggggctacaaggtgagatccaggggccagagttatcaaagtgatacagcacttttaggaataggacagggaatggaggaattggaattccagtattactttcaaaagcagaactggccagaggaattggaattccagtattattttcaaaagcagaactggccagaggtgcttgtgattcctgggtggaaaccatggcagtggacagaagcagcatggaggaaaagagcactggaattcaggctgaggaactgtgaagccaagggtgttgtataggttgtccatttcaaattagggttgcttggttctgggatgatttgcatggaagaggggagagtgacttggagatgtgtgattgaggacagtgagcacagtgagttgatggtgttgctgggttataagcagcttcaaagagaaggcattttgaatgaaggtggaaacataatggccaggagaacaagcaaaggactaggaagcagtgaacttcatcttggcctcaagttcctgaggtgcatatgaataaacagtctctaacccagagggtttcaagaaaagcagagtcctcaaaatccaaaggtagagtttccccacattgatattatactaattacacgtataacagtactttggaaaagcacaggtctctggtcacctctaaaaggcaaggttggtaaggaggtcagggtgtcacctgttggtagtcttaactaaatggtctcttcaagggatctaaggatggaaaggggatatataatggttggattaaaggctcatcattgattagcaaattgtcccttttgtttcttaaacccaatttgtacagggaaagttatgccactgtaagatatttttaaatgggg

SEQ ID NO: 16962 - DNA, 1804 bp, Homo sapiens
  CDS (1025)..(1438)
ctggacctgggaggcagaggttgcagtgagcccagacggcaccattgcactctagcctgggcaacaacacgaaactccgtcccaaaagaaaaaaaaaaaaaaaatcccaaggggctgcagctgccaaacccaataccctctatttaacccctactctgttttacaagagaaataaaagaagtatcagcagagctcaggtgctaacacctgttgagggctgacctacaaaactctgcctacaaaactctcttagacaggtgaatatgccactagaagttaggttgctggtagacctgggggtccctgcgggagggtgatggtttctttaccaccccacaggagatttcagtggcaaggcatgcctgcagtgggctttgggccatgcatcttccaagtccataggtcttcacctgggtggcagtgagaaaaagtagaaagtaatgagcctcctgtgtctctggaaggttctagggatagggtagagggaagaagagaacaaacaagcctggcttgtgctgaagtgtggtaggcactaccctgtttgcgtgaagagaaaacaaagcacctgttagtagggaggctttagggggaagccccgtcttgggggcatttctgggcagattgtgaattggaggaatctctttaactgaagtactctggctggaccctgcccttgtgtgaccatgtctcctattgcaccagcatttgaattccatggctcaagagggttctggtaccatttattcacagactgtatcctcgagagagctgctatatatgggagtgtaccagccaactccttttccagtgtctgtaagtcacctcattaaagtataattagctgtctcctctgggagatcctaccccatcagacaagggcagtgagcccaagcagtgccagaggccctcagaaagggattagggtagatgattgcaactgaaacacaatcttctttctttgccagggtattttgggggttttgccccaaaatataccctgggcatagcattactgcagtcttggatgtctaccccaaacttccacaccatccttcgacccacagctgcacctttatttatttattttgctctgttgcccaggctggagtgcaatggcgtgatctcggctcgctgcaacctctgcctcccgggttcgggtgatcctcctgccttagcctcccgggtagctgggattgcaggcacctgccaccacgcctggctggtttttgtgtttttggtggagacgatgtttcgccgtgttgaccaggctggtctcgaactcttgacctcaggtggtccgctcgcttcggcctcccaaggtgctgggattataggcgtgagccactgtgcccagcctcacagctgcatcttaaccttgcctttgcctctgcctctcaagctggtacctcctaatttacatcctaagagtggaaccatgtgacaaggactggagtgccattggctgtggactgttcaggcagggaagtacaagaccactcttgtattcaggggcaaccaaaggagagaattacgtacttgttgagtacaaactgcaccaagccctggagacccattaccaccgttaaccctcaatacagctctgctagtaagggattcgtctccccaaatgaaaaaaaaagtaatctcagaatgttggccgagcgtggtggctcacacctgtaatcccagttatgcaggaggctgaggcaggagaatcgcttgatctcaggaggcggaggttgcagtgagtcgacatcacgccactgcactccagcctgggggacagagtgagacttcgtctcgg

SEQ ID NO: 16963 - protein, 138 aa, Homo sapiens
MSTPNFHTILRPTAAPLFIYFALLPRLECNGVISARCNLCLPGSGDPPALASRVAGIAGTCHHAWLVFVFLVETMFRRVDQAGLELLTSGGPLASASQGAGIIGVSHCAQPHSCILTLPLPLPLKLVPPNLHPKSGTM

SEQ ID NO: 16964 - DNA, 2064 bp, Homo sapiens
  CDS (1135)..(1719)
tatttaaattttatgaattaatttgaatgttttttacactaactaacttttcccaataaagtccactatgaaaccacgacatccaagagcccaaagtcgtcttctctgccttcaagtcatagatttgcccgcagtatctgtggtgctctgggccctcccggtgtccgtctcttccaggatggggatgcccgggagggaaactgtctgtggctctaggctgcacggctcgtgccaacccatcagggagggccatgcccgttgtcctattgagtgccccaccctgcacccccaccttgggaattcacatgtccattccttgaggttcatgtcaacctcggaggcatccctgtcttcattatagctgacccctctcctgcgtccttctgtcagcatatcccttctgcatccttcccgtcacacatacataccaagctatgatgattgattgatagtggccttcgagatgaaaaccatccttaaccccatgatccttcccagctggcatccccaccctaagcaaggttccctaaagagaagcttgttgacattttctccccttcctcacttacagtcagctgtcaccttgctccctccacctcccctcgtcaaggtgactgccttccactgccagccacactggcaattgtcttgagacctcaccgtgcaagcggcctgggggcgtggcggggaggaggaggaggacaaggactcctgaacgctgctcactcggcttccaggacaccccgctcaggttctgcctgccttactgggggctccttctcctttcctggggctgagaggttgtgtctgtgcccactctcctgagctcagccagaatctcccatgtaaagacatccaaatgccgacttcttctccccagagcctggcgtttataactgactgccgcctcacgctccattcggatgtctaatgaatctctcagacttgacctgtccaaactgcttgccacctctactcgccaccgcccacccccacaccctccataccgttttccccacgtcactgcccctcccccccttcctcttgccaaatgcctaaaaataaaaattctgaggtggatctgtagcacaatgggcttctagtgacaaatcaaaattctgatctttaaaatgtatgcacaatttacctgttaccgcctggcctaagccatcctgctgttactgctgtgtagcaagttgcagccaaagcgacctcacacggctcctgaaggtcaagaatctgggagcagctcagctggatggctgtgactcggggtctcatgaagtggccaagatgccagctaaggctgccgtctctgaaggcttgacctggcgaggatttgcttccagactcactcgcgtggctattgacagaaggcctcagttccatgccacatggcccgttccacagagcagctcacagcttggtagtagctggcttccccagagcggtatctgcgagcagcgtccagatggaagccatggtgttcccttaaaacctgatatggagggtgattccccatcatgtctgtattctgtgggtcacacagaccaaggccggtccactgtggaaggcaaggacgaggttgccagtgcccggcggtgggtggccacagccagcctccctgccagtgtcccccacagacaagttgtccctgtaagacaggtcagctcaggtcattccgagctcagaccttccaacggcgtccatgtccctcagtaaaagccagagtcctaaaggcctcttgcctgctctggcctcctctcaccattctctgccatcctccatctgcccctggtgtccctgaagtcttgaacatgccgagcacatcctgcctcgtatgcttcctggcctggaatgcacttgccccgggacaccctgtgctggctttagtgtttccttcctgtctcctcaagtcaccttattatcaaaaggactccgacaggctaagtgtggtggctcatgcctgtagtcccagcactcgggaaggccgaggtgggaggatcgcttgagcccaggagttcaggacctgcctgggcaacatggcaaaactttgtctctctt

SEQ ID NO: 16965 - protein, 195 aa, Homo sapiens [sequence omitted]

SEQ ID NO: 16966 - DNA, 2154 bp, Homo sapiens
gacgcacttcgccgccggccgacgggcgccattgtgcggcgcgcgccgggtgagtgccgcgcgaaacctgcgtccgtcgggggctgcgctgggcgggtccagaaccgttagttgggggcgagcgcggcctctgcattttccgccgagctcgggtaccctgagccggccgtgcctgcagtcctcccgccgctctgtgggatggggtcggtgacccggaaccccgaggggagacagtgctttcagggcgccgcggtggagagaacagatcgcctccggaagcgtggggtctgggccagggaggcgatcccctccgatgcgcgggacagaggaggctcggtgtcctctcggggaggggaaaactggtcctatccagtcctgtgggagtcctatgactcactctgggcgttttccagtttgggtggacttgtcatttcccgctgagggagccgttcctgggcggaggctgcggtagctccccagcggacaccttaagcctctccctcccctcccaacttcggtttcctcaggactctgcccacttccaccagagacacattgagaaggaggaaactatggcctccaggcttccgacggcctggtcctgtgtgagtagaggcttccttcagcttttgagtccgctactgcacctgggaggatgcggatggtggtgagataccaccttccctgagatacccccatcctccagagcacctcggggagggggtagagattggttgggcatgagagatcctgcgtgatggtggaaccgcaggttgcttggttttccaagggtgtagttagaatagagaccagattgtaggggcttctgaaggccaggttaaggctcttgcttgtatcctttatattgggaagagtaattgacaggtcttttgtttgtttgttttttgttttttgagatggagtctccctctgtcgcccaggctggagtgcagtggcgcgatcttggctcactgcaacctccgcctcctgggttcaggtgattctcctgcctcagcctccccgagtagctgggactgcgggcgtgtgccaccatacccagctaattttttttatttttattttttgtgtgtgttttttgtggagacggggtttcaccatgttggccaggctggtctggaactcttgacctaaggtgatccgaccatctcggcctcccaaaggtctatgcagggatcaggcttatgtttagatttcagcagataaattggcatcaagcaagaggtgacagcagcagagttcaataacaagtagaaaagacaggtgaggatggatccctgacaggtgaaggagatagaaagaagcatcagggccctgggtaggggctgacggcttgggtgtgatggtgcagctcagagaattccctaggaggcatacgcaccactcccaaagtcagaattttcaaatgaataagaaatagggggccgggcgcggttttcatatgctacagagatctcatgtgttgctctccttattttaacctgaatagagtcaagcttgggtttgcttggggtttcagacaaagacaggaactcaggatgagactcccaaaatgcccttgggtcatcttgtagaccattctgtgctttcactggcctggtcagcctcccctgtctttcttttgtcgtggatgcggatggcctgtggctgaacaagaatctggatttttaggaaccagtgacctttgaagatgtaacactgggttttaccccggaagagtggggactgctggacctcaaacagaagtccctgtacagggaagtgatgctggagaactacaggaacctggtctcagtgggtaaggctggcctccaggtcaagaaggatctgtgctttgtagcacaaatgtagcacctctgaagtatgtgtctgcttgggctcagactgcaggggcaccagtaggaaaagggcagcttttcagtatgacttctgaatcattgcctagtccatccctccctgaataccagggagatgggtctgtcagggatgttttcagctgcagtagtggatgcttattgttcttgcaacaagagttccggccaggcatggtggctcactttaggagactgaagcaggaggattgcttgagcccaggagtttgagaccagcatgggcaacatagaccgtgtctctatt

SEQ ID NO: 16967 - DNA, 2162 bp, Homo sapiens
  CDS (695)..(1579)
agaagctgtcggactgtgagcgccttcgaactttggaggcttggctcgtgatggaggtttttttagcatggggaccagggaggactacggtgctcgggactgggctgcggcctcctcgcggccccgagtgccctgtgaaatcagctcaggccgcgtccctctagcctgcactttccctctgttcacgctgcttccctccagggcccggcctccaagtgaaggggggcggagggcggtcacctgccagaaggtctggggcgccaaggtgtgtcccgggactcttggctccgtccaggttccaggccccgccccccagcttatccctagccggggctccccaccgtgggaacggggaccagctggccggaagcgccaaactgcgtccctgtccgagccctggggatcagtcaagccgaggagttaattatgtaatgagggggcagggggtcgaggctaatgaagcctcccggggtggggagggaggggaggaggggaccgtacccaggtatccgaccccctctcggaccccttcgaggccccaggggtctccaccccagcccaactccagggccccaaagaggggaggggctgtgatcctggatctggaaggggctgagctgtgagctataaagggggcatctcgcagcaccgggggccctaagcagcgagacctgaggccagacggaactacaacatgtaccatccacgagaattgtacccgtccctgggggccggctaccgcctggggcccgcccaacctggggccgactccagcttcccacccgccctagcggagggctaccgctaccccgaactggacacccctaaactggattgcttcctctccgggatggaggctgctccccgcaccctggccgcgcacccacctctgccccttctgccccctgccatgggcactgagccggccccatcagctccagaggccctccattccctcccgggggtcagcctgagcctggagaaccgggagctatggaaggagttcagctctgtgggaacagaaatgatcatcaccaaagctgggaggcgcatgttccctgcctgccgagtgtcagtcactggcctggaccccgaggcccgctacttgtttcttctggatgtgattccggtggatggggctcgctaccgctggcagggccggcgctgggagcccagcggcaaggcagagccccgcctgcccgaccgtgtctacattcaccccgactctcctgccactggtgcacattggatgcggcagcctgtgtctttccatcgtgtcaagctcaccaacagcacgctggacccccacggccacctgatcctgcactccatgcacaagtaccaaccccgcatacacctagttcgggcagcccagctctgcagccagcactgggggggcatggcctccttccgcttccccgagaccacattcatctccgtgacagcctaccagaacccacagatcacacaactgaagattgcagccaatccctttgccaaaggcttccgggagaacggcagaaactgtaagaggtgggagttgttcattcatttgttcatgcattcaacaaatgtttattaatcactcactgtgtgccaggcaccgtgctggacatcagaaatgcagtggtaagtgaaaacattcattcactgactcagcaaatacttatatagtacctgctatgtgccagggacagttccaggcactggagataaaacaaacaaagcaaaccaaagccccggccctcatgcagctgatttctagtggggagagtagacaagcagacaagagaaataaataaaatgtcatctgttaggaagccattctaaagagaagagagaccaggtgtggtggctcacgcatgtaatcccagcactctgggaggctgaggcgggcagatcacctgaggccaggagttcgagaccagcctgccaacatggtgaaaccctgtctctgctaaaaatacaaaaattagccaggcatggtggcaaacgcctgtaatcccaactacttgggaggctgaggcaggagaatctcttgaacccaggaggtggaggttgcagtgagtcgagatcatgccattgcattccagcctaggcaacacgagcaaaacttcctctcaaaaaaaaaaaaaaaaagaaagaaaagaaaactctgtctc

SEQ ID NO: 16968 - protein, 295 aa, Homo sapiens
MYHPRELYPSLGAGYRLGPAQPGADSSFPPALAEGYRYPELDTPKLDCFLSGMEAAPRTLAAHPPLPLLPPAMGTEPAPSAPEALHSLPGVSLSLENRELWKEFSSVGTEMIITKAGRRMFPACRVSVTGLDPEARYLFLLDVIPVDGARYRWQGRRWEPSGKAEPRLPDRVYIHPDSPATGAHWMRQPVSFHRVKLTNSTLDPHGHLILHSMHKYQPRIHLVRAAQLCSQHWGGMASFRFPETTFISVTAYQNPQITQLKIAANPFAKGFRENGRNCKRWELFIHLFMHSTNVY

SEQ ID NO: 16969 - DNA, 1679 bp, Homo sapiens
ttttactttgtgtaactgattaattgttcatttgggtagtgatattatgactatggctaaatttgcattgtcttgcctaatagacctgagcactgatgagcactgtcttccctttagatatcatagaatacagtcatggttacttggtttccaatgtgtagccttgtttggggcttgctttccaaccaggggagtaagaaggcacaggcaagagtgccagggcttgctgtcatagactgagggctctgccaagacagggattgactctggctttggattatctcctaagctttggaggggaaaggggagagaagaggactacagaaggtctagtagttgggaaatgagggggcagcccccttgtgccactgccttgagagtttcaaacctgtggcccccgcaaaaggccaataagcactcttgtgtaagggaaagggccattcaggtgggtgctgggaaagatagctaaatttacccgcctctctattcttgggttttttcctctgtgcctgcagtactttgttttcttctcattgtgaatgacctggacttatttccttgaggtccagcctgacttgggctcagggctttcatcttcccttcacgggatctgggaaagggcatgagatctggagccagacaaacctagatccagtcccagctccaccaaatattagttgaatggcttcagacaagtcttttaacctctctattcctgaatttccccatctccaaaatgggatggtgatgattaaggtgaaagaaagatgcctggtttagcagcaagaacatagactttgggttcatagacctggatttaaagtctggccttgaggcaccgtggctcacgcctgtaatcccagcactttgggaagctgaggcacgcggatcacctgaggtcaggagtttgagaccagcctgaccagcatagcgaaaccccgtctctactaaaaatgaaaaaaaaaaaaaagccaggcgcggtggctcctgcctgtaatcccagccctttgggaggctgaggtgggtggatcatgaggtcaggagttcgagaccagcctggccaacatagtgaaaccctgtctctactaaaaaatacaaaaaaaaaaaaaaatagctgggcgtggtggcaggcgccgtaatcccagctccttgggaggctgaggcaggagaattgcttgaacccaggaggcggaggttgtagtgaacccagatcgccccattgcactccagtctgggcaacagtgtgagattccgtctcaaaaagaaaaaaaaaaaagcaaaaaaaattagctgggcatggtggcacatgcctgtagtcccagctacttgggaggctgaggcaggagaatagcttgaacccaggaggtggaggttgcagtgagccaagatcatgccactgcactccagcctgggcgacagagcgagactccatcttaaaaaaaaaaaagtctggggctgggcgcggtggctcatgcctgtagtcccagcattttgggaggccgaggcgggtggatcacaaggtcaagagatcgagaccatcttggccagtggcgcgtgcctgtagtcccagctactcgggaggctgaggcaggagaatcgcttgaacccgcgaggtagaggttgcggtgagctgagatgctacagcactccagcccggcagcagagcgagactccatctc

SEQ ID NO: 16970 - DNA, 2464 bp, Homo sapiens
  CDS (1708)..(2166)
cacgttttgaggtcccaaggggttaggacttcggcatatgaatttggattgtggggtggggggaacacgattgaacccctcactggatgaattcttgagaatgggcagccagaaaaagacctgattgaggccaaagagcaagcgatgttgggagcttaggaaagagggttctggtcgaggggccggggagccccaggtcagtgcacgcctgctgtgcgccagctgttctgattctagcctgactgaacatgacagtgtccagagagaagaggaaagcagagttcccatggtccttggagacacctgtccttgggaggcatcagagctttccccagcatttggctctagggcacttctcctctggggcttcatccagggacggcagtaggtccagtcagtgccagcctcagctccgctccactggcgccagggtcatggtttggcaggcccccaaatactgccccagtccagacaggtctgcagggagccagggcaagcccggacactaggggaggctgggggccaaggcagcctctttttctctggggacagcactggcagcccctgacccacatcatggggtgagcaagtgtccccagagctcctgtccacaggctgatggaggtgccccgggcctgggagcagcacgtcttccccagagacctcatgggctccgtagtgacatgctccctcgattcccaccgctaccaggcagagctggcctccagccccacactcctctcctcgtggggctgtcctgttcccctgctgggccgcccactgccctatgagcaggggcaatgtctgttgttccttctctggaacatgataggagcttctcagaggatgctgtgtgtgtgttctcagcacgcagattctgcccagtgactcctgagtggcggcttctccctgcgttctggtctcagttaccttggctcatcagttctgtgcccctcactcaaagggaatgaacttcctttcgcacaggttcaagtccccacccttctcgggaacacatctcctgctccctcctccatatcccagcctcctgacgaggctgtgagtcctgccaggctgccccttcacaggcagaggggttccactgtggtcctcttcttccttctgggcccatggggtctgcacggccgtcagcgccaacctgagaaagcaccgaagaccttgtcttgcattggcctccgggctcccctcaccaccctctccacacgaatgatgaatgtaccattctgtcaaagcacccagaaggttctcttcagttttctttgattttgcaaaatataaatccaaaaggcattgagtcgtttaatattgaacacttgagtggatttgagtacaaactcggggtcctcccagaactcacagcccctgtcagggcttctgtggcgagcttgctctttggcaggggagtctcctgtgttcccagtagctcccagcttgcttgcccgctgcagcacgggctgctttcaggcaccaggacctctctggcaccggctcactgtccagcacatcagagaggtagccacacacaagctgcgggccctcagttgctgggctttgtgacataggagtcacgcctgcctccttgaggatggtgagcacccagtgaggaagcactgccaggcatcctggctcacggcccatccctcagtgagcttgccaccatgcggctgcaggcggtgagcgtcagtgatgataatcgttccctgcatgatttctaacacacagtgttggcttttcctaacccagcattcaacaccctcctcaatgctttggccacgtgcctgtactaatctcggaaagtggttgtgttcccaaggtgtcgtatgctcgcccgagctcagaggtgatcaaagacgccaacttgtacatcagcgggctcccgcggaccatgacccagaaggacgtagaagacatgttctctcggtttgggcggatcatcaactcgcgggtcctcgtggatcagactacaggtaccagaggggccccagacgcgtggggagggtgttctctaggtgggggctgggttttctagggaaggcagatcaccgtttgattttaaatgtcattagttattccgcaaacgaggacagcaccaaaatgagaagacgttggctttggtttgaggaggctgaggaggtaagatggcattaaaagaagctggggatatctgggcgtggtggctcacgcctgtaatcccagcactttgggaggccaaggtgggtggatcacgaggtcaggagatggagaccagcctgaccaacatggtgaaaccctgtctctactaaaaatacaaaaaattagctgggcatggtggcgggcgcctgtagtcccagctactcgggaggctgagacaggagaatggcatgaacccgggaagcggaggttgcagtgagccgaggtcttgccactgcactccagcgtgggtgacagagcgagactccgtctt

SEQ ID NO: 16971 - protein, 153 aa, Homo sapiens [sequence omitted]

SEQ ID NO: 16972 - DNA, 1823 bp, Homo sapiens
atgcaaccaagaggcttggggctccattgcttcccccgctcccacccataggttggaagctctacccaggcacagtgaactcagatttgggccctgattgcctttgcctcagcttgcttgtaaggcagaggtttcacaagagaaacaaaatggctaccacccagcccattgcccagaatggtggttcagagattttgtccagagggagagacagtgtataagaatagagctctgaagctctctcaagaagaatggaatttatttgaaacagtgtcagaaacttcccttaattaaaaacaacatgaaccgtaagtcagctagttaatcaggtaattccaggggaagacacagctaaggagcccttctaaggtcaaaagaaaccttaaagactggcctcaaaaactagccctgcttggcttaaattataccaaactgcttagtaattaatgctccaaggacttgtggagaacagtagactgatcagacagaagccagtggagcctagtgggctagaaataataccaaaggagacaaacatcttaacagagagatcagggaaagatggtcaaagagactcctgtttaaaaccataccagggtatattctgcgtatgtccaaggctgtaccctctgaagagcaacaaaatgcttcccactgccagctatttcactaaaatagcttagtgaaaacacaaaacaaataactacgagtaactctgcatatgtccaaggctgcaccctctgaagaacaacaaaatgcttcccactgcaagctacttcactaaaatagcttagtcaaagcagaaaacaaataacaaaacaaaacaaacaacaaaaccactctgaagaacaacaacaaaaaccactctgaagaaggggacagggaatcagtatccagaatcgctatagtatgttacctaatatgtccacttatcaacaagaaattgtaagacatacaaagaaactgaaatgttcgacttataaacaggaaaaaagcaggcaacagaaatggcctttgacagggaacagatatcagatttaaaagacaaaaacttcaaggtagccattatatatattcacagcagtaagggaaaatacaaagataatgtctcatcaaataaagaatatcaataaaggaaatcataagatgaaccaaatgtaaattctggagttgaagactataataactaatataaaaaatcattagaagggctaaataagtttgagctggcagaagaattagaaaactttcaaatagatcaatagaaattatgcaacctcaattccatcttcccattagaaaatagaataggaaaatgaagaaataggatgagaaaatagaacaaagaaatataaacagagcctcagagaaattcaggacgcctttcagtgcaccagtgtacatgtaatgagaataccataaggtgaggagaaagagaagcacaaaaatattcaaagaaataatggctaaaaacatccacaatttattgaacaaacattaatctatactcacaagcatctcaacaaactgtgaacagaatgaatgcaaacatatccacaaacagacacgtcatagtaaaaatgttaaaagtgaaaggaaatgttgaaagctgtaagagaaaaacaatgtgccacaagggtaccccaatagattaacagcaaacttctcatcagaaacaatggaggggatgaaggcagtgggatgatacattcaaagtactcaaaggacaaaagctttgtgaaccatgatcttatttctagtaatgctgccttcaaaaaaaaggtgaaacaaagccctcccagatctgccatatgagaaattgt

SEQ ID NO: 16973 - DNA, 1717 bp, Homo sapiens
gttgagacttccccaggatgcccgtgaaaattaaatgagataatatatgtgaaaggcgttttgtaaactgtgaaatctccataagccttcattgtttctggctttgttgatgagcgtccccacacatacgtgaatgcggtcgccctgaacgtttccccacaaatccagaatttgacagcagggatcccaggggcacttggctgtcctgtgccgccctttgcaatccgggctgaggggttttctgggccaagttaacagcggatggtgcctcacagcagaggcctgaaagcacctgctgcgtgggccataaacacagtgtgctcagacacgcagagacactggttcttacccactcccaagggtgggataacgctgcaccttgcacttgtgggatgaggaatgaggctcttctgctgggcagggcctgggcaagggagaagcttttatagaggaacccgcatggccccggagtcctcccctcttagcccctggcctgagtccccagccagcaacccagggtagctgttctgaagcagaggggctttgttccattgtgtttggaagcccagaagccaccttgtggcttagggtgacatagggacctacacacagaggagtgaacttagggttctagggactatggccgggtcaccggtggccaggggcagagatgagcacctgtccatgtaagccatatgccacccccacagggcctggcaaggtgcagagggtgcaggtctcggccatgtacccctttgcccctttctgagaggggcagatgcccagcccagtgacccagagcctcaccccaggaagcgggtccatgcagcaaatcagccaggcactggcatggtggcccccaggcctccaccgcctcaccagtccctgttcaatctgctgataacgcctttcctcccttgcaggtctgtgcagacttttgcagacaaatcaaaacaagaagctctgaagaatgacctggtggaggctttgaagagaaagcagcaatgctaaacctctgtttcatgctaaccagacacgccgtgcactcgttagattcctttcttagaaaactcgttttctgctcccttccctcgtcccttccctccccgacaggtcacataacagctgcatcattgaccgcacagcgccatctctccctgagaataaagccgatagccaccctcctccggctccgagcctgcttctgccacacctcgctctcagttctctccacatttccatagagaccgtgtggtttttgttcacccgggccccccgtcctcctccctgtccccccatttataggcataaaatccactgtctgccagcctcccttccctcccacctttttggtacattggtgtaaaaaatgtaaaacaaaaaaattttatgaactaactgtggtgtgtgaaagagagaagaaaaactggaaatcttattccgtgtgtgtttgggagttgcttggggttgggggtcgtggggacaggggacagctctgggagcagaggtggccctcggtgccgtcctgcgcagactctcccgtcccacggaggccgcggggtgggggctggggggggtgccgccgaccgttccgctcttccggccaggtgcttttctgtcaatttctatggaatgcaaaaggaggtttttgttttattttgtttttttgtaaagcttaagaaaaaaatctacatcttatacttgagcctccatactt

SEQ ID NO: 16974 - DNA, 2237 bp, Homo sapiens
ggggggcccacattttttgtttaggataaaactagcctgagcactgttctactgaatctgaagtcaggagtatcagatttttgtgtcagtccagcccttagccagtgctaaatgactttgaatgtgttagctagtcttttgggtataatgtccacatctgagggatttgtcccttatctgaaaagtagataggtggtgagttcttcagggacaaggattcaattttattcatacagtatatatgtggatatacatatacacatttatacataaaatcccagtacctagcactgtacctggtccttggtaaggccttgataaaggtttgttagaggcgtgaatattttctgtcttcagggcactttatattctttatgaaaagcagtttatgtagtttatgttattgttttaaaaaacttaatcctaaatgtgaagtcatttcttttctttgttttgttttgttttgtttttgagacggagtctctcattatcacccagattggagtgcagtggcaccatctcggctcactgcaacctccatctcccggtttcaagagattatcatgcctcagcctccaagtagctgggactacaggtgtgcaccaccacacccagctaattttttttttttagttgagatgggagtttcaccatgttggccaggctggtctctaactcctgacctcaagtgatccgcctgcctcagcctcccaaagtgctgggattacaggtgtgagccaccatgcctggccaatagtttatttccaatgcatctattaatttgattcttttctatttgacaaccctttccaatattctctttgcatccaaatggaatttatgttttttcccaagttcccaactgcccaaggtagacactggcagatttatatcaaggttctttgacatcttgaacttcagatcagaggatggagttcttctctcattgccttgagcaagggcttataaccagagccacattaagaactcagatcatgctccctaattgaggacacatagcaagcttcaccaagccctccactacaactataccaatttgtcttcctgtagacttacaaggtaccactagggttcctttggagaactcaggagtccagtataacttggagtgataataccacattggaactcacaactcttctaactccagggatttgaatgtgatttcttctttttaattcagagtagcgtaatgatcctacacttgggcatatttgtcttggccccactcccaaagcaaatagatttccatgtaactggaaatctgctgcaaaccccaagaattttatcctccctcaaaaagtgctatcctgagtggtttttttttctttttactgtacattgaaaattgaagttgttgtttcctttttttttaatttgagacaaggtctcactgtgtcacccaggcatgatcacagctcactgcagcctcaatctccccaggctcagatgatcctcctgccttagacttctgactagctgagactacaggcgcaatgccaccatgcctggctaatgtgtgtattttttgtagagatggagtttcgtcatgttgcctaggctggcctcaaactcctggcctcaagcgatcctcccacctcggcctcccaaagtgttgggattacaggcatgagtcaccatgcccaggctaaagctgttatttcctcataacctttactgcacatgttttaaaacaggtccttatcattgtttgccccagcaactggaatagctttctatctgctttcaatcttaacccagtctcaccagggcatataatctttctagaatgcaaatctgatcattttacttgaaggcttaagttttgcagtgacatactttagagcagcactgtctgataggaatagaatgttagcttcatgtatacagatgctccttgacttaggatgggtttatgtcccaataaatccaccataagttgaaaatattgtaagtaaaaaatgcatgaaatacacataccctactgaatatcatagcttagccaagcctaccttaaatgtgctcagaacactgatgttaacctacagttgggaaaaatcatcttacacaaaccctattttataataaagtgtgaatatctcgtgtaatttattactattgatcataaagtttaagcattataagttggcgatagtctgtaattgttaatttgtttgtatccaatataaaaaatataaagagaaacagatgaaatt

SEQ ID NO: 16975 - DNA, 1824 bp, Homo sapiens
  CDS (53)..(1390)
agtagtcgctgtcgtccgcagagccagttcctagcgcagagccgcgcccgccatgagggagatcgtgcacatccaggcgggccagtgcgggaaccagatcggcaccaagttttgggaagtgatcagcgatgagcacggcatcgacccggccggaggctacgtgggagactcggcgctgcagctggagagaatcaacgtctactacaatgagtcatcgtctcagaaatatgtgcccagggccgccctggtggacttagagccaggcaccatggacagcgtgcggtctgggccttttgggcagcttttccggcctgacaacttcgtctttggccagacgggtgcagggaacaactgggcgaaagggcactacacggagggcgcggagctggtggacgcagtgctggacgtggtgcggaaggagtgcgagcactgcgactgcctgcagggcttccagctcacgcactcgctgggcggcggcacgggctcaggcatgggcacgctgctcatcagcaagatccgtgaggagttcccggaccgcatcatgaacaccttcagcgtcatgccctcgcccaaggtgtcggacacggtggtggagccctacaatgccacactgtcggtgcaccagctggtggagaatacagacgagacctactgcatcgacaacgaggcgctctatgacatctgcttccgcactctgaagctgacaacgcccacctacggggacctcaaccacctggtgtccgccaccatgagtggggtcaccacctcgctgcgcttcccgggccagctcaatgctgacctgcgcaagctggcggtgaacatggtgcccttcccgcgcctgcacttcttcatgcctggcttcgcgccgctcaccagccgcggcagccagcagtaccgggccctgaccgtgcccgagctcacccagcagatgttcgacgccaggaacatgatggccgcctgcgatccgcgccatggccgctacctgaccgtggccaccgtgttccgcgggcccatgtccatgaaggaggtggacgagcagatgctggccatccagagtaagaacagcagctacttcgtggagtggattcccaacaacgtgaaggtggccgtgtgcgacatcccgccccgcggcctgaagatggcctccaccttcatcggcaacagcacggccatccaggagctgttcaagcgcatctccgagcagttctcagccatgttccggcgcaaggccttcctgcactggttcacgggtgagggcatggatgaaatggagttcaccgaggcggagagcaacatgaacgacctggtatccgagtaccagcagtaccaggatgccaccgccaatgacggggaggaagcttttgaggatgaggaagaggagatcgatggatagtcggaatagagccgccccaactcagatcctacaacacgcaagttccttcttgaaccctggtgcctcctaccctatggccctgaatggtgcactggtttaattgtgttggtgtcggcccctcacaaatgcagccaagtcatgtaattagtcatctggaacaaagactaaaaacagcagagaattgcgggttctacccagtcagaagatcacaccatggagactttctactagaggacttgaaagagaactgaggggccacaaaataaacttcaccttccattaagtgttcaagcatgtctgcaaattaggagggagttagaaacagtctttttcatcctttgtgatgaagcctgaaattgtgccgtgttgccttatatgaatatgcagtatgggactttgaaataatgattcataataaaatactaaacgtg

SEQ ID NO: 16976 - protein, 446 aa, Homo sapiens [sequence omitted]

SEQ ID NO: 16977 - DNA, 3189 bp, Homo sapiens
gaaagaaatctggtgcctgggggtccctgtgttcacccctagagtttgttttaaaatttttaattgaagcatgtgaagtgtacgtgcagaaaagtgggaacatgatagtgtatggcttggtggattttcacaaactgaacatacctgtgtaatcagcatctagacccagacccagagcatcacaaatatcccccatcctgggcttttcccagaggagatgggggcttctgaagatggacttacctgggacctgccccccatgagccaggacggtccccccacagtcagcctgtgcaaaggccccgtggccaggggtggaggagaatatgtgggtgtggacaggatgggagactgtggcctgaacaggagattttattatatctggagaccctgagagaccctgagacctggggcaccatggctggccaggtcagaagcatcctgactgcagaggtccgtgcagccacaccctcttccctgccagcaagttgtctgcggctcatcggaggcccctccgcctggagccttctatggacgtgatatgcctgtatctgtttttaattttcattcttcacttaggggaagtgaaatcgctcagagatgagatcctttaattgaaaacgaagtgtaacggaatctagtgtctttctaatgtggtaaaattctccatcaacatcacagtcagctggcagctgaacttcagaatctcacttacagcaggcgacacgggggtacaccgatgggtcacactgggtctgggggctccctggagctcctcctgcgtgtggtctggttaggagttgagttgtttgctccagggttattctcctcctcgagtcacagtcacacgaatacctgccttctctggctttcctgctatacacatattcacatggcgctcaagaagttaggctcatggcaacgtgtgtctttctctggacaactggcccagtttacagtgaaatggagaatttcaggtctccacgtctgcccaggaaagaacttcagctgactccacggggatctggaaatccacgaccaatcccgatcggctcttattagctccccgctccacaagacacctgtgctttggaaatccaccaccaatcccgatcggctcttattagctccccgctccacaagacacctgtgatctggaaatctaccaccaatcccgatcggctcttattagctccccgctccacaagacacctgtgacatcctccagggccacaggagcacgtgctgaccagttttcccttccagttcctgcacaaaaagtgtccagagggctgtttgcaaacactagtgcactttgtagcttttcaccctctgtcccagggaatctaggagagatgaggcccgtcagagtcaagagatgtcatccccccagggtctccaaggcatttccacactattggtggcacctggaggacatgcaccaaggcttgccagagccaacaggaagtgagcccagagcatggcacatgagcatcacccgctgatggtggcctgctgtgcctggtgccaacaggggcatcccggcccgtacccctccagacaggaagcatgggtttgcccacagacctgtcgggtgctcctgtgagtggcctccagatgtctttgtgcataggcacaagtgggccagggctggagggaggtgggaaacctcatcatccggtgggccctgccaatcttaacccagaacccttaggtattcctggcagtagccatgacattggagcaccttcctctccagccagaggctgacctgagggccactgtcctcagatgacaccacccaggagcaccctaggtgaggggtgagggcccccttatgtgaacctcttgcctcttcctttctcccatcagagtggttggatggagccattggcctccttttcttcagcgggcccttcaacctctctgcaccatgttgtctggctgaggagctactagaaaagctgagtggagtctcctttccaacaggatgatgcatttgctcaattctcagggctggaatgagccggctggtcccccagaaagctggagtggggtacagagttcagttttcctctctgtttacagctccttgacagtcccacgcccatctggagtgggagctgggagttagtgttggagaagaaacaacaaaagccaattagaaccactatttttaaaaagtgcttactgtgcacagatactcttcaagcactggacgtggattctctctctagccctcagcacccctgcggtaggagtgccgcctctacccacttgtgatggggtacagaggcacttgctcttctgcatggtgttcaataggctgggagttttatttatctcttcaaactttgtacaagagctcatggcttgtcttgggctttcgtcattaaaccaaaggaaatggaagccattcccctgttgctctccttagtcttggtcatcagaacctcacttggtaccatatagatcaaaagctttgtaaccacaggaaaaaataaactcttccatcccttaaagaatagaatagtttgtccctctcatgggaattgggctgtatgtatattgttcttcctccttagaatttagagatacaagagttctacttagaacttttcatggacacaatttccacaacctttcagatgctgatgtagagctattgggaaagaacttccaaactcaggaagtttgcagagagcagacagctagagataactcgggacccagagttggtcgacagatgttagatgtatcctagcttttagccataaaccactcaaagattcagcccccagatcccacagtcagaactgaatctgcgttgttgggaagccagcagtggccttgggaaggaagccatggctgtggttcagagagggtgggctggcaagccacttccggggaaaactccttccgccccaggtttcttcttctcttaaggagagattgttctcaccaacccgctgccttcatgctgccttcaaagctagatcatgtttgccttgcttagagaattactgcaaatcagccccagtgcttggcgatgcatttacagatttctaggccctcagggttttgtagagtgtgagccctggtgggcagggttggggggtctgtcttctgctggatgctgcttgtaatccatttggtgtacagaatcaacaataaataatatacatgtat

SEQ ID NO: 16978 - DNA, 1796 bp, Homo sapiens
aatcaaacatagacaaatgggattacattgagctaaaaagcttttgcacagcaaagaaaacaatcagcagagtgaagagacaacctacagaattggggagggggaggaatatgcaaactatccatttcataagggattaataaccagattacataaagacatctaacaactcaatagcaaaaagccacaaataatttgatttaaaacagggaaaatgatctgaatagacatttcacaagagaagacatacaaatggccaacaagtgtaggaaaaaatgttcaacatcattaatcgtcagggaaacgaaaaccaaaacctcaatgagatattatctcacctgttaaatggctactttcaaaaacacaaaaagtaataaatgttggcaaggatgtggagaaaggggaccactcatacaccgttgctgggaatataaattagtatagccactatggaaaatagtatggaggtttcccaaaaatctgaaaacacgcctaccatatgatccagcaattccactgctgggtatatacccataagaaaataagtcagtacatcaaagagatttgcattctcatgtttataacagcagtattcacaatggtcaagatatggagtcaatctaaatatttgtcaatggatgactgttaaagaaaatgtgatatgtatacacagtggaatatcattcctccacaaaaaaggaataaaatctgtaatttgcagcaacatgaatggaaatagagtcattatgttaagtgaaataattcaggcacagaaagacaagtatcacacgttctcacccaaataggggagctaagttgatctcaaggaggtagagagtagaatgatgtttactagaggctgagaagggtagggagaagggagggatgaatagaggttggttaatggaaacaaaaatatagtcacacagaagaaataaattctaccatttgatagcacagtagggtaactatagtcaacaataatttatttgtatatttcaaaatagctagaataaatgatttagaatgtttccaacacaaagaaatgataaatgtttgagatgatgatatcctaattaccctgatttcatcattacacattgtatgaaaatgtgtcaaaatatcacatatatccctaaatagatacaatgattatgtatcaataaaaattaaaattagaaaaaagcagaagaggaaggcaggagagcccttcagaagtatgtggaggagaaggtgaagcaggagagataaggtagaaaaggagagcagagcagagagaagtgttagaagaactctacctaccatttctatgcaggcagactctagtagctgggaatgacccccaggcaatagccagcaaggaaacagggacttccgtccttccattgcatacagctgaattctgccaatatctttttcttttctttttttctttttttgagacggagtctcgctctgttgcccaggctggagtgcagtggcgcaatctcagctcactgcaagctctgcctcccaggttcatgccattctcctgcctcagcctcccaagtagctgggactacaggcgcccgccaccacgcctggctaatttttttgtatttttagtagagatggggtttcactgtgttagccaggatggtctccatctcctgacctcatgatccgctaacctcggcctcccaaagtgctgggattacaggcgtgagccactgcgcccggcctgatccatgaaaattgagagagaataaatgggtgttttaaacaaaagaaaataaaaattctttatataaaaagcc

SEQ ID NO: 16979 - DNA, 2332 bp, Homo sapiens
  CDS (158)..(778)
ggctgcccccgccctggacgccttcgtggagcgagtgctggcggccggacggctggggcgggtcgtgcttgctaacgcttcggggtccgccaacgcctcggaccccgcctgggacttcgcctctgctctcttcttcgccagcacgctgatcaccaccatgggctatgggtacacaacgccactgactgatgcgggcaaggccttctccatcgcctttgcgctcctgggcgtgccgaccaccatgctgctgctgaccgcctcagcccagcgcctgtcactgctgctgactcacgtgcccctgtcttggctgagcatgcgttggggctgggacccccggcgggcggcctgctggcacttggtggccctgttgggggtcgtagtgaccgtctgctttctggtgccggctgtgatctttgcccacctcgaggaggcctggagcttcttggatgccttctacttctgctttatctctctgtccaccatcggcctgggcgactacgtgcccggggaggcccctggccagccctaccgggccctctacaaggtgctggtcacagtctacctcttcctgggcctggtggccatggtgctggtgctgcagaccttccgccacgtgtccgacctccacggcctcacggagctcatcctgctgccccctccgtgccctgccagtttcaatgcggatgaggacgatcgggtggacatcctgggcccccagccggagtcgcaccagcaactctctgccagctcccacaccgactacgcttccatccccaggtagctggggcagcctctgccaggcttgggtgtgcctggcctgggactgaggggtccaggcgaccagagctggctgtacaggaatgtccacgagcacagcaggtgatcttgaggccttgccgtccaccgtctctcctttgtttcccagcatctggctgggatgtgaagggcagcactccctgtccccatgtcccgggctccactgggcaccaacataaccttgttctctgtcctttctctcatcctctttacactgtgtctctctggctctctggcattctcgctgcctctgtctttccctcttgctgtctctgtttctcattctctttcatgttccgtctgtgtctctcaattaaccactcgtcaactgctgattctactgggctgtgggctcagacctcatttcaggcaccagattggtcgctacaccctggacaagtgactgcccgtctctgagccttgatttcctcagctgccaaatgggaagaatagaagaatttgcccctaaacccctcctgtgtgctggccctgtgctagacagtgctggagacatagttgggggtggagaactgcccttatggagcttgcagtccagtgaggtggacagacctgtccccagacagtgatggcccaaaatggtcaggactttaatggaggaggtgaggtgttgaaagcacaggcagagtggtcagggctgaagtcggagaagcatagggactaggcccaatccagcctggaaagtcagggaggacttcctagaggaagggacatcgaactaagacctgaactatgagaaataggcaggaagaagttgtacctgactcatttttctcaggtgtctccagggagcaggacccatggagggacccctggtgtaggcctgggcgatagactcttcctcagcagcctggcaggcaggaaacagacataggaccccagcccagatctgaatggcatgggaggtgctgcccttaaccatgacaccattgtaagagctgtccacatttgtatgttgtgccctggaatcagcctggttgagctcaaatcccaacttagccacgtctggcctgtgtccttgggcagtcacactacctctctgattttgtttccttatctgtaaaatggtgatcatcataatacaacttcaaaaggatttcaggctgagtgtggtggctcacgcctatacacccagcactttggaaggctgaggaaggaggatcgcttgaggccaggagtttgagactagcctaggcaacacagtgaggccttatctcaacaacaaccacaaaatctaaaaattagctgggtgtggtggtgcatgcctgtgatcctggctacttcagaggctgaggtggaaggatcacttgaggccaggagtttgaggctgcagtgagttatgatggcactgctgcactccagcctgcgggacagagtgagaccctgtctgaaagaaagagagaaagaaagaaagaaagagagagaaagaaagaaagaaagaaagggaaagatggaaggaaggaaggaaaaagaaagagaaagagagagagagagaaag

SEQ ID NO: 16980 - protein, 207 aa, Homo sapiens
MGYGYTTPLTDAGKAFSIAFALLGVPTTMLLLTASAQRLSLLLTHVPLSWLSMRWGWDPRRAACWHLVALLGVVVTVCFLVPAVIFAHLEEAWSFLDAFYFCFISLSTIGLGDYVPGEAPGQPYRALYKVLVTVYLFLGLVAMVLVLQTFRHVSDLHGLTELILLPPPCPASFNADEDDRVDILGPQPESHQQLSASSHTDYASIPR

SEQ ID NO: 16981 - DNA, 1584 bp, Homo sapiens
ccagctcggagcaggcctcagactgtaacatgatgtttcaggtttacggtgtgagactttgtcagtgtgaaccttgagcagtttggactcaaattgtagcctcatccactgaggcatgtttgtaattagggtctggcttactcagggctttctctggaagttaacaagaactacagagtcagaaaattctgccaggagaaaagtgatgtttaaaaaatcatctaggatggccgggtgtggtggctcatgcttgtaatcccagcactttgggaggctgaggtgggaggatcacattagcccaagagtttgaggctgcagtgagccatgatcacaccactgcactccagcttgggtgacagagtgagaccctgtctcttaaataattaaaatttaaaaattaaaaaaaaaattccctatgagagaaagtacatggactttggggaaggatctgaagtttagccaggttgggacaatttggaccgaatcatttaacttaaccctgctattttcctcaactgtgcttagaaaaggggtacaggacctgatttctgtccttaagaggtttatagtccagctacaccttagcctgggggcagagtttctcaaccttagcactattgacaacttaggcaggataattcttacagtggggggtgtcctgtgtgttgtagcattggcagcaccgttggtctctacccagtagatgccagttgcccctccccagttttaacaggcaaaactgtttccagacactgccaactctgtgcaggcaggaggggcaagttttcccctgatggaaaaccactgccccagggtttctgcggcccagaactcattgttttcactgatgtcataggagtctggagttttatatcacatgccctggtcttcattgttttatggcatgaacatttcagtgtgatgatggttatccctgaaacagtaaggctgaagttactgaggcagaacaaaccaacccaagagagaccttgttccccatcttcctttagaattcaagtatagattcttttttatatgattgggtaagaccaagagacgtagcgtgagagagaactgtgcacccttaggagtgtacaaatcctttatcaggggtgcagatgcctctgaagtagcaacttcttcaggatcccccctttattctttttctctctcccttttgtatgagtttttctctcttgtatgttatgtttcttgttgcctttagttaaaacgtccactctttatggaaaagtgaaagtcatgtcaggcacttttttccattcttaaaaagtgcctcttccattggctgggtgtggctcatgcctgtaatcccagcattttgggaggccaaggcaggtggatcacctgaggttgggagttcgagaccagcctggccaacatggtgaaaccccctctctacttaaaaaaaaaaaaatcagccaggcatggtggtgcatgccagtagtcccatctactgtggaggctgaggcaggagaatcacttgaacccagaaggcggaggttgcagtgagccaagattgcaccagtgcactccagcctgggcgacagagtgatactccatctg

SEQ ID NO: 16982 - DNA, 2987 bp, Homo sapiens
gatcagaagaattaatattgttaaaacgaccatcctgccgaaagcagtgtacagattcaatgcaattcctatcaaaataccaacatcatttttcacagaattagaaaaaacagtcctaaaattcatatgggaccaaaaaaataaaaaataaaaaagcaaagcctaagcaaaacaaaacaacaacaaccaaaaacaaagctgcaggcatcacatttcctgacttcgaactatactgtaagactacagtaactaaaacaacagggtacttgtataaaaatagatacatagatcaatgaaacagaatagagaacccagaaataaagccatatatctacggagtgccagctgatctttgaaaaagttaacaaaaacatgctctgcgtattctgagatgttctcaggagtatatgttagtccttctccacatacctgttttccaggttggtcttgaactcctgggtgcaagcgatttacccagcttgacttcccaaagtggtaggattacaggcacgagccatcatgcctagctaggctaccttttaaatatatatcatggccaatttttgtttattctgattatttattagttcctttttgatgtctggaagaacttattttctagccagacagactcttatatcaaatatcaaatttccagccttccaaatgggttttcctaccttgtctcaagccaaagcaaaacaaacccccaccccacaaaagaaaaacaaaacaaaacaaaaacttctcctccaaaatcagccgttacaccacccacctctggtgtggacatgacttccttgttcttcctcaggagttataaattatgctacggggttatgatggtatttagccagaagaaggagaaaaaaaaaaatgaaacatgttcaaactgggatcgttttttcattcctttttatggattcaattttgtgatatatagtgtttataaagtccttcagtgaaaatgtactctggtttcagcttggccttgagtttatgctggtacactgatttagctaaaacaaaacaacaacaagaaaagcttatcatcattattcactcaagcatcaatcattgcatgtgcttccacccactcccccaccccacgattaaatgctagccattcttcacttcagctcctccctctgcccccttcttcatatcggattagatttctcttccctgtattcctgaaagcaacagtgctcccttctctcctggcatgtaacacttaccactgtgaattataaaacggttgctttgctttttctcttttaaaatagactatgagctcctccagggcaggggccatgtctgatttacttttatctcttagtgatgctttgctaggcatatggcagagctcaataaatcttgtatgaatgaatggtctcatgactggttccttctcatacttcagctcttagctcaaatacggtctcttcaagaaaggcttgcatgatcacccaacataaagtagttgtgcatccccggcacagcctgttccattgtcctgcgtcattttcatcacagaagttaccactctctgaaattgtttgctaagttgtttattctgtctccccacagaatgtgagcgctgtgaaagcaggaccctgtaggtcttgcccattgctttatttcatgccagttcctaggctgtcagcacagtttggttacatgagtgagtgaattttccctgttttccttcctaccctcagtggaaactgtgaaggctaaatgtataaggaagactagatattaaagcattaatcacgtgtaactgtctgtaaacagcggttttgtagttttttgcttttagtaaataggctcccccgtgtgatcaatactaaactgacagcaaaagagcagtccattcttattagaccatgcttggggagataagttgctgctggctcatgaaggacacattcttcttgatgtagggaggtggaatgaggatttaggcgctgtcttcctcccctttggggtagggtaccttgctgtcttttgacagaatgaggatgagaggaggtggtaggaaggcgggggaggatcagtgatgagatggcactggggacagtggagagaatggttgtgcatatgatttacggtctttcttttcagtatactacagtgcttagatgtgtatgcagaaatcaagagttatcagtgatgtttgaaaattagatgttgctggcatggaacttccgttttcattgagaacagagcgtgcttagtgacgtgtatatttagtacagtaagacagttgcagaaggatggccctgatggtgacagtgataatcctaaccctagatgctcactggctgggcacaagtacaggatctcactggaacctcactaggtatctgttgtcctccttttatagttgagaaacagaaagcttaagtaatttgcccaagatcatgtaactaataactggcagggatttgagtcaggatctccaaagctacatctcttcctaaagctagttttaaaatttcatttctcatatatggagtagcccacaaaggctgtatgcaaggtagtcttcagaaagcttacatcttcaccaaggcacatgaaactgcagaaagaagcaatgttaggcgttcctgataataattatctgcctggatgacagcagtcctgctttatggtcacagaccccagctttctgccagaacatggctcaggactcctgaaaatcatcccattcgggagcaagtgggtttaatttccttttcatgaaaggaaagattagctttcatgcaaacacttggtccatttggccatttaataagaagactgaagtctcatgttccataactttatcagcctaaaagtccctttgttgtatcataaacacataggctgaaacccctgtccttccaactcagagcaaattctgttgtattaaataaccatgccatgtactgaatatttttacacttatttattggacttgactcctacctccttcccgc

SEQ ID NO: 16983 - DNA, 1738 bp, Homo sapiens
ttgagcaagtggcatgtaaactgagagtgaaataatgagaaggagccagtcatgagaaagtggaaaaaagagctttccagcgtagggaaagcatataagaaggccctgatatggagcagagctgaacatattggaggaactgaaaggaaggaagtggctggtatgtgctgggcatgagggaacacaaaataagtgaagatggaaggaacatggagccagaaaataaaattcgttgtggactgtgtatattagggttccctagagggacagaactaatggaatatacatacaggggagttgatcaagtattaactcacatgatcacaaggtcccacaataggctgtatgcaagctgaggagcaaggaaggtagtctgcaccaaaactgaagaacttggagtccgatgtttgagggcaggaaacatccagcatgggagaaagacgtaggctgggaggctaggccagtctctcatttcacatttttctgcctgcttatattctagccgagctggcagctgatcagattgtgccaacccagagtaagggtgggtctgcctttcccagcccactgactcaaatgttaatctcctttggcaacacacccacagacacacccaggatcaatactttgtatccttcaatccaatcaagttgacactcattattaaccatcacactgtataagaggttataaagccagtaaaaggttaagtggcattttaatttaattaaattgatcagtttatttattttgagatggtgtctgaccctgtcacctaggctggagtatactggtacagttgtagctcactgtaacctccaactcctgggttcaagggatcctcccactttagtcttctaagtagctggaactatagatgtttatcccatactcagctaagtttttatttttagtttttgtagagacaggatctcactctgttgcccaggctgatctcaaactgcggaccttaagtgattgttctgcttcagcctcccagaagtgctgggattatagttgtgagccactgtgccgacattatggcatatttagaactacatatatatatatatgtatgtatgtatgtttatgtatttttttttccattaacctttattttaagttctagggtgcatgtgcaggatatacaggtttgttatataggtaaatgtgtgtcatggtgatttgctgcacagatcaacccgtcacctaggtattaaccccagcatccattagctattcttcctgatgttctccttccttccaccctgcacccccgaggggccccagttcgtgctgttcccccgacagtgtgtccatgtgttcttatcgttcagctcccacttataagtgagaacatgcagtgtttggttttctgttcctacgttagaactatatttttaagggattatactgattgctatgtagagcacatgaggtaaaatgaaagcagaggtgggcgcagtggctcactcctgtaatcccagcactttgggaggcgaggcgagcggatcacttgatcccaggagttcaaaaccagcctgggcaacatggtgagaccccgtctctacgaaaaatacaaaaattagccaggcatggtggctcatgcctgtaatcccagtcacttgggaggctgaggcaggaggatcacttgagcctgggaggccaaggctacagtaagctgtgaacatgccactgtaccccagcctaggtgactgagtgagacccctgtctcaag

SEQ ID NO: 16984 - DNA, 3102 bp, Homo sapiens
catatttgtattgacaaagggacttttgatgccataagccttaatcctgacaatgcaattgagaagaggaagcaatatgtgaaatctctctccagggtgttgaaagtaaaaggcttttttctaataacgtcatgtaattggaccaaggaagagttgctaaatgaattcagtgaaggttggagtacagtggcaggattttggctcactgcagccttgacttcctgggctcaagcgatcttttccacttcagcctcccgagtaggtggaactacaggcacacatcatcatgcctggataatttttgtatttttagcagagacgaggttttgccatgttgtccaggctggtctggaactcctgggctcaagtgattctcccacctggcctcccaaagtgctgggattataccatgccaggccctcgttggcattttagatttgaacttctcgaagagctaccaacacccaagttcagctttggaggcagatctggaaacagtgtagcagcattggttttccaaaaaatgtgagactttttcttggacgaattcaggtagctacacagaatctacacagcaaagttaacctgacacagaaaatccttgtgcaaataaatgcttagtaagtacacaggatgcacatgttgaatagagtatactggattggtgaaagaaaataataataatgagcatctaagtggttgggttttagagatcaatcaagaataattttaattttcttttgtatttgaaatgtaaatagttttcttttcgattaaaaaaatttcctataactgctaaacagttaaaaactttaaagtagtaaatgagtttatagaaagcatgtattcttgatttttgtgccttggtaaagttgataactatttatgaatatttgaccaaattattccagcatcagaataataagcaaaataactttgttagtgttttgttagactgtttatgaaatataacaagaaatactattttgtgttggatggcggttatttttaaacttaattaatacctgtgaaaaggcctcttacctttatgtatataattaaacaaaatcagagaaatgtatcagttgctcaagttatcaagcctgcattttgcagctatggtcttctacacactgtaagggtagtagaaggaaagagaactaaggaatgttattatttgctagcgctatgttaagttgtcttattaagtaattgagtcctttcaatgtcttcttgaggtatgtattgcttgttcttgtttctacgtataaggaaaatgaagctgagagaagtgaagtcacttttatgaggttcaacagtacaggatggagccaggatttttatctgggtctgtctgactttaaaacacatactcttctcctagcatattctgcctcacaggtgcttagtctttgcctttgtagcatttacagtacagctggagacccatgatgattacatataaagttcagttagaaaagatgggtagttactttattagtgttcatctgtggagtatcagaatagcagtcagccaactctgtctcatatcatccttcattacttttccccatctccctactcaaagacttgcctctattaagaattttgtcattcttctgtgaaagggtagtgtaagttatataagccctcagcgatacatgcacaaagatgttctagttaggggctaatttggcaagagaaacagtttattaatgtttttgaaaagataagtcatattcatacttaataccattttgtatttgtggtaatattttaatattggagctaaatacaaatttttgcataattttttgatgattttcagctttgtgggcctattgggttacataagtgactttttgtttggcaaatgttactcctgtattgagtaagtctaacattacgtcccttttctttttggggaggggtagccagaggagtgagtttttcatttagatgaacattgatcaaccattaagacaagatagttgaagacatgtatgtggactgtcaacaaaaataacattttttgaaaagcttttattttcaacatgtaaaaagtgagaaattacttcaaaatatatgcaatttaaattttttagaagattgtgttgattttaccaagacaggagatcttaaactgtagaaacttttatagtttttgagatcgggtctttgttttttttcacattaatattctttgatttcaaatataacatagataagtactcttagaattttgagttaagtatatgctattttaatgtgctaatcctacaaactaggctttctgtgtgactagactgagatgttgagtttgattcacaaaaagcttagaatggttctttgttgaaaagcttttcgagtcactatttggggcatgttagtgccatttgcaaaggtgaaggttttctttttttttttttttttaaccatagagcttttgataaggttaggaaaaggaagttgtcatctcttcttattactctaatcctgctggaagctagcttcttagggactaaaaccagaacaaatggaaggtccaaaaatgctaataagaaattagtattttcacataataccaaactgtaaaaaccaggccagcaagtgtcaccaggttcctgaaacaaaccataaatacattatttaacttagtattgttaaattgtataaatatgtgggtaactgtgacagaaattatgcacttataaaaagcagtaagttacatagtgaatgctgttttctgtggataagaagctggaattgtgatttcatttaatcgaaagacgcttactttgaggaaacttgtttgaaatgcaaacgcgatttctctgtggagccttcacggaattgctgcttttcactatgattattgctgcataacaggccacttctgtgtgtaggaagtgcgcgtgcaagtccaaagggaattgaggcctgaatgggtgggttatcccaattaacaaatacaaagttttcagtacattttgttttaagccaggtgcacaagttagagttgctttttgggactggcatttatgtatgtgagaatcaaacctgatatcactcttggcagcctgactaaagccatttaaaaat

SEQ ID NO: 16985 - DNA, 2077 bp, Homo sapiens
aactttacgcgtagggtagacatggagagttagcatttcatatagccttaggacagagtttgttcatccctattttgatggcacggctactttatcttactgtgtttcctctgtgtccaagtatttattaatattttttaagattttcaagtcaaaatggcaatttgagtatatgtatgtagcctgacttcagaatcgggagagacttttcaaccttgagctacccactggcagcgtgagagaaggtgataggatgtcataggctcagcttacacaagtaagcatgcacaagtgtgtaaataggcaaaaacccctttccagattgcaacatttttcccagtcctgagttcagccctttctcaccaacataacaatctatatttcttttaacttttattttaggtttgggggtacatgtgaaggtttgttacataggtaaacatgtgtcatgggggcttgttgtacagattatttcatcacccaggtattaagcccagtacccaatagttatctcttttgctcctctccctcctcctaccttccccactcacgtagactccagtgtctgttgtttctgtctttgtgttcataagttcttattatttagctcccacttgtaagtgagaacatgcagtatttggttttctgttcctgctttagtttgctaaggataatggcctccagctccatccatgttcctgcaaaagacatgatctcattcttttttatggctgcatagtattccatggtgtatatgtaccacattttctttatctaatctataacctacatttcaaaatgaacactgcaggataatatccagaggacagaaaaggaaatgtgtgatggttacctttggggttatatctttctgtcatccagttatcccatctttctcctggggaccttgggttccagtggcataaagtcctagtccatcaggcaatgactaaagcacagatcgggatccttcgcagcaactttaggaagggtgccaagttcagagtccagaaaaaaaaagggaaacctacaactcatactcagcttccacacaccatgaatgaccccactaggcaaagagatgagttgcttcttgtttcagtattattccataacaaaccatccaaaaacctaatgacttaaactataatttgctatttttcctcacattttttgggtcgattgggctcagttggatagttctcatttagagtctctcatgaagctgcagtcagatggcggctggggctggaatcactggaaggttgattggacatcccagagggcttcttcactcctttgaccgccttcattgtacctcaacaggcctccctgcagtaggccagccaggatttcttacatggaggctcagggcaccaaaaacaggaagcagaaactgtcaggcctcagaggcaggctcaaagctagcacatcactttcattatattcaaaacaatcacagccaaccgagattcaagggagtagaggcatagacccctcctcgccacagcacatgtgtactacagggggaaaagatggcagccacctttgcagataagctaccaccaccacaaacaggaagcaagaattatttgggttggaagattttccttctgcccagagagccctgaaagagcaccctctgtgctactcttgggtggcccagtgattaaagagcaaagtttgtgcaaatataattgtgtaaaacgttggagaaaagtaacttaataaactcacaaccacccttggacttcaataaagcaagcagatgaaaaagtaaataaaagatatagaggctttaattaaatcgaatcaaaaaatgattaatggatatttaacagcacccttcaaataaataattcatattattttcttaacttgtaaaaatcaactataacttaggccacaaagaaaacctgaaaaaagagagaacatataatttttagagtccacatataccaccaaaaataaaaataaaaatctacaatttagcaataagggattaaactcttgcttcaaaaaagcacttagacaccactgcactccagcctaggcgacagaccgagagcttgtctcc

SEQ ID NO: 16986 - DNA, 2609 bp, Homo sapiens
  CDS (694)..(1197)
ttattcaaacaacacgtgccatccttcaacaccccaacccacctcccgtgccccctctatgcctcacagcacctgccctggagtagctgacttactgccgttactgtctcctccaaggagtggaagctccgtgagaccagatattttgctggttttgttcactcaagtgcctagaactgtgctgagtacaaaacagatgctcccaaactacgagtaccagtgcatgctcaggagaacaaatgagcaaaccaacggtgaatgtctactatgtgccacacgtcactgctacgcactgtgagggactgagaaggtctgcctgcaggaagttcacgttctagtatggaagggaaaatgagtgcaagggcaggtgcggcagctcacacctgtaaacccagcactttgggagactgaggagggcaaatcacttgagctcaggagtttgagaccagcctgagcaacatagcaaaaccctgtctctacaaaaaatacaaaaattagctgggtgtagtggcgggtgcctgtagtcccagtactcaggaggctgaggcaggaagatcgcttaagcctaggagacggaggctgtagtgagctgagatggtgccactgcactccagatgagtacagaagaagagcaaatgtgctaaacaccaaaccatttccaaaaataccccagtgtttcagaacacacaaaccatgctctactccacccccaaagtaccatccagccttctgtcccacgagtgtccagccccgccaagtcctgacacccaggactccccatgcctctgggtccgcgagttgtgctgctggggacagagatgtcaatgctgccagcacagagcccacccccaccgtcagcttgctgggaccacattctccacagtttttccccagggatcatgctttgcagaagcaccacacacagagggcacacgggccatctgggcaatgctggttgcggccttctgggctccaggcctctgtcctcaagcccctgtagagggtaccctggggcaggtgctggttggaccccagcagaggacacggtgggccagggctggagcccagaatggcctgtctgcagagctctctgaaagtccaggcctgctcagagacacaaaaatcagcaggctgacctggctctcccctggctgctgggagacccactccgcagaccacaccgagggacagggaagctagctcaccccaaccttcacttcccccctccctctggggccttgggccaacttacctcgagcttctcaaccactgcggcctaatccactcgagcgctgtctgtctttcaatgctcagttgaaagtgtgtccctggaaaatggccatctgcgagtgactgcgggtgcactttcccctaggagcctgtggccctgcaggcagcaccgggagcacccctggggctgggcctggggctgacaatggggctccagagtgtggaacgttttctagaactctgtggctgagaaccatgaggcagccggtgcccactcagccaagtcccccagaaggcccctgtgcccactgcccaggcccaccagccactcgcactgaatgcgaggcccccacccactccaccagcactggcactgagacccaaggggagctgggcttgggtccagctgctccaggtgagctggctggggaggaggatgaatagggctcagagtggaaggccacagctggagcgccaatcgtgctgccccttctcataggacccctatgacccacagatggcagggacctcaggagagatgctactctccataaaggcaaaaacaaagcctcacacacctacttttatcaaacaaaagtacaaaagcagttgctgtaagaaatatttcttcagttcattaccacaatttatgtacacgttcaacgccaggtttttcttcactgcttatttctaggaaatggtctatggtggaaacgtcttcagctgcctgctggactgttatttcttgaaaagcacactttaaaatgttctcatagctgagaatgggctgaaaagaaaagaagaaaagcataccaaagttaggagaaagacatacataacgttaccttattccaaagaaataattgtgatagaaatgaaatttgtaattgatcataccattagtgttactatcacttgacatattcattcctaaaaatcaccaagttagcaaaatcacacaaaaccagaggactcatgggaaaggtggggttagggcaaaacattcaaacttcatcagtgacacatgaaaaaagatgaccacccaataatgtcagtgctgttttccagtttggttaagaaattatacatgcggccgggcgcggtggctcacgcctgtaatcccagcactttgggagccccaggtgggcagatcacgaggtcaggagttcgagaccagcctggccaacatggtgaaacccccatctctactaaaaatacaaaaattagctgggtgtggtggtacacgcctataatcccagctacttaggaggctgaggcaggagaatcgcttgaatccggcgggtggggggcagaagttgcagtgagccgagattgtgccactgcactccagcctgggtgacagagagagactccgtctc

SEQ ID NO: 16987 - protein, 168 aa, Homo sapiens
MLYSTPKVPSSLLSHECPAPPSPDTQDSPCLWVRELCCWGQRCQCCQHRAHPHRQLAGTTFSTVFPQGSCFAEAPHTEGTRAIWAMLVAAFWAPGLCPQAPVEGTLGQVLVGPQQRTRWARAGAQNGLSAELSESPGLLRDTKISRLTWLSPGCWETHSADHTEGQGS

SEQ ID NO: 16988 - DNA, 2211 bp, Homo sapiens
aacatgctgttaatacttgtaagactcctagcaaactgcatttaattttttaaattagttttagtgtacataaaggcatgtcttttccaaatactgtactttttgaagtgttctttgttgttcattaatctttgtgcgtttccctccagtctctaatagtaggttgtagcatgatttgcttccatcgtgtgaattctgttcggttttgattttcaagtatgagagtgagcgtaagctacccttataggttacctaaggtaagttagaattagaacgtctttatgctagggttactactccccaccataaccaaccatctgcaaaagcgttcagaaagaacatgctagcaaggtcaaaagcttcaaatcacgaaataagaacttgaaaacgagcaaaattgctgctgaggcgctctgccatttaactcaaaggcttcactttatttaggtttaaagtatgagtgcatattcagtggacattgagctccgaactgttcaaaatctctattcatctgcattctggagtagagctgcgggtcacattattagctccatctttggatttctgcctggacccagggcactcctaaccgttgtgggatcatataacaatcttacaggatgaattttctgttagtccaagcagaaattttggcacatgaaaactatcttaccataaacaaacaaaaaaagtacaaatggtaatctaaggaaaatagctaaaatcattaaacaactcttacagccgtttcccctgttttctctccattttttaaaagcatattttcctttactttcttccttctgctatgggaatttttcagggttctagaccttttttctcttctgcggctggaaagttaaacacaggtcattttttaaataagactgctagtaaataccttcttaataaacaacaccaaatgctagtcttgtgggtgagtagttgaacagcaagtaaagcactctatcacctgtaattttcctgtggtaggcacaccccatctctaccttcacgtaatttctgattatgcctccataccttacacatataattcatttgtgggtgggggcgacagagtcttttgctcttttgcccaggctggagtgcagtggcgtgatctctgctcactgcaacctccacctcccggcttcaagcagttctgcctcagcctcccgggtggctgggatcacaggagcgcaccaccaccccctgctaatttttgtatttttggtagagatggggtttcccctgttggctaggctggcctcaaactccgatctcaagtgatccacccgcctcggcctcccaaagtgttgggattacaggcatgagccaccacgtctggctataattcacttcttgtgtgtgacttcctactaatttgtaatcatgaaagttgggcacatacccagtatgctcactatttctctgcagggcctgatacagtggctgctacaacactgatactctgcatttgttgaatgagtaatttaaattttaaattatcatctagaatcatttagagatttatttagactttgataaatttagataacccacacacagtttattcctagagttcttgatacattgttacagtaagtttggtcctggcaacagcaataacacttactgtaataacttaattcttcatacgaggttgcttcacttttattattaagcagaaaatacccaaagtaaaattgagctatttgggactcctttcagaatactgtgtaggctgaagcattgttgtatcagaagtgctctgttatttgaatgcataaggtattcaacaaacaaatgcttattaaattaaatggtattcagcatacagctactgtcaccgtgctaggagttcacatttttcatatgcgtggcagttagcactggtgcatgtttccttcagcctcagaaatggaggtgtctgcgtgttgcccagatctaccttgaaaactctagttgcttcctaacacctaggttgtatagtgggacttgattatgttttataaagccaagtctggtctgtgaggactgaaaggatttcctcatcttaactctaatttggcctgcaatgtctggggaaaacccaaaactaaaatgtaactaaatgtggaactgtttttttctgcagtttgatttccttgtaccattttcagtacagttaaattcatcacctcccctacctcaccatccccctccccctgc

SEQ ID NO: 16989 - DNA, 2406 bp, Homo sapiens
  CDS (259)..(1125)
gctgtttccctgtgggtcgggttggactgacttttgacagtcagccttcggctgcggagggggctcggcggcggccggcggagaaagttgctccgagaagaggctgggtcgagctgggccgagccgggcgcgcagggcgggcgtcgcgggcgtcccgggcggacgcggcgcggagactgccggcgcgtcccgggggttccgatttgaagaccttgcttctcatcacccactggattatgccccaggctttcctacccaatgatcctcttgcaacacgccgtgcttcctccacctaagcagccctcaccctcgcctcctatgtcagtggccaccaggtctacaggaaccttgcagcttccaccacagaagccttttgggcaggaggcttccttgcctcttgcaggggaagaagagttatcgaagggaggggagcaagactgtgccctggaggagctatgtaagcccctgtactgcaaactctgcaatgtcaccttgaactctgcacagcaagcccaggctcattatcagggtaaaaatcatggtaagaaactccgaaattactatgcagcaaatagctgtcctcctcctgctagaatgagcaatgtggtcgagcctgcagctactccagttgttccagtccctccgcagatgggctcctttaagccaggaggccgagtgatcctggccacggagaatgattactgtaagctctgtgatgcctccttcagttccccagctgtggctcaggctcactatcaagggaagaatcatgccaagaggctgcggctggcggaagctcagagtaactcattctcggaatcctcagagctgggtcaacggcgggccaggaaagaagggaatgagtttaagatgatgcctaacaggagaaatatgtatacagtacagaataattcagcaggtccttacttcaatccccgctctcggcagagaattccacgtgatctggccatgtgtgttactccaagtggccagttttactgctcaatgtgtaatgttggagctggcgaagagatggaattccggcagcatttagagagcaagcaacataagagcaaggtgtctgaacagcggtacaggaatgagatggagaatctgggatatgtatagtgattatcatattaagatagagcagcttttcctgcctgttgtttgccttttgtcaacttgccctgctttgtggtctttttgatatgagtacattcctctgcttaatgttaatacgtgtaacccacagtggtaccatgagatgtcaaaacctgggggcccgggggcggggcggggggaggtgggtgtgaagaacgtgcttcttaggtcataacgcttttgcagggtcaatggtgttgagccgctcatagcatgtgacctacctaccccatcagaaataactttttatcttgctcaagttctggtcaactagtagcctgacggcttagaactttgactatttaaaagtttcattttcttttgcaattttagttttatgtactgttaaagaattgtactgaattctttttagatcacagtaaaaataggttggcagagatttcagtttcccagggcttaaccagaaccgccacctcaatgcattgtcagtagaatacattattagaaactgttaaggtctttcccgggacatttttttctgccattttcttttgcaattgtagttttatgtactgttaaagaattgtattgaattctttttagatctaagtaaaaataggtcagcagagatttcagtttcccagggcttaaccagaaccgccacctcaatgcattgtcagtaggatacattattagaaactgttagggtctttcccaggacatttttttttctgtatcatgtctccccatcattgaagcgcaagttttcttgaattcaaatactcccaatgagcttgtatacttccaaacagctaaacttgatttccagttgtggatttcacacatataattgccgccttcttccctcctcttttttcccccctagttgaatcagcttgtctaacaagcccattttcatgccccagctgtgctgtgggttttccaagcctcatatttgaatattcaatgagtttaagatggatatgatttcaaaaaatagggccgggcgcggtggctcacgcctgtaatcccagcactttgggaggccgaagcaggcggatcacgaggtcaggaggtcgagatcatcctggctaacacagtgataccccatctctactaaaaatacaaaacattagccgggcgtggtggtgggtgcctgtagtcccagctactctggaggctgaggcaggagaatggcgtgaacccgggaggcggagcttgcaatgagccgagatcgcgccactgcactccagcctgggtgacagagcgagactccgtctc

SEQ ID NO: 16990 - protein, 289 aa, Homo sapiens
MILLQHAVLPPPKQPSPSPPMSVATRSTGTLQLPPQKPFGQEASLPLAGEEELSKGGEQDCALEELCKPLYCKLCNVTLNSAQQAQAHYQGKNHGKKLRNYYAANSCPPPARMSNVVEPAATPVVPVPPQMGSFKPGGRVILATENDYCKLCDASFSSPAVAQAHYQGKNHAKRLRLAEAQSNSFSESSELGQRRARKEGNEFKMMPNRRNMYTVQNNSAGPYFNPRSRQRIPRDLAMCVTPSGQFYCSMCNVGAGEEMEFRQHLESKQHKSKVSEQRYRNEMENLGYV

SEQ ID NO: 16991 - DNA, 1705 bp, Homo sapiens
ttccacctgacagcaatcgagtgaactacgtctactgcaggctccaaaaagtcaggttagaacccagatgagtctgatttcacagcctgagcacctaatgtcactctgacactctgcccgccacggccctatgttgttcctggcctggccagaacctgctcatgatggcctcacatcttgcttatggaccatcctagcagtttctcatctgcgagtgactggattcatcctgcagtcagcatcctgctcacccactcctgagtggccacctaccacaagtgggaggaagtacagctcctcgtttggctccttgggcctcccagatctgtcctgactttccatcctaatcactcccagttgtcctgactgtactgtctccacagccttcccatggtgccgaagtcagagctgactttgtacagcctttgctcataccctgttctgatccttccctctgacgtcctccactgcaacccagcccagttccaacttacttgcatagagctcccataagcattcagcccatagaacccggacatctctcccttcctctggacttaactgcattgatctctttcagttatctatactctgcataaacttccttgtggcatactttacactggtgttttgtttaactgaggtactgtggataacaccaaaaccttcttgcataggtgtggaaaaggccttttgtgagctggtccctgtctggctttacatagaacaggctacttaacttcgctaaacttcagtttcctcatctgtaaaatggggaagaataatagtatctaccacatagggttgttttgaggattaagtgtacttaacttagtgcctggtatgtagtaatgctcagtaaaatatattgtgttgtcatttcccaccatttcttcccacctgcccctgtatttgttactccagtcatgttgagctacagctctctaatccctctgcctggagattcctcctctgaccattaacccatttatgccggaagttgcaagttttttttttgtgaaaactcagaccttggcgatgaccgtgagcgtcggatataaataattccaccaagcttaatttttttttttattttgagactgggtctcactgttgccaaggctggagtgtattggcgcgctcacggctcactgcagctttgacctcccaggctcgtgtgatcctcccctgtcagcctccctagtagctgcgcctacgggcatgtgccaccatgcctggctaatttttgtattattttatagagacagagtctccctaggttgcccaggttggtcttgaactcctgggctcaagtgatccgccttcctcggcctcccacagtgctgggattacaggcataagccattgcacccagcctaaaatgcaaactaatttaacattgagtcacatttaggctgggcgtggtggctcacacctgtggtcccagcactttgggaggccaaggcaggcggatcacgaggtcaggagatcgagaccatcctggctaacacggtgaaaccttccctccgtctctactaaaaatacaaaaaaatagctggacatggtggtgcgcgcctgtggtcccagctaccccagaggctgaggctggagaacggcgtgaacctgggagacagagtgtgcagtgagccaggatcgtgccactgcactccagcctgggcgacagagcaagactcagtctcaaaag

SEQ ID NO: 16992 - DNA, 1774 bp, Homo sapiens
tagaaccagactagagaatatgatgcaggttcactggctttatggtctttctaatgctccctgccctgcatccacgccatggaagaaccagacaaggggaactgggagcctggaaaccagacacacttacccagggccaaggccactgccgccctctgataggggcagacagaacagaaagagaaatcccatctgtgatgtttgcaggagagtaactgagttgagaaatggtccgtgagtggctgtcacctgccaatcaggcctttagtccactttcaggggggaagagaaggaaggtgggatggtaataggtccagagcgtttatgtaaagaccctttctcgtggaaagaaaatgtgtgagaggtaagaatccccctttcacatttaagaaagttgccaagaatttaataagcactcactttgtgtatcagtgctcttcatgcattcattcaataaatcaccaactatctattgatcacctgttttgtacccggttctcttctcaggctcttgggttcaaaacagaaagagattccttctctcatggaacttacatttttggactgaggagagacagacagtaagcaataatcatgataagtaaggaaatcatagactatgctagaaagcggtcattgttatagaaaaacaatagtaaccttagactcgagggaagtggaggagtgagccatggggctttctggggaaagagcattccaggcagagcgacagctggtgcaaagaccctaaggcaggagcgtgcctgaggggtgtgagaaaagcgaggagtccgatgtgtgcagcagaaaaggccatgcattctggagatgtgggagccagatggaaaagagccttatgggccacggtcaagacctcatgcctttcagagtgatgtgttatgtggttcacaccccgtagcaactctgtgatagttgttgttcttattatccctttctttacgtgaatgcactgagatacattgccaaaagccccctttattttacagctgagaaaattcatacccagagtagggaagcaacttgcccaaggccacagagtgggaaaaatggcacggagctagggttcgggttccctgattcttggtccagaaccctttctctcatgtctctgctccagaaatgaacttcttttgaaggaggtgactctgggcctctcttgaagattcagattagatcctggagctcttaacactgtgctttgctgcccagatcttctatgttaactacagtatttccttcctaggaagaggtttaacatggaaaacctgagaaaggctaacacattaaacatgtatgttagtaaatcctggaggagggaaggaaggccattgactggtgacatggcggtggcatcagtcatagtaaatactgataccaactgattgcttcccatgtgcctggccctgttgtaagctggtgaagtgtgatagtttaagtattctttaccactactctaagaagtaggtactgggccaggcgcagtggctcccgcctgtaatcccagcactttgggaggccaaggcaggcggttcacctgaggtcaagagttcatgaccagcctgaccaacatggagaaaccccatctctactaaaaatacaaaagttagccggacgtggcggcacatgcctgtaattccagctactcgggaggctgaggcaggagaatcacttgaacctgggaggcggaggttgtggtgagccgagatcacgccactgtactccagcctgggcaacaagagtgaaactctgtctc

SEQ ID NO: 16993 - DNA, 1797 bp, Homo sapiens
gaatgtgagtatagaagacgagtccaggcaccaggagcataatagcggtcagagaaccaagtccaggaccccaggcagattagctagagttcaggcagggtgtcagcgccagtggggaagaaagaaaccaaggagctggaataccgtctgtaagttgagacagaaggatagccatatggcctggaaaaagatgacaagtttgaggaaatagtttgcatgtcagagggaacactcgagggaccctggccagagggagggatatatccagacaccccatgtctgagtcaggataggctcaaaggttgcccagcactggacatcttcaaagatttttattactgtttattgcgtcaggtgaaatcaacaacagctaagaaaaaggagaaacacattacaatgtaactagtataaacagtggaaaatcactgtggtttgaagaaacaagtttaactaaagaaatctgaggtctgtgtctcctaaagagaggtgactgtggaacagtaacacagaatatcagatttcaatcttcatgtttctccttttgatgggcacacaatccaaattcgagattttaaggtcctgcacaatttcgtttcacccacgtgtccttccttattccccggcccctttcatgagacgtgctcccttcctcctccagtgccttaatgcagcttctccagcttccgcagctctttactccaatcccagccatctgggctcacttcagatcacaccttccctatggagatgacaaaatctgctctactgtaatgatgctggcaaagcttaattgttcttcacttatttcatggctgtttgttttatcttcccagctaaataaattgcagttcttttgaaagaaaggatcggctgggtatggtggctcatgcctgtaatcccagcactttgggaggccagagcaggcaagtaacttgagcccaggagtttgagaccagcctgggttgcatggtgaaaccccatctctacaaaaaatacaaaaattagccagacatggtggcgtgtacaagtagtttcagctacttggaggctgaggtgggaggatcacttgagcctgggaggcagaggctgcagtgagccgagatgtgcaactgcactccagcctgggtgacagagtgagatcctgtctcaaaaaaaaaaaaaaaaaaaaaaaaaagatcatgtcaaaagttcccttgtttcctttatatctttcacagtgctcagaaaagagctggtcaccaggtggctgctaggtaaacagaaatcgattgattgactcagcctgagtatatgtattcaaattcacatttcctgaattagcagacatggtcttgtttttaaaattgactttataagatctcgtgttttcttatatctgatggtgatgaaaatgaatagggctgggggagagagatgttcagccaagaaagtctaaaatagaaagggaatgttcagttataacaaaacaaatttttgtaattagagtgctgggttgtgctcagcatcattggagttaaatgtggagcagtggcttacacttgtaatcccagcactttgagaaactgaggtgggcggatcccttgaggtcaggagttcgaggccaccctgggcaacatggtgaaactccatctctacaaaaaatagaaaaattagccggctgtggtggcaggtgcctgtggtcccagctaaggaggctaaggtgggagaatctcttgaaccctggaggcagaggttgcagtgagctgagatcacgccactgcactccagcctgggcaacagagcgagagaccctttctc

SEQ ID NO: 16994 - DNA, 1770 bp, Homo sapiens
aacagattgctaacccacccccagattttcagattttattttatttatttatttatttttttatctgactgattttcagattttaaaaatctatccctagattttctggggtagagtttgaaaatttgtgtttctaacaagctcccagatgacgctgctgctactgcttcagggaccacatttcaagaaccattgatataactctaaaccattcttgtcttcttcctatgtattttccacatcagtcaaagtgatcttttcaaaccataaatctggtcattctactgcatagttttgaaatccattgtcttcccattgcttttaggacaagtcaaaatcctagaagtccctacacagtcccctcctagcctactcgttcagtgacatctcacactaatgctgcccctaccctcaacccactcttcgctgcaccagccaccatggtcacctttcagttcctcaaatttatcaagctccacccttccccaaggtctttccacatactgtttcttccaccaagatgttctccctacccccaagccctccctgaccacaattttgctcggttaattcctacttctcctccttgtgcaatgcgggattggttattaggatcttaacttaaatgtcactttcctaaggaagccttttctaactgcctcagccaagacagatgtctctggtttcctaactagagcctttaattatacatttgtttaatgattatttgagctacttactctactaactggtaagcatcataagagcacagaccatgtttttgtttgctcacaactgtatccctgtgccctgtacacatgaatatttggtaaatgaatgattgattctggaatatttggttgaagaccactagtggacttaggagttcttcccaaagaactgcactttgatctgaaagctcaaatttcttcagttctccttttaccagtacttacaggtgaatcgtctgcagctccatggacttttcttctcataaaccttagtatttcttatttgtagacttactaagtgtattaaggtttaataaaattcaatatggcgcattgttttagtatatataaaatcatgtgtttgagctcatattctttatttttttttcttttgagatggagtttcgctcttgttgcccaagctggagtgcaatgtcatagtctcggctcactgcaacctccacctcccgggttcaagcaactctcctgcttcagcctcccaggtggccgagattacaggcgtgcaccaccatgcccagctaattttttgtatttttagcctggccaacatggtgaaacgacatctctataaaaatacaaaattagctgagcttgatggcgggcgcctgtaatcccagctactcgggaggttgaggcaggacaaattgcttggatacgggaggcagaggttgcagtaagccgagatcacaccactgcactccagcctgggcaacagagtaagactctgtctcaaaaaaaaatcgtaaaataaaataaatagataccttccttatttctaactccacgcgtccactcatccactggaggccatactttatgactatggccaccattttgagtttttgtaacattgagatatttggaaatttcatgaactctaccttctagaagattttcccacagaacagcatttaagagtccccactcagtcctcaagcatacgtcaatttttggctcaccatactcagacttgagtgccaaagcccacaggcctacacttctgtctttgaacatgctc

SEQ ID NO: 16995 - DNA, 1840 bp, Homo sapiens
gaatgaaggtgtcagaacgaatgagattgtcctatgaaagaagaggcaggagccagggaggaggatcccacccggccggggctcagccaggaggcagggccattggggcagggtggcagtccaaggaaccgctctgggaaggtttgcaaaggtcggggtcccccctgccaggtgatcgaattatcgtggagtgtctggaaggcgggggaagttttgttgagttcaccaaataactcagaccaactggaaaccaagtggagtttctacaggaccaactagaatagggatcagctacatgggggcggggggaggggggcagggaacggtgtctgtcttcattgcagctctgtctgcagagccagcactgtgatacctcatagtaggtgctcagtgaatgtctgtgaagtgaattactatctagacaaggatgagactggtatgactctccaaagctttcccacctccaaaacctcggcttgtggggaatctccagtagggggcactgtggacacggttcgcatctgcctcccaaggctgggctccgcgtcaaaaaaaaaaaaaaaaaatgagactgagccaggtgcagtggtcactcctgttatctcagcactttgcgtggccaaggcgggaggatgtcttgaggccaggagttcaagactaggctgggcaacatagcaagaccccatctctacaaaaaaatttttaaattagccagaggtggtggcatgcacccgtagtcccagctgctcgggaggctgaggcagaagattgctcgagcccaggagttcaaggctgcagtgagctctgattgtgccactgcactccagcctgagtgacagagcaaaacctggtttcctaagggggggataaaagagggagagatgagatcggggtgtcccgcttctgtgcatgtggagggggtaactgggaaccgtgtactgtaggggatcgcacaccttggggtggaaacagcagctctccggagttgcatgggagccatgggcagtggtcctggctggtgaaatgattctagccacgtggcccacccagggggcaaaacaatagaaaccttcagaaatgaaacgtcacctggctgcaagaagatagtcccacaggcgccctagagatggggatgccaagtggcttctcgggaagctgtaagaatccacagggcattgtaagatggagggaaatattaagttttcttcgtaaagaggtgaggggggcgagagcagcaaaggacactggaaaatgagaagcatggatgggaagtgttgcattgagcataatttggaggtaaaatctccaacaccgtaactgagtggcctggggacctgatagaaagccttgctcaggactaaggcagagttcccagttatatcgcagatacaaagagaccaggaacacgcttgtaatcacagcacttagggaggctgaggcgggtggatgacctgaggtcaggagttcgagaccagcctagccaacatggtgaaacccccatctctactaaaaatacaaaaattagccaggcgtggtggcacatgcctgtaatcccagctactcaggaggctgaggtgggagaatcgcttgagcccgggaggcaggggttgcagcgagctgagatcgtaccactgcactccagcctgggcaacagagtgagaccctgtctcaaaaagaaaaaaaaaaaagagagaaatcaggaacatcatgaaagatacagcaaaatgttttaccccagcccactgcaccacacctgggattgtgacaattaacttgataaattgatgtaaacttgattattttattgctaatttaaaaataaaaatgactttgtattgat

SEQ ID NO: 16996 - DNA, 1607 bp, Homo sapiens
tggattaagaatcaggagaggtggggctgggcgcagtggcttacgcctgtaatcccagcactttgggaggccgaggcgggtggatcacgaggtcaggagttcgagaccatcctggccaacatggtgaaaccctgtctctactaaaattagaaaaaaaatagccgggcattgtggtgggcgcccgtagtcccagccgctcgggaggctgaggcaggggaatcactggaacccgggaggcggaggttgcagtgagctgagattgcgccactgcactccagcctggcgacagagcgagactctgtctcaaaaaaaaaaaaaaaaaaaaaaaaaaaatcaggagaggtggggtgtgttttatgactttaggcaaatcaacctaagagacagttttctcttctgcagagttttaggaaagtcacaaattaatgtacttgaagaaagtgtacaatagaatagtagtattaccaaatcctaaagttcttattgtggaaaatctctgaaatattacctgcctatgtagatgccaacccttcagcaatccagacaagcttattatcttttctggatgaattaagtgtccacagttttgtacctcttcaatgtgattactttgtaggctagactgcagactgttaattgactactttctggtaccctctagctattgtcttgagacagtaaaataattactgctctctagctacatccttagcattttcctgttctgaaatgaaatcattttcttatgttaaaaataaagttaattactgttcaactcccaaggtgatattcagctgccacctcttacaaccctctcttcttaatctgtgtaactattctacagcccaggaatagcctgagtttattaaagtcacccacacagatctggctcttttcaatcaagctgccctcagagtgccagctgatgatactcccaaggagactcacaagcccactgctgcctgcagttcagacagagtccatgctattttaactgcactcttggcactattagcactgacacaatgactccttaaattacgaattacaacaggccattctattccgtctgtgcttctaatgctgtcaccatgtgattttcccccagaagagatatttcccaggtaggggtatgcttaacatgcagttacggaactgagagttaatgtcagaagaaagcttttgcagtgtagccacagaatagttacaggctacattgctcagcatgcacaaataaaagcttaaaagaacgtgttaaaggaaagatttccctgtctttttagcctcctacgaacattaagaagaaaaatgttgcgaggcacagtggcttacgcctgtaatcctagcactctgggaggctgaggtgtccaagaggatcacctgaggtcaggagtttgagaccagcctggccaacatggtgaaaccccatctctactaaaaatacaaaatttgcctagcgtggtggtgggcacctgtaatcccagctacttgggaggctgaggcaggagaattgcttgaatgcgggaagtacaggttgcagtgagcagagatcacgccacttcactccactccagcctgagtgaaatagcgaaactccatctcaaaag

SEQ ID NO: 16997 - DNA, 2291 bp, Homo sapiens
gaaagtgtccttgcaaactttgttccgagtgtaatttcctagggatcctatggcctcttgagaacagcattttagggacatggatcactgctctctatagaggtagctcaactcaagagcattttacatgtaggctccagacagcaaacatgtcaacacactgacctctctgctccaggtgactgtttgctacactggggattgcacaagtcagagacttcaatgcaactggctttgtgatgggtggcaggtgtgatgtgggtcagaggtgagaggacagacagaatggctgcatggaaaagcgagcatttgctattctacagaattccataatgcactggttaatgacactaaaaggagaaataatttcacaaaatgtatccctggtcctgacaccacgtggggcgtgttttaacaaagtgagttaattggggttgcaaatagatcaagagcataaaacatctctgactcaaatgtatttttagttaataagaaagaagaggggcccagcacgggggttcatgcctgtaatcccagcactttgggaggcccaggctggtggatcatctgatttcaggagttcaagaccagcctggccaacatggtgaaaccccgtctctactaaaaatacaaaaaaaaaaattagccgggcatggtggcgggtgcctgtaatcccagctacttgggaggctgaggcaggagaatcgcttgaacctgggaggccaaggttgcagtgagctgagatcgctccattgtactccagcctgggcgacaagagcgaaactccatctgggaaaaaaaaaaaaaaaaaaaccaagaaagaagaaaacttccttttgattatgcaattttagttcccattacatgttcttggctgctgattagaaatttaaattctagaattaaaaaattctagaagtaggagtttccagagctgattaatttaacagctcaagagtatctggggaagcttctctgtaagtctcttagcctttccctcatgactgcaagatggctgccacagctctgcctatcacatccgcacatgcaacatccaaaggcaggaaggaagcacactcacatatcttcctctcatcagagaaaacaatctttcccagcagccctctgtcaggcttccccttgtgtttcattggcttagaaatgggtctcatactcctcccaaaaatcaacactcagaggagactggtgttagcatgatcgcttgagaatagggtcagcaaagttcttctgaagaggaccagccagtaaatatttcaggctttgcagggcatggggtccatgtcacatctagtcagctctgctcttgtagagccaaagcagctagagacactggaaacaaatacatatgcctgtgttccaatgtcactgtggacactgaaatttgaatttcatatattttttacctcttacaaagcattttttttggttctttttccagcgaattaaaagtgtaaaaagcattttgtatggtatgaggccatacaaacacaggtggtaggccagatttggttagcaggctgtagtttgtcgatccctggtttagagcaatgaggactcatccccttggggctgtgggaagggaccaccttccctgaaacatcaccactcacacctgaaaaaaagaagggtgagggaagtgttgttaggcaactgagaatgtctcctacagcatattaaggttatggaaaaacgctgagggttatgataatttttaaaaagcaaattacatgtcaatatgggcaggatgatcccaaccaattctgcttgttgaaatccctgccattcactgaaatctatgttagacgcagccacccgagagcacctgtttctgattcctggttctcagaagccaaattggagcatcccttcctatccatgacaaacttccctttagcacctatcctgtgctggatgctgtcaacccaaactaactgctggaaatgcagaagtgaaagagccaatggctagcctcaaagaaatcactgtcgccgggcgcggtggctcacgcctctaatccccagcactttgggaggccaaggcaggtggatcacaaggtcaggagatcgagaccatcctggctaacacagtgaaaccccgtctctactaaaagtgcaaaaaaaattagccaggtgtggtggcgggtgcctgtagtcccagctacttgggaggctgaggcaggagaatggcgtgcacccaggaggcagagcttacagtgagctgagatcgcgccactgcactccagcctgggtgacagagtgagactcaatctc

SEQ ID NO: 16998 - DNA, 1826 bp, Homo sapiens
  CDS (60)..(1826)
ggtaggactgcggacgtatttgttttcttcaagcatttggtcgagattaagaattaaaaatgtcatccaaacaagaaataatgagtgaccagcggtttagacgggttgcaaaggacccgagattttgggaaatgccagaaaaggatcgaaaagtcaaaattgacaagagatttcgagccatgtttcatgacaagaagttcaagttgaactatgccgtggataaaagagggcgccccattagccatagcactacagaggatttgaagcgtttttacgacctttcagattctgattccaatctctctggtgaagatagcaaagcattgagtcaaaagaaaataaagaagaaaaaaacccagactaaaaaagaaatcgattcaaaaaatctagttgagaaaaagaaagaaaccaagaaggctaatcacaagggttctgaaaataaaactgatttagataattctataggaattaaaaaaatgaaaacctcatgtaaatttaagatagattcaaacataagtccgaagaaggatagcaaagaatttacacaaaaaaataagaaagagaaaaaaaacattgttcaacatactacagactcttctctcgaagaaaaacaaaggacattagactcaggcacctctgaaattgtgaaaactcccagaatcgagtgttctaagacaagaagagaaatgcaatcagtggttcaactcataatgacaagagacagtgatggttatgaaaactcaacagatggtgaaatgtgtgacaaagatgctctggaggaagattcagaaagcgttagtgaaataggaagtgatgaggaatctgaaaatgaaattacaagtgttggtagagcttcaggtgatgacgatggaagtgaagatgatgaagaggaggatgaagatgaagaggaggatgaagatgaggatagtgaggatgatgataaaagtgacagtggccctgatcttgcaaggggtaaaggaaatatagaaactagttctgaagatgaagatgatacggcagatttgtttccagaagaatctggttttgagcatgcttggagagaattagataaagatgctcctcgtgctgatgagattacacgtcgattagcagtttgtaacatggactgggatagattaaaggcaaaagatttgctggctctgttcaattcatttaaacccaaaggaggtgtaatattttccgtcaagatatatccttcagaatttggaaaggagaggatgaaggaagagcaagttcaaggaccagtagagctattaagtattcctgaagatgccccagaaaaagactggacgtctagagaaaaattgagagattatcaattcaaacgactgaagtactattatgcagtagtagactgtgattctccggaaacagctagtaaaatttatgaggattgtgatggcctggaatttgaaagtagttgttctttcatagatctaaggtttataccagatgatattacttttgatgatgagcctaaggatgtagcctcagaagtgaatttaacagcatataaaccaaaatatttcacttctgctgcaatgggaacatcaacggtggaaatcacttgggatgagtctgatcatgaaagaattacaatgctcaacaggaagtttaaaaaggaagagcttttggacatggattttcaagcctacttagcttcctctagtgaagatgaagaggagacagaagaggagctacaaggtgatgatggagtcaatgtagaagaagatgggaaaacaaagaaaagtcagaaggatgatgaagaacaaattgctaaatacaggcagctcttgcaggttatt

SEQ ID NO: 16999 - protein, 589 aa, Homo sapiens
MSSKQEIMSDQRFRRVAKDPRFWEMPEKDRKVKIDKRFRAMFHDKKFKLNYAVDKRGRPISHSTTEDLKRFYDLSDSDSNLSGEDSKALSQKKIKKKKTQTKKEIDSKNLVEKKKETKKANHKGSENKTDLDNSIGIKKMKTSCKFKIDSNISPKKDSKEFTQKNKKEKKNIVQHTTDSSLEEKQRTLDSGTSEIVKTPRIECSKTRREMQSVVQLIMTRDSDGYENSTDGEMCDKDALEEDSESVSEIGSDEESENEITSVGRASGDDDGSEDDEEEDEDEEEDEDEDSEDDDKSDSGPDLARGKGNIETSSEDEDDTADLFPEESGFEHAWRELDKDAPRADEITRRLAVCNMDWDRLKAKDLLALFNSFKPKGGVIFSVKIYPSEFGKERMKEEQVQGPVELLSIPEDAPEKDWTSREKLRDYQFKRLKYYYAVVDCDSPETASKIYEDCDGLEFESSCSFIDLRFIPDDITFDDEPKDVASEVNLTAYKPKYFTSAAMGTSTVEITWDESDHERITMLNRKFKKEELLDMDFQAYLASSSEDEEETEEELQGDDGVNVEEDGKTKKSQKDDEEQIAKYRQLLQVI

SEQ ID NO: 17000 - DNA, 1872 bp, Homo sapiens
gctggtgggctccaggtgcagagagcagggtgggcgtcagaccccaggtccactgtgcacgccctcttgtagagcccgttccgttgtccatgagatgaggagtgttcttatctctaaagtattatcatgaaaacctaacaatgtagaaagactaaagcacatgggtggtgcttcataaatagtatttctcccactttctgaaaactcctgctgaagtaactgcacaagaatccttgaacatttagaattctggttttagccataccataaagtcagtagtgcgtggtggaattctgctaacgaaaattgcgaaggatcaaggcagagtacagagctggtgtgtagcgggtaccttctgtctgctggcactaggtattttacacattaaatcagctcgttctcacatcagctcttttaaaaataaggaaatgaggagccacagtggcccaactgatgcagtggcagaagtagaatttgagcttgtgcagatgtgcctccgtgttttgtctcctgagcatgctgccccaagtttgacaataccaagatttgtactggaacattccctcccatccccaccccctagaagcccctcttcctcccttagatttgacacatagtttgaaaccactattaactaccttatgagagccactgtttgtgaagtgctgactatgtgccaggtcccgtgccgtgcaatttttgtgaattatctcgtgtctacagtgcctcacaatttctctgctcaatacctccatgttactgccgaggaaagggaagctcagagagagtaagtaatttgctcgagttaaagagctggccaggacagccaggggcttgcaccccggagccttcatccactacactgtcagctggtatctcaaccagccattacaggctgtaaaaaaattatataagatagtctatggtaatgcagaaaagtgaggttattttgctccctttccctttgaagaaaaaagccctggaaagacatatcacttgagtatgggaaaaaatgaagctgtggcttttctgtgagtcaattctttcctggcagcttcttggaataagaccaagtatagcagcagagttttctgttttaatttgagctgcagggtgactttttttcttctatgctttcatctctctgtggcttcttttgcctcgttaatttcatgccctgcccaggcgggctactgtgctgcccagtcacccgggtctggggcggccaccgctggccagcaggcaggccctccagaggcagaggtggccacgcttaggtcgctcccactgtgggggcggcacacttgggtggcagcacagctgtgatgtggcggcagctggcagccccatgggaaagatgtgtgaagtgtggggtttgacgacccatgggagaacagactttcttcctcttcttgttttcccttcaaagccgtgagtcaacctcaaattctctgtcttttttctccaccccctcgtgcctctctccctcacactctgcatctctcattgcaagcttgcatttttttgcacacaacactatcctaatatttctcttttctgcaggcaggaaatgagaagtcatttttcagggtccttcaggaagtcatccagagttataatggcccattatctaatggtcagagtttacttaggctttcactacttccactgcccacttgaaacagggaaaaatattttccccccgcgctgtgagtgtgctatttagagctgaccacaagcggggggaagagaggatggctcggatgctgcatttccactgagaacacaaggctggcaaagcttgtctgctgcccagcaagcacttcaggctcacaccattttaggttcactttaagtagtttctcaattgtt

SEQ ID NO: 17001 - DNA, 1803 bp, Homo sapiens
tttttataaaaaccctagaagaaaacccaggaaatactattctggacataggccttggcaaagatttcctgacacagactccaaaagcagttgcaatgaaaacaaaaattgacaagtgggatctaattaaattaaagagcctctgcatagcaaaagaaacaatcaacagtataagcagacagcctacagaaagagtgaaaatattcagaaactatgcatctgacaaagatctaatatccagaatctataaggaacttaaacagatcaacaagcaacaaacaaccccattaaaaaatgggcaaaggacatgaacagatacttctcaaagaagacatacactttgccaacaattgtatgaaaaagtgctcaacatcactaatcattagagaaatgcaaatcaaaaccacaatgaaataccgtctcacaccagtcagaatgactacaattaaaaagtcaataaataaggctgggcatggtggctcatacctgtaatcccagcactttgagaggtcaaggcaggtacatcacctgaggtcaggagtttgagaccagcctggccaaaatggtgaaaccctgtctctacttaaaatacaaaaaagtacccggatgtggtggtgggtgcctgtaattccagctacttgggaggctgaggcacaagaatcgcttgaacccaggagttggaggttgacctgagatcacaccactgcactccagcttgggcaacagagtgagactccgtctccaaaaaaaataaataaaaataacaaatctacaaacctttagcttgactgacaaagaaaaaaagaagaaatgtgaataactagaatcagcaatagaagtggagacattactatcaaccttacagaaatgaaatgtaagagaagaaatgaaatgtaagagaaaaaacgatgaacaccaacaaattagataacctagatgaaagacaacttcctagaaacacacaaattatcaaaactgactcaagatgaaatagaaaatacgaacaagcctataatatgtaaatagattaaatcagtaatttaaaacctcccagcaaaaaaaacatctcaaactacaggactttcttattgaagtctacaaaacgcttaaagaataatgaacactggccaggcacggtggcttatgcctgtaatcccagcactttgggaggcggaggcaggcggatcacctgaggttgtgagtttgagaccagcctgaccaacatggagaaaccctatctctactaaaaatacaaaaaaaattagccaggcatggtggcgcatgcttgtaatcccagctcctgggaggctaaggcaggagaattgcttgaatccgggaggcggaggttgcagtgagctgagatcgcgccattgcactccaggctgggcaacaagagcaaaactctgtctaaaaaaaaatgaaaagaataatgaacaccaaacctcctttttaaaaaagttttcttccctaaaaaggaacactttttaactcattctatggagcaattattacatgtataccaaagctacctaaagacaccacaagaaaaaaaaaaagcaatatttccatatgactgtaaatgtaaaaaattctcaataaaataatggcaaactcaatgtaacagaatattaaaagtattatacagtatgacaaagcaagatttattacaggaatgcaagggtagttcaacataagaaaatcagtgtaatacaccgcattaacagaatgaagagaaagaaaaccacatgattatttcagctgatataagaaaagtatttgacaaaatctaactcttttatgatt

SEQ ID NO: 17002 - DNA, 1888 bp, Homo sapiens
  CDS (9)..(1514)
ggaccaagatggcggcgccctgtgagggacaagcgtttgccgtaggggttgaaaagaattggggtgcagtagttcgctccccagaagggaccccccagaaaatccggcagctgatagatgaggggattgccccggaagagggaggcgtggacgcgaaggacacgtctgccacatcccagtcagttaatggatcaccccaagcggaacaaccttcattggaatctacaagcaaagaagccttctttagcagagtggaaacattttcttctttgaaatgggcaggtaagccctttgagctgtctccactcgtctgtgcaaaatatggctgggtcacagtggaatgtgatatgctcaagtgctctagctgtcaagcttttctctgtgccagtttacaaccagcttttgactttgacagatataagcaacgatgtgctgagctgaagaaagccttgtgtactgcccatgagaagttctgtttctggccagacagcccatccccagaccgatttgggatgttgcccctggatgagcctgctattcttattagtgaattcctagatcgttttcaaagcctttgtcacttggacctccagcttccttccctaaggccggaggacttgaaaactatgtgcttgacagaagacaagatcagtcttctcctacacttgcttgaagatgaacttgatcaccgaactgatgagagaaaaactacaatcaaattaggctcagacatccaagtccacgtcactgcctgtattctctctgtgtgtggctgggcgtgtagttcctctttggaatccatgcagctctccctgataacatgttcgcaatgtatgaggaaggtggggctctggggcttccagcagattgaatcgtccatgactgacctggatgcatcctttggcctgaccagctccccaatcccaggccttgaggggcgaccagagcgcttacctctggtgcctgaatctcctcggaggatgatgacccggagccaggatgccactttctccccaggctcagagcaggctgaaaagagccctggtcccattgtctctcgaactcggagctgggactcttccagtcctgttgaccgtcctgagccagaggctgctagccccaccaccagaactcgcccagtgacccgaagcatgggaacaggagacacccctggcctggaggtaccatctagccctctgcggaaagccaagcgagctcgcctctgctcctccagcagttcggacacatcttcccgaagcttctttgatcccacctctcagcatagagactggtgcccttgggtgaatatcacacttggcaaagaaagcagggagaatggtggaactgaaccagatgccagcgccccagcagagccaggctggaaagcagtgctgaccatcctcttggcgcacaaacagtctagccagccagctgaaacggactccatgagtctctctgagaaatcaaggaaagtattccgaatatttcggcagtgggaatctctgtgctcatgctgaagatactccagcgccttcctggagatagctggaatgagagtgactttttgaaaaattaaggctgagttcctttcggtcagctgacactaagtttttcctgttctgggttaatcataaggagccccctgccatagcaaaggcagtgagtgtcaactatctgcatctggctgagagagacccgtttcctttcagggatgtggacagggtaagggcagcaagcatggttctgttaaaggagtgtggggttaacagactagaaggaagactaaggacctgaccacccatttcagcatcttcaatgtggagcagtgttctgaggactcttctatcctaggactatgacagtgtgtattaataaaatatttgctaag

SEQ ID NO: 17003 - protein, 502 aa, Homo sapiens [sequence omitted]

SEQ ID NO: 17004 - DNA, 1801 bp, Homo sapiens
gggtagggactgtcaggcagggctatgagatagaggccctgagagtatgggatttttttgtgctgatcgggagaaacgtggagaggtggtgtgataggaggagctgggtcaccccattttattatatgtcatgaaactggcttccttctgcatgacctctaaagtaactactcccagtgctgagtagaaggacactgtaaataggacaaagaaagtcttgatgtggtgtcggaggctaatgaggacagaagaaaaagaggaaacattcacaattagtaaaagacttctggcttatcattgcaagagaaatgtttgggggccaggcacagtggctcacacctgtaatcccagcactttgggggtccaggcaggcagatcacttgagcccaggagttcaagaccagcctggacaatatggggaaaccccatgtctataaaaaatacaaaaattctcctggcatgttagcacacatctgtagtcctagctactaaggaggcttaggtaggaggatcacttgagccccagaggtcgaggcagcagtgagccatgattgcaccactgcaccccagcctgggcgatagagcaagaccctgtctatttaaaaacaaaaaaaagaaaaaaaaaagtttaggttctcagccatcccctgagctttaggctcaggaactctctgatttcaggtaccaagaaagagaaaatgggctgggcacagtggcccaagcctgtaatcccagtactttgggaggccaaggtgggtgaatcacctgaggtcaggagtttgtgaccagcctggccaacgtggtgaaaccccatctctactaaaaatacaaaaattgctgggtgtggtggcaggcacctgtaatcccagctactcaggaggctgaggcaggagaattgcttgaacccaggaggcagaggttgcagtgatccgagatcatgccactggactccatctggcctggatgacagagtgagactctgtctcaattcaaaagaaagagagagaaaaaataacaacaatcttataattcctgtgactaaaattagggggtgttcctgcattacaccatgccacctctggagcaactttctctgtcactcacaaagctttttcatatgcctgccctttccccctacttaggctccccctttagaactaaacagctctggaaaggatccttcagagcagacctagggcaggagctaggcaagacccttgatggtgacaacttatttggctatttctcgtggctatttaatacatgaatgggagctgagttccctgcttaatagcatttgtgttcatttccagcgtggtgccggttgtctgacctctagcttctcccctcttattctgtacagctgaaattctccctcctgcctaccccccagctagtcagcctccagtcctgtttagtttatcttttttctctcctaatgcctgttaagctggaaacaggattcttgctcgtcgtcatattattttaaataagaatgaaactaaagaagaggtctttgggccaggcatggtagctcacacctgtaatcccagcactttgggaggccgaggctggcagatacctgaggtcgggagttcgagaccagcctgaccaacatggagaaaccctgtctctactaaaaatacaaaattagccaggcgtggcggcgcatgcctgtaatcccagctactcgggaagcctcaggcaggagaatcgcttgaacctaggagacggaggttgcagtgagccaggatctcaccatagcactccagcctgccaacaagagcgaaactccatctcc

SEQ ID NO: 17005 - DNA, 1716 bp, Homo sapiens
tagtgatatggacagtgaagtccaggctgagttggtctcagatgggagatgagaatcttattccgaactggagtgaaggtcactcttggctgtgctttagcaaagagagtggtggcattgtgcccctgctctagagatctgtgaactctgaactcgagagggtatctggcagaaaaaatttctaagcagcaaagtgttcaagatgtggcctgattgcttctaaaagcctatgctcatttgcatgaacaaagtggaacttatatttaaaacagaagctgagcttttataaaagtttggagaatttgcagcccaaccatgtggtgaaaaagaaaaatccattttctggggaggaattcaaggctgcagaaatttgcataagaagagcctcatgttaacagccaagagagtgaggaaaatgcctctagagcatttcagagaccttcacagcagctcctcccatcacaggtatggaagcccaggaggaagaaatgcttttgtgggccagcccagggccccactgttctgtgcagccttgggacatggtgccctgcatcccagccactccagctccagctgtgactaaaaggggccaaggtacagcttgggctgctgcttcagagggtgcaagccccaagccttggtggcttccatgtggtgttaggcaggtgtgcagaagagttgaggtttaggaacctctacctagatttcagaggatgtatggaaatgcccggatgtccaggcagaagtttgctgcagaggcagagccctcatagataacctctgcgagggcagtgtggaggggaaatgtggggttggagcccacacagagtccccactggggcactgcctagtggagctatgagaagagggccaccatccaccagaccccagaattgtagatccactgacagcttgcactatgcacctgtaaaagttgcaggcagttaatgctagcctgtgaaagcagctgtggggactatatgcagagccacagaggcagagctgcccagagccttgggagcccactccttgtgtcagtgtggcctggatgtgagacgtggagtcaaagatcattttggaggtttgagatttaatgactgccctcctggattttggacttgcatggggcccatagcccctttgttttggctgatttctcctatttggaatgggagcatttacccaatgcctgtatccccattgtatcttggaaataactgacttgtttttgattttacaggctcacaggaggaagggacttggctggtctcagatgagacttgacttggacatttgagttaatgctggaatgagttaagactttagggggctattgggaaggcatgattgtgttttgaaatgtgaggacatgagatttgggaggggccagggtggaatgatatggtttggctgtgtccccccacccaaatctcatgttgaattgtgatcctgagtcttggaggtagagcctggtgggaggtgattggatcatgggggcagatttcccccttgctgttctcatgacagtgagttctcatgagatctggttaagtgtgtagcacttccccctttgcttgctctctccctctgccatgtgaagaaggtgcttgctttcccttcgcccttctgccatgactgtaagtttcttgaggcctcgcagccatgcttcctgtacagcctgcagaactgtgagttaattaaacctcttttcttcat

SEQ ID NO: 17006 - DNA, 1535 bp, Homo sapiens
acggtaatggtcttctctccttagtcctgatattgacaataaacatcaataggagaaatcaagaaaaatgaaaagcaaaagatgtctactatatacttaactacacttttcatccctattgattattgtaaataaggttaaaaaaaaaaagaggcgccaaatgtgaacaaaaccatgattgttattagtagagaacccagtctgtaaaatattttctggacaggagggaacacagggactatgccctacccactggctaccaactaaatgaggagagaccgtttcacattaccagaatccaggagcacactcagaagtaaaaggtgatattctgataatcagctgcagccatattactgaaatttgcttagttgtgatagtggctgttgttatggactgaagtgtgttcctccaatatcaatatgttgaagcccttatctccagtaccccaggatatggatatatttggagataagggctttacagaggtaatttagagtaaatgaagccattggcatgggccctaatacaatcttctgccagggtaaaagatgtaaaattctagtcccagtttcatctttatgtgactttgggtcaatctatgggagctgaaatcaatgccacaatttattgttagaaaagtcatgagaagtggactggaaatatctgaaaatctctgactgatgaaaagacagcttgtgttatcaaaaatccatctcgttaattaggtttagtgttcagttgaaaccaccttcaaaaaattttaaaactctgtctacaaaacagcatattcttatcttagctagtgagtccgtgtagataaggtgttttcaagcctcttctgtgatatactagccaagcaatggatggatcctcattcatgactaaagagacatttttggcaaagtgatctgagatgagctggtaaagttaggccgggggaccatgggatcctaacttcattattcaggaaattctgaaaaacaccaaccacagtgcaccccaagagttcatcacaacactctgagtttcctcaaatccagcacttttttttgttactgggtattggctgttgttatggggtgaattgtgttctccaaaaatgtgtatgttgaagccctaacctccagtactgcagaatgtggatatattaggagataagggctttaaagaggtaatttagagtaaatgaagccattggcatgagccctaatacaatctgaatagtgtcctaataagaagagaaaatttggggctggcaccatggctcatgcctgtaatgccagcacttcagaaggctgaggcgggtgaatcacttgagcccaggagttccagaccagcctgggcaacatggtgaaaccccgtctctacaaaaaatacaaaaatcacccaggatgacggcacacgcctgtattcccagctactcaggaggctgaggtaggagaatcacctgagcttggggaggttgaggctgcagtgagccaagatcatgccactgcactccagcctgggcacagggagtgagaccctctctc

SEQ ID NO: 17007 - DNA, 1794 bp, Homo sapiens
atttaaaacatgagcttttcttccatacttgtgatactattctagttacattacaaaaattaatcttaggtctctacctcacatatatataaaaatgaactcagaaattgatcaaagacttaaatataaaaccaaataaggccaggctcaggggctcacgcttgtaatcccagcactttggaaggctgaagcgggtagatcacctgaggccaggagttcgaaaccagcctggccaacatggtgaaaccccgtccctactaaaaatacaaaaattagctgggcgtggtggcatgtgcttgtaatcccagctacttgggagggtgaggcaggagaatcgcttgaaccaggaggtggaggttgcagtgagccaagatcaagccattgcactccagcctggtcaacaagggcgaaactccatctcaaaaaaaaaaaaaaaactaaaaattcttagaggaaaacaggccttaatttgtgtgactccttgattaggctgtggcttcttagataggtcattaaaatcgtaagcaaccaaagaaaaaaacaaatttattggacataatcaaaatttaaaatgttcacaataaaaaatttaagacttataattcaaagcacattatcaaaaaaagtgaaaatacaacccatagaaagataaaaaatattttcaagccatgtatctgataagggtctagtatccagaatatataaagcaccattacaactcaataaaaagacaaataacctgattaaaatatgtgcaaattatttaaattagatatttctctaaagaaaacatacaaatggccaataagctcataaaaagacgctcaacctcattagccattttggaaatagaaatcaaaggcacagtgagagatacaacttcataccactaagtttggagttccttagaaacttaataaaattaccatgtgacccagcaattccacccctaggtagatacccaaaagagattaaaacatatgtccacacaaaaacttgtacataaatgtttatagcagcattattcataatagccaaaaagtagaaacaacctagatttccgtcagctgatgaatggataaataaaatgtgctatatccatataatggaatataaagccataaaaaggaatgaagaggaataaagtcatgaaaagaaatgaagtactgagtcatgctacagcatggatgaaccttgaaaacattatactaagagaaagcaaccagacgaaaaaccacatcttgtattattccattcatgtgaaatgtccaggtgaggcagatctataaacacaatatagattagtggtttccagaattttgaggggaaggataatagggagtgacagctaatgggtatgggatttctttttggagtgatgaaaatattccagaactagataatggtgatgattgtacaattttgtgaatatagcaaaaaacactggattgtgtacttttaaagagtgaatattatggttatgtgaattatagctttaaaaattaaaaactaggccgggcgcagtggcttatgcctgtaatcccagcactttgggaggccgaggcgggcagatcacgaggtcaggagatcgagaccatcctggctaacacggggaagccccgtcactgctaaaaatacaaaaaattagccaggcatggtggtgggcgcctgtagtcccacctactcgggagactgaggcaggagaatggcgtgaacccgggggggcagagcctgcagtgagccgagatcgcgccactgcactccagcctgggtgacagagcgagactccgtctc

SEQ ID NO: 17008 - DNA, 2403 bp, Homo sapiens
tggcttgaggtccgtagttgagaccagcctggccaacatggtgaagcctggtctctacaaaaaataataacaaaaattagccgggtgtggtggctcgtgcctgtggtcccagctgctccggtggctgaggcgggaggatctcttgagcttaggcttttgggctatcatggcgccagtgcactccagcgtgggcaacagagcgagaccctgtctctcaaaaaagaaaaaaaaaaaaaaagaaagagaaaagaaaagaaagaaagaagtgaaggtttgtcagtcaggggagttgtaaaaccattaataaagataatccaagatggttaccaagactgttgaggacgccagagatcttgagcactttctaagtacctggcaatacactaagcgcgctcaccttttcctctggcaaaacatgatcgaaagcagaatgttttgatcatgagaaaattgcatttaatttgaatacaatttatttacaacataaaggataatgtatatatcaccaccattactggtatttgctggttatgttagatgtcattttaaaaaataacaatctgatatttaaaaaaaaatcttattttgaaaatttccaaagtaatacatgccatgcatagaccatttctggaagataccacaagaaacatgtaatgatgattgcctctgaaggtctattttcctcctctgacctgtgtgtaggttttgtttttgttttactgtgggcataaattaatttttcagttaagttttggaagcttaaataactctccaaaagtcataaagccagtaactggttgagcccaaattcaaacccagcctgtctgatacttgtcctcttcttagaaaagattacagtgatgctctcacaaaatcttgccgccttcccccaaacagagagttccaggcaggatgaatctgtgctctgatccctgaggcatttaatatgttcttattattagaagctcagatgcaaagagctctcttagcttttaatgttatgaaaaaaatcaggtcttcattagattccccaatccacctcttgatggggctagtagcctttccttaatgatagggtgtttctagagagatatatctggtcaaggtggcctggtactcctccttctccccacagcctcccagacaaggaggagtagctgccttttagtgatcatgtaccctgaatataagtgtatttaaaagaattttatacacatatatttagtgtcaatctgtatatttagtagcactaacacttctcttcattttcaatgaaaaatatagagtttataatattttcttcccacttccccatggatggtctagtcatgcctctcattttggaaagtactgtttctgaaacattaggcaatatattcccaacctggctagtttacagcaatcacctgtggatgctaattaaaacgcaaatcccactgtcacatgcattactccatttgatcataatggaaagtatgttctgtcccatttgccatagtcctcacctatccctgttgtattttatcgggtccaactcaaccatttaaggtatttgccagctcttgtatgcatttaggttttgtttctttgttttttagctcatgaaattaggtacaaagtcagagaggggtctggcatataaaacctcagcagaaataaagaggttttgttgtttggtaagaacataccttgggttggttgggcacggtggctcgtgcctgtaatcccaacactttgggaggccaaggcaggctgatcacttgaagttgggagttcaagaccagcctggccaacatggtgaaatcccgtctctactgaaaatacaaaaattaaccaggcatggtggtgtgtgcctgtagtcccaggaatcacttgaacccaggaggcggaggttgcagtgagctgagatctcaccactgcacactgcactccagcctgggcaatggaatgagattccatcccaaaaaataaaaaaataaaaaaataaagaacataccttgggttgatccacttaggaacctcagataataacatctgccacgtatagagcaattgctatgtcccaggcactctactagacacttcatacagtttagaaaatcagatgggtgtagatcaaggcaggagcaggaaccaaaaagaaaggcataaacataagaaaaaaaatggaaggggtggaaacagagtacaataacatgagtaatttgatgggggctattatgaactgagaaatgaactttgaaaagtatcttggggccaaatcatgtagactcttgagtgatgtgttaaggaatgctatgagtgctgagagggcatcagaagtccttgagagcctccagagaaaggctcttaaaaatgcagcgcaatctccagtgacagaagatactgctagaaatctgctag

SEQ ID NO: 17009 - DNA, 1954 bp, Homo sapiens
gagagtagaggggatgtaaaatcattatgtggagagctggagaacaacctgatgaaggaaatcaagtgagctgggcaaggtgtggagtccatttgagattgaagatcaataaattatcgtggtattggtctgtcctgttgtgtgaattattttttaaatgtttcccggcagctcaggtccaagtgtcaggaaagcaggtagttgtatttgtcctggatggggctttcttggatgtgacagaaagacaatgaggcaagggaatttggggaaaaaatgttcagtttttaacaaatgatggacagttaggagaactaagctggactaggaagtgaaaataggtgagtctgatagagtagaatgaactgtgcttggaagacaggtgccatgggagtaatcgggtaattaagcagcgagagtctcattagggtgagagcggaggcatctgagtgagtggatctggaggtgacggtggaggtcagcgtatggttttggcagtcgtggcactcacctctctgagggcttccctgtaggagggacataaattcaggaatcatggccaaggaaacatgctgttttactggaaacttgcagttattaataaatacattacataaaagcagtgctggagcctctatggcttagggtcagggcttaagtaagacagcctatcatctgccttctaaacttgaggtggcccagtttggaaagccgatttcctgaggtagagcagaggtgtgtgtcattgactgttacggcccccctcctgagtagggaattgggaccagtgagtattctcaggatgggtggggctgaaaagaaggggatgagtgtttgctccccagtggagacaagcagaaatctgggagggggagagtattttcatgtatgacaagatccggggtgtgacagtttgtgcacggttacccagctgcctttccctaaagacacggcctcagggcaggagccccccaagctgtggatgagctgctcagagttctgagctggggaggaaaggggcttctgggcgggcaccagcttggtctggaaggatcagaagatgaagacttgctcctctcccaccaccccacagatgccagttgccatgacaacaggtgtctttgatatgaaaaggacattttggggtcaattggcaaaacttaaatgggatctgaggaatagaaggtaaaaattggtcagtgttaatctcctgatattgattgtaggagaacataggaaatactcactgatgtcttcccaggagttagccattacactaggtatttatggtttaggaaaaaagtatgaattgcattcctttttaaggctgaatcataggtaattggatgtgtacaccatattttgtttatctgttcatccattgatgggttttgagtttacaccttgtggctattgtgaataactgctatgaacactgatgtacagattatgtttgcatttccgctttcagttcttttgggtgtatcttagaagtggaattgctgggtcataaaataattctgtgtttaatattttgaggaaccgcctgactgtcttcaacagtagctatactatttttgtttccaccatcaatgtgtaagggttccattttcttcatgtccttgccaacactgtcttttttaataatagtcatcctaatgggtataaagtggtatcttcttatgcatctcactaatgaaaacatttttttcatattttgcattagtttacatttgaaagtattgctttaaatttgtgaactatatatgagcaatgtagagaaatatttcgctttaagcaatggttgactggccaggtacaatgactcacacctgtaattccagcactttgggatgccgagttgagaggatcacttgaagccgggaatttgaggctgcagtgagctatgatcatgccggtgtacttcagtctgggcaacagagagagaccctgtctc

SEQ ID NO: 17010 - DNA, 2090 bp, Homo sapiens
tgctcaagtccctgataaaaaaataaaagcagtggtgccctcgggttcaaaaacctgaacggtggtcttcagttgttcccccaagctcctctatcagaggcccagacactccaagaggctgggaagaggcaagtggctttccctgactggcatcagactcctggatggctgtgtttctgcatactccaccatcaacaatcagaagggcactgctttcttcaagaaggggaccttgcaaagaactgtctcagatgggctatctttgagttcatcttgttctgaatgtgagtctgagtctttgtttccagatgacacagtgctgtctgagtcctctgaatcacctgcctcagagctgcagcaaagtttctgctgcccagaaactgaatgggctgcttgtaatgcagattcttctcctggacaagaagtgctgctgcttctagttcttccagttctaaccccaactgggcctttgtaagggagacttcctttaaggcttctgcaagagctgccaacgttttggatttgactttctgagtccacacacagtagtatgagatgtagagatcattcagtatgtatgctgggtcgttttcctgaaaaattttgtgaatatccaggagacactttaaaactgcacttttacttaattgcagtatctttatagtctccccgtaggccttcatcgccagtttgaaatggcgatagagcaggtaacacaatacccttcttccaaaagacaccatgatatcatgaacattagtccaagtctcaaaccagcatagtattggactcaagtttcgtgatattccatgcagattcaacgttcttgtctccttcagtgacacgggtttcttagcaatatgccagaagggtatcaatcgaactgtagtacacttgacgacaggctctgttgtctagcagataagatttattgacaaattcttgtagctgatatttctcttcttcagaaaaagacactaatgcagcatgattttcttgcttctgactcttttttccaaaaaggccgtcattttttaatatttgtcagtccaccaaggattatacttcaaaatctgttcaactgcctcatcttcaaaaaagtcagctagataatgatcaggatcaaacttggccagctcggcggccaggtgcttttgttttcgttctgctgcagggatgaaatctggatccttaataacatcactcaattcatcctgtaactgctgaaacactcctgatcgtaagtttccaaacccatagtggcatgaggattcaaagcactttctgttacctcttcatagggtgtctgctcaatttcccaatcaaactcttcatcgtcaactacttcctcaggaatttcagaatcacctattgcttccacaagtggttttgctgtcccggattttcctggtgccagaagagcaacacatgttcagcccctcaaaatgctggccaggggtttctctgggcaggcgagtggtaaaaattcctttatctgcatcataggacccttgctcgcttccgtatccgtattctacaattcttccaggaggggttaatctgagaaagtacggcttggcatagtagtctaggccgacccctcgaagtagacgttgaactcggaggccggggcatagggcacgcggatggcgatggtcaggaaatccggctcctggctgaggctgaacgccggggtcagcatcgcggcaccagacgcaggggccagcgcggctcgccctcgctgccgcggcggtcccaccaagcaactctctccaattttaccttttcaaaataaaagatgtctgggccaggcgcagtggctcacgcttgtaatcccagcactttgggaagccgaggcgggtggatcctgacctgaggtcaggagttcaagatcagccccgccgacatggcgaaactccgtctctactaaaaatacaaacatcagccggacgtggtggtgggcgcctgtaatccccactactcgggaggctgaggcaggagaatcacttgaacccgggaggcagaggttgcaatgagccgagatcatgccactgtactccagcctgggtgacagagtgagactctgtctc

SEQ ID NO: 17011 - DNA, 2214 bp, Homo sapiens
attcttatgtattcattaaactaggaccctgtaggatttattttaggtgttattgccttgacctagagttaatctgtatttttgaaggaaaatacgttgccttttttcacaagcactttataactcacttctccctaattcagattgcttttcttaatcatttgaagttaatgatacaattatcacatagtagccttacaaatagccataatattaaatcataatttatgtaaagtaaacatccaaattccaaaacatctgaacatgggaacaggctgattgaagtttttgtgggtcataagaccttggcaattgtttgtgagcctgatgccgacatttctcaacagtaatcaaagcacagaacaacaaccatccacatgaaaaataactcaaattgtcattgtacttcccatgctattgtcatttagcaagttatggcatgactgattcagccagtaagaaaaatgtgatgagaatattggctaggagtacagtctgcttagatcttttagttttttttccttcaaaagccaatagacttttactctttaaaataggagctatgcaaaaacgtaatatttggaatgccaagctgcctccatgattgagatacctgttttgaagttctcctctactgtaaattctaacagaataaaaaaagaatcaatgattcttgttacctccaatgtacctaccacactactcatgaaaaaagctttaaaaattaatgaaaattgatggactgaagttctgtctgtttcttctggtgcagatttataaaatggattctattttaggaacgatcaaattctaaaattgagaagctcaagggtagggcactggagataatatagaaagacatgtaatatataaacgattctctagatcttatatctggagttaagtaaagcagacaacaaagagggagacagcttggttgtcaggatggtggcttggacatgtgttaatatgtatcccatctcatcatgatgctatcagaagcacgggtctttaaccatctcctttttctgaattttaatatgtgaatgagtcattaaatattggcttccagttagtttctgcttgatatgtacaatcatgacagtagcatagtggtttgcacattaaaggtcaacaaatgtttgttggttgaatatacctttcctagatttagcaaaatttcaaaccataaaagtcccttatgtgcttttatattttaaatcaagtctttcatgttataaactttaaaactcaggctcatcgaagtgaagtgatttgcccaagcataccttcccacacaaggcttaacaccgactcccactttagtacaataaaaaaaaaaaagtcatgtaacattaagagcacatacctggaagtcccctaaaacataggttgttgaactctgactctgccacttcctcgctattgatgtgtgctatggtctggatatttgattcctccaaatctcatgttgaaattcgatccccaattggagatggggcttaatgggaggtgtttgagtcttgggaccagatacttcatgaatagattagtgtcctccctggcagagggagagtgagtgagttcttgctctattcattcctgggggagctcccttgagagctgattgttgaaaagagcctggcaccttcctgctctctcttgcttctgctctcgccatgggatctctgcacgccggctccctttaaccttctcccctccaccaggagtggaagcatcatgaggcctctccaaaacccaagcaaatgtcagtgccatgcgtcccgtgcaggctgcagaaccgagagccaaataaccctcttttctgtatagattacccagcctcaggtattcctttatagcaacacattgacttagacaaggtatgtagatatatacttctaaagtggcttctcccacaaaagagaaatttgcggcccagcacagtggctcacacctgtaatcctagcactttgggaggccgaggtgggtggatcaggaggtcaggagatctagaccatcctggccaacatggtgaaaccccgtctctactaaaatacaaaaaattagctgggcgtgctggcacgtgcctgtagtcccagctactcgggaggctgaggcaggggaatcacttgaacctgggagacagaggttgcagtgagctgagatcacgccacttgcactccagcctggcaacagagcaagactccgtct

SEQ ID NO: 17012 - DNA, 2162 bp, Homo sapiens
gttttgttttgttttcaatctaacatagaggcagccttttaaattgactttttttcccccagtttttagtttgacctattaaatatctagacagactttcatactccagtgttcctaaagatcaagcatgctacttgttgaggtgtcttaagttgcgtattttaaacaataaatattgggtaaaagtagtgaaacattagaagtatccttttaccaacactacaagaaaccaggacagaaatcacctcttccattttccttgccagtgaatcttggaaggttataaagttttttgcaagtacaggctgcttttccatgtttatagatatttgctataaaatagcctgcatcaaaaacatgtctattaactgtcttactgaaggcttgatagtgtatttttcaaagcaaaacagactttgaaggtgtctgtctgaagatttccggaccagagggaatgcatatgtggacaattcagagatctcagggaaagtaattgtgtaggctggcgatcaatttggcatgagggaaaggagagtgacaatcgatatctagctgggaggtgagagaagagcctcaatagtgacagctcagtcaaccaacggaggaaaaaagtaacacccaatgggaaaaggccaccaagagcaacacttacttgccctgcttgaatttcggccctgagtcacctggacacaattgaaaagttagcgaggctgggctgccagtcactgagtagtagtcccatatatatcttcagtcctcacaatgcacacatagaagacagcatattagcaccaatatctggttctcttctctttgctgggcactcagaagactaagtttaccagctaccctagcagtgagttgggccatgtgactagtcctggccagtggcccttaaactgaagtgacagctgttgaatgaggcagtgaaaatccatactacattctccagtttatcttttcctgtccatagagaaaacttcatattgagagagtggggcaggctaaatatttgagtcattccattgatatgaagattataatctttatcatccaaaccaggacgatttttggactgaaaggggtgttgttaataatttgccaggacagtaagcttgagctgaactgtcctgggaaaccaggacatagacaccctacccatggaagaaaagtgactaccctgctgctcagacccgaagttgcccagactttatgtcaataagaaattcagtaagtcagtcactgagaggttggggttgttactccagcataacctagcctatcccaactagtataatagattattctctaaaccaattactagctgaaacttggagagaggtgctttaccccttgaactttctcaaaaagagacaaagcaggtaggggccttcataaagtgttaacttgattggatggggcttccaagaagccaattttctgcccttctcacatcagcaccaaaaggtttacaattcagatagcctggatctttaaaaccataataaaaacaagtatcaacatatatagcattttttattttgtcttattgcatcctcataacatctctctgaagtaagtaggactgggaggatgtattcattttacaggtaactgaggctcaggaaatgtgatctgtcctaagttgcatagtggtgagagggcctccgctgagctccacctacgccccttagggagcacagggcctgaggttacactgaccatattatggccccaagagttgaggctgaaagaggatttggtagagcgacttttctggatgtgctgtggtttacaatatctgcttctttaagagaagctactctgaaatatcatggaacaagtgtcacaagaagcatgcaaattaaatagcaggcccagtgaagaatgtgctgttggcatccatacggctagatgggccagtactgtggattcttaaagcatctctttgccactgttccatcttcttgtccagaaaatataacactataattttatcccaaatacagccaattagattttcttgcctttcttttacacctccatcaaaaaaattagcaacagattaacaccggctacttactgtgctgctttggacattattcagatccagtgtgactgttagtttgacctctccaagctttaatgactaaacatgtgtc

SEQ ID NO: 17013 - DNA, 1714 bp, Homo sapiens
aatacattattataaaaaattacttgtcagttggacttagatccacaaaaggatattaattaaatgctaaatgtattcaatctattaggattctcaaaagtcacacttcaatttcttccagcagcaactgccaatctgaaaaagtgtttgaaaatgtaatgcttatgggtagaagcctggtaatgtgactcaatttaaattcatctggataggaaaattggcagcttttatctaaccttatagccaagatgatggaactcaggtgtgtcagggccctctagctttcggcaaaggaaaaaagtaggtcccggtacaattcaagcccacaggaaaaatacccaaaacaccataacactttgatctctgcaaggatgaaataaatgaatttggacccttttctctcagtctgccacattggtccaaattatattcaaaaacctctgttacatttgagtaaagaaattaattttttaaggggacaaacccatttattagtgaacgtagcatggaagacttagcgtgccgaaataaatgggaaactcatacaaaaagaaatgtgaacaatctgaaaaacagcctggcagttgcctgatgaaacacgccgtacactttactgcctacagaacccttccagtcctcctcccagccgccatcacaggtcccttagttggcaaggagttgtaagaaagggggagggaaatcccaggaacgtggaagtagataactctctagcaatgaagagcactcggggatcgctcgctgagtactaggcctagtgctctgggggctcacttgacaggcgccatctcggaagcgctttcctacacttctcccaccccggggcagggaggggttaggggagggcggaatccagacggggaaaggcgggccggagaggaccggccgcagggccagggacgcgggcgaagcagtgagctccggagaagagaaaagcagccccggttgggacggagaagctcggagcagatgagagaagcgacaggggagctgtggggccgacggactcgcctctgagagcggtccccgggcacactcaccgtcgggcgtcggagcagcgccatgagggacggggaaggcaagagtgccagcccggcccagggagggacgcggactgaaaagggaggacactagcgtacgaggcgccgttaggactgctctccgagcccgcagcgctggggatcttcgacgctgtagccttgttccaggattcaaataccgcgtcgcttgcgccccattgggcggccctgcgcacgggtcgctgttctcattggccaacacaagatgcactctcgcactctcattggctgaattttcttagacacgtttgattgtcacaacagccggttggggtgttttttctgcctacagtcttttaaaaaaaaaaaaaccccagtctctgagacaaacaaaaaggaactgtctcattgggaaagcagacgtaggacgcctctgaattttgacaaggcctcatctacgaatttctctcgacgtttgtagtgggtgggcggaagttggttggcctttattcctcttctggtgtgttggggtttaagttgtgttggcctgggtgcaggaaccggcccctccgggttgctcagggatgcagtgtgttaggtggttgagatgcaaaagtgtgcttaaaaaaagagagaataatggcgtttactcaaaaacccaaattctcaagtaaggc

SEQ ID NO: 17014 - DNA, 1947 bp, Homo sapiens
ataagtagatactctctgttccctcatctgtagattttttctgtgtgtgccatttagtaaggtaagattgaggtttgctctctgagaactaatgtagcatttaactctcctctaatgtggcatatagtaagaatccagtaaatcacaggtagtaatagttataatatggaaaaataggccttcgggggccatagttgagcaataccatttattactaggtaatgtatcctggatgcttctttggaaaggagtgattccttatggctggtgactcatgctctgttctcttggaagggtctttaggaagtggaaggtgtcgtgtcccatccttcacttgtctatctcacctgctttccctgcctgtatgccacctctgactttgctttcctaccacgtggcctggtcctggacatatgtggtgtttgcagcaaacagaagtctaaaaattttgaaggagggcccagccctacttctgccacttatcagacctgaattatgtggacactgctgggtttctttaaaataacttcagatctggtcttgaatggatcaagaaagattttcttaataaaacaaacaaaaacagcaatcctgtcctttatgaatttacttgttttggaaaacttaatttccacattggacaagagaaaaggtgaatcccggtaggtgagggcacaacctgggtatcactctcctctctagtgacacaagggtcaccctttgtcaccctcacctgtcaataccctcttacattttagaatttttctggcattcaaaaccttcaaattttaaaatcagaaccctgttctccagctaacacatccagattttccaacttcctgcatttttgtcttgcaggttattttatagtgcctgcttaaaacaggcaataatctattgatatcatagaaaatttagagtttgattgctctgcctatggagtagccattctttattcctttactttcttaataaacttgctttcacttaaaaaaagaaaactccaccttcatttataagtattttaagaaacaacctgttccttcattaattggacattattgactattttaaaacaaacatacagggtaatcttcccccagcaccgcccccagcagtcaccagctagcctaatcatgttttggttcttttacacggaagtattttacatgaatggcaaacttacgttggatcagatggaaaaactttactagaaggagggctgtgtccaaactcttacagcagtgtagccagtaagtgattctgtccttgcatttgccaggggcaaaagcatacatcagtgccttttacctgagcagcatgtgtcagggcacgctcttaacctctaattactttcttctaagctggtagagtagagtcatgggaagagtatggagtcaggttgggtccaatcctggctgagtgaccactgacaagttgtatatctcctctgagccttgctttcctccttggtaaagtgaggataataatgccgacttcatggacttattttccaggttaagaacaagctgccaggtccccagaaagtgcttagtggggtgcagggtctgcccctttgctgggcactctacctactgaggcactgctgcccatctggaactcagtctatcaagaataagtgaaacttgcctttctccactgacaaattctctcagcctctgtttggcttacttggaatttgtttgacagtatatctgtctggcccataaagaggggaatttagacagggttgaaatgcatcaaattaagtcctgtctccacaaagaaaacacttttgtacttctgtgaaaaggctgcagagacgtggtgactggccatgagtcagcccaggactgtggtgcagctgtggtccttaatccctgccccacaaaagatttgatttaaatgccttgtcacacttgttgaaatctgggaagtggtatcgtt

SEQ ID NO: 17015 - DNA, 2763 bp, Homo sapiens
gaacaggactcatgatatacaaaagaacaaagacaaggaatatttattgttagaaataagtgagaagacagtggaaaatctttaaagtactgaaaaaaaattgtcaacctaaaattctattcctagagaaaatctctttcaaaaacaaaggggtgaattgaaaattaaaaagctagtgttccattatgtcagcataaagtcttatgaattttgtacatacctttggtctcctctttgtttgttttcaaattacaaatattttgaaaatcctactgtctttttaagagacaatggcagccgggtgcagtggatcacttgaggccaggagttcaagaccagcctggccaacgtggtgaaaccccaactctactaagaatacaaaaaaattagctgggcgtggtggcccatgcctgtagtcccagctactcaggaggctggggcaggagaattgcttgaacccaggaggcagaggttgcagtgagccgatatccactactgcacaccagcctgggtgacagagcgagactccatcttaaaaaaaaaaaaagagagagacaatggcctctctaagcaacatgacctacatttaaatggagtcaagtggtcctctgtttccatttgtttaatttctactttgatattttgcttgcagcttcaatattactggctcgtgtggcctgcttcatgctcctggaataaattcaataaccaccaattgccccttatgttcccagcccaggattcaaactgtgcttcatgcagaatgggcactctaatggaaggatttggctccaggatagatacaaaactgtacctggtgtttgttggtgtaaagtggtagttaagaagagaacaatgacactacaaaatacaagccaaaaagggaaagtgttagcatttaacatcatagtttatggatattgggatacattgaccattgctttcttctttggtgtccttgatagttattgattctgcagaactgcaggcgtatccagcacttgtggtggagaaaatgttgaaagctttaaaattaaattccaatgaagccagattgaagtttcctagattacttcagattatagaacggtatccagaggagactttgagcctcatgacaaaagaggttggtgtctttattctacttggcggtaaggaactttacagaacttaaagatacgcttatttatattcaaacgcgttagtgtgtgcagtgcatgtattatagcttttcccagccagctgtgaattctgctacattctgaggacataggtaatttaaagctgcaaaaacgagttttcgcatttacccattttcctctgtgggtgttgataaaaacactgtgtctgaacaaggatccagagagatggagacggggtgtgtgggatggtaacgggatcttgtgtgggaaacttgttgcccctgcagatgaggctgtggccagtcacatttgctgtgcccagtgctcacctgtcatttagcccaaagggagtgagcaaggttcagcttgcatcccacctcccaggagcacagcatctgccagcagcacggtgtccagaggggtctgggagcatgagtgaggggtcagcgtatggacatgggaggaacccgcacccttccatgtgacctgccccttggccccaccaagggctgcactgccagctgcactcctgtcctttgggctctgtctgtgtgcaggagggttccactgacttcatttgcaaagtgtagggcctctgaaaggcttcgtagttgacatttatagacgtgtaactggaagatagggccaagctttgagttgaaaatgtaatagttcaaaaagggttacatggttcgttctctattagctttgcatggtgagtttttaaataatgttgatctctgggctgcggggacccagtttgacttttagggccctaaccactccttccacctttttctgcattctgaatagtagactttctcagtaggtattaaacaggttaaggtaaattcagaagtgcaacatgtatgtgtttttcttcaagataagtgagcaaataacttcattatgattttatttttttccaatataatatttatacatgataaaaacagcatttgaatttgtgaggacatgaagtattcactccacgttgtcaaaacacccagtagacacgtgcagtgaagccagtagcctctctcgtgagcttacatgagctgtgtggactgatccttcctcacacgccatgctgtcctcagctcacacgtgcactcaggaagcttgcccatactcaagcctcactctagcattgcagacacatcaggttttatcttcagaaagacaccttaaaagtatcagaggaaaatgtgaacacatttttttaaatggtcttggaatgaagagacaaaaaccagaatccatgaaggaaaatagtttgacttctatacagaaaaagaaaataccgtatacaaagttaaaaaaataaaaagccaggtgcagtggctcacgcctgtaatctcaccactttgggaggccaaggtgggcagatcacgaggtcagcagttcgagaccagcctggccaacacggtgaaaccctactaaagaaacaaaaattagccgggcgtggtggcgagcacctgtaaacccagctactcgggaggctgaggcaggaaaatcacttgaacccaggaggtggaggttgcagtgagccgaggtggcgccactgcactctagcctagacgacagagcaagactctgtctcaaaaaaaacaacaacaac

SEQ ID NO: 17016 - DNA, 2491 bp, Homo sapiens
gatgcgaatgttgtcatcagggtgggtgaggatgtactaggcactgtgctaagcattttacatatactatcttattcaagttttacagaagtctaccataaatactattaccaccccattttgtagttaagaaaactaatgataagagaggtcaggtgagtagctggtagttacatagccagtgagtggctaagcaagaattcaaatagaggctttctgaactccagggcccacacttaatctttattctgcattcctcccagggagccttcatgtgcacagcatggcactgactgcagaagtgtgcctagtattgccatagtcaaagggcacatcatgcactcagcttagaaaaagggacagttcccaaagagggggaaaaaaaaaaaaaaaaaagggacagttccttaaaaaaaaaatactttgtccccaacattccttataaaagtcaatttaatgaatttctcagactattattttagatccatcactcagtaacccttgtccatctatatccgtactcctcttcccacctccagctccagatttcctgaacttttgtttctgctgcctgttcttgtcagaaactgtgcaaccttggttctgtgggtatgtgaatgtcaggttggcagggtgcagctgtgtggttccagatgaccagaagccacaagcggttgctgcttctctcttgggattggttggggagtgaagggcagaccgacggatgccttggttgtttttgtgtgtgggtatcatggggcttcaaactgttgtgctctttgttggctggttgattttgtagctcatgctcttgaggtgctctttcaggtctctccctgttttcctctgaattccactgttttgttatctcttgttagcatacaactgaccttgtttttgaagctgtggagagtagctggtggaaatacctcttccagttgggaaaaaatggacttaaaatgtcccatgtccaggctgacctggatgatgacagttggttgatgagttaatttgaacatgagcagaaatgaggtcacttgcctgcctgactccatgtggccatgctggctccaggttgcaaagttctttgagcaagtaccttgtcttgcctaatctcgaatgtctgttctttttatttcttatctcaaataggcattgtgataacattataggtgcaaaagtatgaggtctaaaggcctctgcttccctgtactccctcagtttgtcctgagcagagggagccccaagccagatggattggatggagaacagcccataggcagtttgcagttgtgggcgcgtagctgggagcatgctcagaaactgattcttggcctcacgcctataatcccagcactttgggaggccgaggcgggtggatcacgagatcaggagatcaagaccatcctggctaacatggtgaaaccccgtctctactaaaaacacaaaaaatcagctgggcgtggtcgcgggtgcctgtagccccagctactcaggaggctgaggcaggagaatggcgtgaacccgggaggcagagcttacagtgagccgagatcgcgccactgcactccagcctgggtgacagagcaaaactccgtctcaaaaaaaagaaactctgattcttgcacctctacgctactgctttggagaaaagcaagcagctgcttgtcaggactaaacttgtaacatgcaggcctacctccattaccctgacattcattggttggcttctgtttgagagggcacagtatctttgtatgccatgattgttttcatataacgtaataacctgctgctgacttttctcaacatgtcctttctgcttatgatgttctttctccaggctgctttgggttctcttgtaaggcccgtacagcagctgtcactgagatactgcctcatgacaaacctagaactggctagtgaaaagagcttctcaagagttaatatgagctggacacagtggcttgggcctgtaaccccagctactctggaggctgaggcgggaggatcacttgaggccaggagttcaagactggcctgggcaacatagcaagatcccatctctaaaagctttttttaaaaaaattagctgggccgggcgtggtggctcacacctgtaatcccagcactttgggaggccgaggcgggtggatcacaaggtcaagagatctagaccatcctggccaacatgctgaaaccccgtctctactaaaagtacaaaaattagctgggcgtggtggcgcacacctgtagtcccagctactcgggaggctgagggaggagaattgcttgaatccacaaggcagaggttgcagtgagccgagatggcgccactacactccagcctggcaatagagcgagactccgtctcaaaaaaaaaaaaaaaaaaaaaaaaaaattagctgggactttgggagaccaaggcgagcagatcgtttgagtcccagagttcaagaccagcctgggcaacatggcgaaacgccatctc

SEQ ID NO: 17017 - DNA, 1966 bp, Homo sapiens
gtgcacaataaatgtaatgcatttgaatcatcccaaaaccatccctgcacccccggtctgtagaaaaattgtctttcatgaaacccgtccctggtgccaaaaaggttggagaccactactctaaaagataaagatggttgggcatggtggctcacacttgtggtcccagcattttgggaagctgaggagggcagatcacctgagaccagcctgggcaacatggggaaaccctgtttctacaaaaagtacaaaaattagctggacctggtaatgcacacctgtagtctcagctactgaggaggctgaggtgagaggatcccttgagactgggagcttgaggctgtagtcagctgtgagcatgtcattgcactccatcttgggcaatggagcaagaccctgtctcagaaaaaaaggattaaaaaattttagccacaatattatttatcacacctaaaaattaataatttcctaccatcaaactacttaatcaatgttcaaaaagtagaaaacacgtttgcaaaactgagcacctttttcacttaagaataagttaggtcagatatttgcctttccttggtcagctctagaccaaggggaaatgcaagatgtaactactgaaacatagtggttggcatttggtggaatatttttgtttaaaacatggaagttattttatcatgagttacttctatagttctaactaattttagttagacaatgtattataaatgcagtgtagaattttgaacctcaaagaatctcatctagtatcatgaaatctatgccagtatgatgtaatcagtagaatgttgcttaactgggagcctttggcataccaacagaacagaacaaaacaaaaatctttcgcgtgtggaagaagaggtttttaagttcttctgaaaattatcatttcatttagattgctaacttcaaatgaatgagacattaccgtttcttgctatcaagatatttttcagagcttagcccaaataattttgagtattattctattgtaggaaaaaattgaaattacttccttttctggatagttttctgtttgagtgagatttgtgcattgattccctgatgttgatttttgttatgggggaaaaactggggacataatgggaagaggtatgtgactagcttgaaataggtttttctacatactaatctttgctattgagttctgtgtattacagcaaaatgaattttctaaaatacttaccatactacaatagttttgccttgcatgaaaacattctaataaatgaacaattactaattttgtttaatagataaatgtatctgataggtcttggcacatgggctttattcttaacagttttaaacctttagttttttgttcttttgctttacaatgtttctttctttttcttagaatgcatctactcatgcctcgaaatctcctgacagtgttaatggaagtgaaccaagcattcctcaggtctgttactaattgttattttagaaaataacaagtcatttcagagtgttggtcagtctgtgttaattattagcatctgactttacattgaaatggtgatgtccaaatattcagtacagtatatatggtaaacacaggtttgctcatggtttcttggaaaaagttttaaatgaaagcaagactgtattatttctcattttaaaaattaatgcaaggccaggcactgtggctcccgcctgtctgtaatcccagcactttgggaggctgaggtgggcggatcgcttgaggccaagagttcgagactagcttggccaacatggcaaaactctgtctctactaaaaatagaaaaagtcagccaggagtggcgcatgcctgaaatcccagctacttagttggctgaagcgtgagaatcgcttgaacccgggaggcatacgttgtcatgagctgagtttgtgccactgcactccagcctgagcaacagagtgaggctctgtctc

SEQ ID NO: 17018 - DNA, 3087 bp, Homo sapiens
  CDS (216)..(1283)
taacaaacgccggcgctgacaggggccgccagcccctccgccgcgcggagcccacgaaggggacagcgcagccggcccagagctcgggtctccggggaccgagccttatgatctcctcattgcgtccccctctgcccactggacttggacttcagatctgaccccagacctgccggctacctcgggagggcccacctccccgcccatccagcaagatgccaatcctcaagcaactggtgtccagctcggtgcactccaagcgccgttcccgagcggacctcacggccgagatgatcagcgccccgctgggcgacttccgccacaccatgcacgttggccgggccggagacgcctttggggacacctccttcctcaatagcaaggctggcgagcccgacggcgagtccttggacgaacagccctcttcttcatcttccaaacgcagtctcctgtccaggaagttccggggcagcaagcggtcacagtcggtgaccaggggggagcgggagcagcgtgacatgctgggctccctgcgggactcggccctgtttgtcaagaatgccatgtccctgccccagctcaatgagaaggaggccgcggagaagggcaccagtaagctgcccaagagcctgtcatccagccccgtgaagaaggccaatgacggggagggcggcgatgaggaggcgggcacggaggaggcagtgccccgtcggaatggggccgcgggtccacattcccctgaccccctcctcgatgagcaggcctttggggatctgacagatctgcctgtcgtgcccaaggccacgtacgggctgaagcatgcggagtccatcatgtccttccacatcgacctggggccctccatgctgggtgacgtcctcagcatcatggacaaggaggagtgggaccccgaggagggggagggtggttaccatggcgatgagggcgccgctggcaccatcacccaggctcccccgtacgccgtggcggcccctcccctggcaaggcaggaaggcaaggctggcccagacttgccctccctcccctcccatgctctggaggatgaggggtgggcagcagcggcccccagccccggctcagcccgcagcatgggcagccacaccacacgggacagcagctccctctccagctgcacctcaggcatcctggaggagcgcagccctgccttccgggggccggacagggcccgggctgctgtctcaagacagccagacaaggagttctccttcatggatgaggaggaggaggatgaaatccgtgtgtgaggcggacagtgggtggccaccgggagctcttggctgcatcttctccctgcccccaccccactatgacctttgaccctacggcgcaggggcagccaggacccttgattcagaccatggaccctggaccttgtagatgagggacactggcctggccctcgggtcttcggaggacgtagggggctggcatgggtgccgactggctgcctgacttcatcacgctccctgcacttaggctgcgtgggacaagggctgtgttgtcacagcaggaataggttttcctctgttggcctccctttcctccaccctggcctcaaatggatgccagatgccaaccccagttctggccacgtacagccagcgggtcagcccagaggcagcctcagctccagggctaaggactctcggctcccattttctctgctggcgtttctgctgtgcccagcagtggctgctggggaagcagctgcagcaggagggagacggtcttgcctctcagcccctccctgccccaccccagctcctgccctggaaatctggagccccttggagctgagctggacggggggccagctgcgagcatgtgtactaaacgcagccctttccaggggaagagaacaggatggagaatggaaggaaagccccccaggcttcgtgaattgcaagaagggacccttccaggatgacactaggaacagggctagggcactcgctcagtccctaggggcttgtttgttctttattattgtgtttaaatccttatagagcaatatcaggatggtgttaataggtctgcctcagaatgagaatcaatccttttagaaaacctttatactaagcctcctcttcgaaattcacagtggcgattagcggactggagtctggtggcgattagcggactggagtctggggacatccgtggcaaagacaccagctcaactttagtgcttcccaactttatttagaatgacatggggtgggtgtctggtgtgtgtgttttccctacgcacctcccatagctattaacaactgaggaaggccagtgcagaatatttttggagaacgattttttttttaaataatatatcattcctatggggggaaagccttttttttctttttggctgagttattccctccctcccctcaataccctcagtactgactacttccctttcttttctcaggcctccccccaccgacttttgaggccagggttggccagatttagcaaaaccaaaacagagtgctgagttaaacgcaaatttcaggtaaacaaaagataattttctagcattaatatgccccacgcaatatttggaacacttatgtgaaaaatgatttgtttttctgaaattcacgtttctctctgagtcctgtaactgtccccgaggggattgagcagaagctcgggtatgagccctgaggttgactgccggttatttttctgacctgggaacagcctgacccacctccctgtctccatgtagccagtgaggggagggggagacacagaaccaaccacagccaggggcgtccccatggcgactgtggcccggcccctcctctcttgcctgactctcctctcttgcctgactctagacactaacttagttccaggttcggtgccctgttggtgctcctgtttccaatagcttaggtcccatggtgggggaggaacctcaggggctatgcagcccccgccagctgccctcgaatcccgtccaggccaattccagattctaaactgatttttttcatgatattgtcaaaacagtgaggaaacattaaaaaaaaaagccct

SEQ ID NO: 17019 - protein, 356 aa, Homo sapiens
MPILKQLVSSSVHSKRRSRADLTAEMISAPLGDFRHTMHVGRAGDAFGDTSFLNSKAGEPDGESLDEQPSSSSSKRSLLSRKFRGSKRSQSVTRGEREQRDMLGSLRDSALFVKNAMSLPQLNEKEAAEKGTSKLPKSLSSSPVKKANDGEGGDEEAGTEEAVPRRNGAAGPHSPDPLLDEQAFGDLTDLPVVPKATYGLKHAESIMSFHIDLGPSMLGDVLSIMDKEEWDPEEGEGGYHGDEGAAGTITQAPPYAVAAPPLARQEGKAGPDLPSLPSHALEDEGWAAAAPSPGSARSMGSHTTRDSSSLSSCTSGILEERSPAFRGPDRARAAVSRQPDKEFSFMDEEEEDEIRV

SEQ ID NO: 17020 - DNA, 2177 bp, Homo sapiens
ggaagctggctggctgcctgttaagatgtatcttaggacaaagagatttgggatcctggagagcacgggggagattctgctgcctgccttaggacctttatgaacaagcgtgatgttgggagggcggctgtggctgtgtaccaggtgctgtaggaggcgctggaactggagccttgcatccgaatgacaaagtgcctgccttcccggagcttacattgagtgcggaggacagaccagggactagccagcagacagtcccatgtgtcagggtctggtgtttgcagagggtgtttgcaggggtagagcatgacaggaagtggctgttttggataagacgatcaggaaaggtacccgtctgcggaagtgatactgggtctggagtgaagcggttggaagaaaactgcacctctctggaggaagacagtgccaggcacagctgaaaatccggggctagagctactgggaggaacaggaggagcagctgggaaactgggtggccggagcagacggggagggtgagcagggagggtaaagataagcaagcaaggggctggggctgtcaccgaggtggggtgcctcggagggtgcaggagcagagtcaggatctgacttaggtttgataggctcctctggctgtcctgcgatttatcagggacccaggttgcgagcaggccgaccactcaagaggcgtctacatcaatgcagtcaaaggctatgctgacttggaccagatggatggcggaagagccatgacagtggtccggggagagaccacaagtttgcaggcagggtgctagtgaaaaagaggcgtctactgaaagctgtccaggagaaatcagactaggttagccatgaatattttctctaattctgtcttctatttttctcctccagttatatgtaagggtcttactgcaaattgtcagtctatcgttctctgagccaaagtggaaaccaataaaagtgttgggagctgcctacattctagaactgaccgtacagggaaagaggccacacttttccacgcatatttcctggagtcctggaatggcttcttcacatatttctccacccccattagacaactcagtcactaggcaagaggatggatcttggagtctgacagacaggcatgggttcaatttctctccaacgattatttcatctcggtgcgacctcaggcatctttgctttcccagactttgttttctcattagcaaaacagacctaataaaaggactcatttcataggttttttatgaggattaattgagataaaccagataatacgcttaacaccgtggtacttgcaatgaagaaaatggtgaatggtacatacatggtaagtggtcaatacattttagtcattctattaacaagttaataatcctctccatgccttgatttccttattggtagaatggggataataaaacccccttctgggtagttgggagaagtcaagcattaataccagtgaagcacttcaaatggtgctttgcatacagcgagtgctcaataaatgttaaattcttaaaatcatcaccacgattctgaccttatggactttgaagggcagatgttgtgtctcattgctttcgtgtccacaagacctggcacatagacgatgctcaataaatattatttgaaggagtgaatgatggtgacatggttcttaggagttaaaatgagaaaacccaaggagccgaaagcatgtctctacggggaaaggttagagagcactgactcaaaccatcgtctccaattatgcagttttaatgaggaagcaagcccaaccttgaacattatttaagccagagttatcccaataagcattttcctaccatgagtggtagattaagtagcattgagtcatgtagtgaaagtaatgtcccttcttcataccatttcaatgcctctggtaagtcaagagaaagtctttgataatagcctatttttaacacctctcacccttgtttgtcagaaagagcagacctcagattcagagactttagcaagcaaagatatccagtaaagaaatgaaataatggccgggcacagtggctcacgcctgtaatcccagcactttgggagtcctaggcaggcggatcacgaggttgggagttcgagaccagcctgaccaacatggcgaaaccccgtctctactaaaaatacag

SEQ ID NO: 17021 - DNA, 3180 bp, Homo sapiens
acgtcttggttcgggccgggcataaaaggcttcgcggcccagggctcacttggcgctgagaacgcgggtccacgcgtgtgatcgtccgtgcgtctagcctttgcccacgcaggtatgaacacccggagtgcacctggcgggaggacccccttcaggctgctttggcccgatcctgactttagtgctggccgcctttgctttccatccgctatagtggcctcctttgtccttgcgggggaaaccgaggccacagccttgcagcgcagtcctgatcgcccgacttcccgccccctgctcgtgcgggcctcactgtctccttctgggctgggggcttgcgacaccgccctccggccgactcgctcgtggggtgctggtggcagtggctgggtcactcgtgctctggtcaggagagcgggtctccggcagcctccgggcctcgtagaccgggtacccgggagggtgagggttagtgctgtcgcctccgccgtgctgactcagtcatagggcccagcacgcagcgcgaccttgggttgggaggacaaagtgtcttcccgggcgcactgaccgggcgggggtctcagctttcagtcatggcctccggtaacgcgcgcatcggaaagccagcccctgacttcaaggccacagcggtggttgatggcgccttcaaagaggtgaagctgtcggactacaaaggtgagcgccgcccggagggggcccaggtagaagcggggccgtgcatgagagaagctgggccctaactcctctgtgtccctcctccccagggaagtacgtggtcctctttttctaccctctggacttcacttttgtgtgccccaccgagatcatcgcgttcagcaaccgtgcagaggacttccgcaagctgggctgtgaagtgctgggcgtctcggtggactctcagttcacccacctggcttggtatgagcaggggccaaagagggaggttgcagctaagctcacaccctcaggtcctagcagtgtggcttcgtggccattgctcaacctctggaacctgcgtttccccatcgtgaaaataatggaaacattgccgcccaagtctttaaggatgatgacagtaattagcatttgacaactagttgcctggtatatagagttgcagatgcaactcagatgcaactctatctactctatgtacttagttcccaggagggaggctgtgctgccctatttcatgaagatggaaactccagttcaccgaagtgaagggctgtaccccatgacacagctagaggaggatggggactcttaacacaggctctctgctgggtgatgctgcaagttacaagtacatgtgaagccacttagctggagctgtgcctctcaaactcagtcttcccagccatggggatacagtccttgcacccaacccagggtggggtgggtgaggctcccagcggcctactctaaagccccttatctccggcctccagtgcttatcacattgggcccacagggtgaggaccctgctgtgccaggcatcctgaggccccaactctgtctcccctactcccaggatcaacaccccccggaaagagggaggcttgggccccctgaacatccccctgcttgctgacgtgaccagacgcttgtctgaggattacggcgtgctgaaaacagatgagggcattgcctacaggtactgtgggaccctcagcccggctcagggagcgccctgccccccattcctgtgatgctgggaccactcctgtacaatgtcttctctgcccccagccctgtggctagcagcgggtggttggtagtcccttccttgtctctggcagtgggagctatcagctcctcactgggaaccctgatgtcttcaggggcctctttatcatcgatggcaagggtgtccttcgccagatcactgttaatgatttgcctgtgggacgctccgtggatgaggctctgcggctggtccaggccttccagtacacagacgagcatggggaaggtgagcagatacacacatgacacatgggtacatactgagcgcctccgtcactcatgcaaacattcactgcctgtcctcttacctgtccagatgggtgttagggccccaaagaagattcagctcagggctttgtctgcaggatgtttctaatgtggtaggagacaaataacgcctgacattcaaccaaggtggacaaaggggccgggctcagtggctcacggttgtattgccagcactttgggaagctgtggcaggtggatcacctgaggtcaggagttcgagaccagcctgaccaacatggtgaaaccccgtctctacgaagaacacaaaaaattagctggccgtggtggtgcacacttgtaatcccagctacttgagagactgaggcaggagttcgcttgaacccaggaggcagaggttgcagtgagctgagatcgcaccgttgtactccagcttgggcaacagagcaaaactcagtctcaaaaaaaaaaaaaaattagcttggtttgtgaagcatgcctatagtcccagctactcaagaggctgaggctggaggatcacttgagcctgggaggtcaaggctgcagtaagctgtgatcgcaccactgcactccagcctgggtgacacagcaagaccctgtctcaaaaaaacaaacaaacaggccgagcgcggtggctcacgcctgtaatcccagcactttgggaggccgaggcgggcagatcatgaggtcaggagtttgagaccagcctggccaacatagtgaaaccgcgtctctgctaaaaatacaaaaaaattagctgggtgcggtggcaggtgcctgtaatcccagctacttgggaggctgaggcaggagactcccttgaacccgggaggaggttgcagtaagccgagatcacaccactgcactccagcctgggcgccagtgtgagactccatcccaaaaacaacaacaacaaaaaaacctgtaggggtggggcagagggacaaagatgggactaaaggagccaaaaagacaggaagatgctgtgtctcatgcctgtagatgctgtgtctcatgcctgtagttccacctactctggagagtgaggcagaagactgcttaggcccaggaatttgagtcgagcctaggcaacatagcaataccccatctcttttttttttttttttaagagatggggtattggtt

SEQ ID NO: 17022 - DNA, 2594 bp, Homo sapiens
tatgtgtgaagtctttacggtcagaggacattgacaaaatattttagattgaaagcctgttctccttgatgattcagtataacttcttttgactgcgcttttagttcttgcaaaatagatcttgtttagatgagattccagcatgactcctttgtaatttttcatatttttgctattacatctcaactcttgaagagctatttctgtgaaaaccaaacatgcagtcaaggcacattccacgtgtggctgatggggttatcatagttacaaatcatatttatccacagtgataattatcttccttagcgttttgttctacttcagagctcatttgtgggccttaccacctgtttcttacatatggggaaagagtctcttattctcttttggaatatagatctaagagtagatttatatcaggatttgaaagatgaatctttttcaaggatgtttttcctctggaccgtggcattgtgtaagaaatttccctactcatcccatccctggggcacattaatttggagatgatgttaaatgtgtcagagtgtggcacaaatctcaactggcagataaagcctagtattgaattgttttcagttcagaaacgtggctggctgactttgaccctgaatgtgtaaattatctttgcagcaataagaacttgaagtagctttgatagctaatcatagtatgataactcagccagaagaattcactaagagcagtttgtgtgtcttccatctaatgtaaaggttagtaatgtaagtcatattcttggtgcctttagacctagttatgcagagagacatcacattgacattcagtaattcttactcttaacagttccttaactctaaaatcatctttttccttacctttccctagttctagaacagcaaaatattttacttagattctatcattaattaatatactcgtttgaatttttctcttctaaaaaatgtaggccaggcatggtggctttacacctgtaatcccaggactttgggaggtcgaggcgggcggatcacctgaggtctggagtccgagaccagtctggccaatgtggcgaaacccaccccgtctctactaaaaatacaaaaattagctgggtgtggtggtgtgcgccatagtcccagctactctggaggctgaggcaggagaatcacttgaacccgggaggcagaggttgcagtgagccaagatcacgtcactgtattccagcttgggtgacagagcaagactctgtctcaaaaaaaaaaaaaaaaaagtaaaattattttggccttaccatgcttggtttctttgtctttgttttttcattcactttatgtttggggaggagaatggagtgtcagtgatttcagcaaaaagttggggtaccagttcataataaattagtgtctaagattaatgttacagctgatattcaaagtaccaaatacgttattgttctgattattctggtccttaaatttgtctctttcctggagacgtggtaaacaataatgatgattctaataatgaccatttattgaatgagcactatgtgtcagacattgtactggtgatgtggtttggctgtgtgtccctacccaaatctcatctcaaattgtaatccccacgtgttgagggagggacctgatgggaggtgattggatcatgaggatggtttaccccatgctgtcctcctgatagcgagggagttctcatgagatctaatggtttaaaagtgtttggcagtttcacccttgcacccatgtctctctctgtctctcctgctgtcatgtgaagaagaggtccttgcctccccttggccttccaccgtgattataagtttcctggccgggtgcagtggctcacacctgtaatcccagcactttgagagaccaacgcgggcagatcacttgaggtcaggagttcaagaccagtctggccaacatggcgaaacctgtctctactgaaaaaacaaaaattagccgggcgggtggcgcacacctgtaatctcagctgttcgggaagctgaggcaggagaatcgattgaacctgacagatggaggttacagtgagccaagattgtgccactgcacttcagcctgtgtaacagagtgagactctctcaaaaaataatgataatagtaagtttcctaaggcttccccagccatgcagaactgtgagtcaattaaaccttttttcttcataaattgctcagtctcaggtagttctttatagcagtgtgaaaatggactaatgcaattgggcaatgtctgacagtttgcaaataccatctcatttgtttttaatagaaacctcctgctgagagtggtggctcacgcctgtaatcccagctctttgggaggccgaggcaggcagatcacatggtcaggagtttgagaccagcctgaccaacatgatgaaacctgtctctactaaaaatagaaaaattagctgggtgtggtggtacgcgcctgtaatcccagctacttaggagactgaggcaggagaatcacttgaacgtgggaggcagaggttgcagtgagcccagattgaaccactgcactccagcctgggcaacaaagtgagactccgtctc

SEQ ID NO: 17023 - DNA, 1801 bp, Homo sapiens
ttcacccaacacaggagcctcttaaaaattctgtgtgagttcgtttcagccagtcttgcatggggacattgtcttccgtttcagtcctgacgtccaccctgtgcacctgcgtgatcgccagccctgcctggtccctcctctgcgggctctccctctccactccctcctctgggagctctgtggccccaggcccaccttccttgagagacatttgtgtgcctgccagtcatacccctttcccaggaggcgcagcttaggctctgaggctgtcccttcccaccgaactcctccctgcagcctcgcagtcctgccctcctgagagctgcccactctgctcctctccccagcgtccactgtccttgaattgccctttgctgggcattgcgatcccgcattctgtctgagggagctaagggcctcctggaagttcctctgggtcctctggcttctcccatcagggctggtcttgtcctggtctctgttcctgtggaactttttacctgcttctgtgaaaactcacgctgtcctcagcacagcacgcacacacacgcatattcacgcatgcacaggcacacacgtgcacatgcccacgcgtgcacacagccacacacaccctcacgcacacacgcacagcaccatgtgggaggggttctcggctgtgacagtgaagggcagggcctcacctcggctgctccttgtgagttgtgggccccgtgtctgtgcccggccgccctgcggtgctcaccagccttctgaacgaggagctggacaggatccctggaaggggccccggggtctctgagtcgcgctcagcgggtgcttgtgctctctgcccagctgtgctgaagtcccgagggacatgtccgctgcttgcgggtcggttcctgaggaattggaagtgtcacgagatgtggccctcgttgggctggcgctcattggcctcccttgtgcctgtgcaggaggagctgattaactcagtggtcatctcgcagctctcccacatccccgaggataaagaccaccaggtccgaaagctggccacccagttgctggtggacctggcagagggctgccacacacaccacttcaacagcctgctggacatcatcgagaaggtgagagccgttgtacccggggccgggtgctagcgtgccagagctccgtgggcagcaatggcctctgggccctctgtcctcctcttcgagtgaccggatggctgtgtccgtaggtgaggctcccctccctgcagggtgggtgtcccgaggcctgtgcagggcctgccactgctggatttgtgtcctgactgaaagtcctggacatgggtgtcctgtcacactctgggacagctgggctgggcctcctggaccgacgctggagcccagacctggggctggggctttggcctgccgtcctccctgcccagccaacagctttgctctttgattttcagatgcattttggtttctgcacagtcactcgggtataaagggcatctttgcttttgagcaataaagatgaaggccgggcacagtggctcacgcctgtaatcccagcattttgggaggctgaggcaggtggattgcttgagttcaggagttcaagaccagcctggccaacatggtgaaatcctgtctctactaaaaatataaaaattagctgcacgtggtggcgggcacctgcaatcccagctgctcaggaggctgaggcaggagaatcgcttgaacctaggaggtgaaggttgcagtgagccaagattctgccactgcactccagcctggacgacagagcaagactctgtctc

SEQ ID NO: 17024 - DNA, 2443 bp, Homo sapiens
  CDS (1375)..(1680)
taaaatgtttgctattccttgaatataggaaatgctaaaaacaatatgtgattaaataccaagtgaatagagtaatagacagtttgaagtttggggtgttaataaatgatcagaatatcatggcttagcttcctgaaggaggttttttttttttttttttttttgagacaaggtcttgctctgttgcccaggttctagagtgcagtggtgcatgatcacggctcattgcagcctcgatcttgagggtccaagtgattctcccacctcggcctcccaaagtgctgttactacaggtatgacccaccacgcctggcctctgaaggagatttatataagtagaacaatggcaagtaggaaattagaagtattactttattattaatttgggcttttggccaaaataccaatgtaaatttgtgtagtaaacagggtgacatcatattacttaagctccaggactagtcaagggctctctcatcctcctaaatttcactgtcttactactctttggttgatggctttgcagaagaccccaacaattagtcttttagagtgtgtaagagtgaaacgaccaagaacaagaacacaaactcttacatgtatgtgacttttttttctatcttgcacttgaatcaagatttgtgtaacttttaatcttcattgatcttcatagttgtacacagggttcaatcagtactgtggactcttgacccaatccgattagtgttccatcctcttagagagattcaagaagaaaggcaattgagggaaagagcaagacctcttgttggtctggcttcaaatctctaatgaggttgatgtaatggcctgtgaggagtaactaaaaatatttggctatctgcctaagcagccctacattctgacatttttcagtatagtccctgggactgggtggggggcggcggaactgcaaagtatttttcaaatttaaggataaagctggatgtggtggctcacagctgtagtcctagtgctttgggaggtcgaggcaggaggctcccttgagaccaggagtttgagaccagcctgggcaacgtaacaagacccccgtctctgcaaaaaaaattaaaagttagccaggcgtggtggcacgtgcctgtagcccaagctactcagaaggctgaggcgggaggattgtttgagcctaggaggtcaaggctgcagtgagccaatattgtgccattgctttccagcctgggagacagagtgagaccctgtctcaacaacaacaaaatgtaaggataagagaaccccataaggtacagttagggaaagatatcttgtgataaataagatttgccatgtggaaaactgacccaccatcagtgataactgctatggcattttggtaagatgctgatgctaattttggtaacaggagtgtcatctttgaggaatatgattatgtgtgattatattagcagagcaaagctgaagtctagtcacattgtactctcatattgtagcctgaagcaagaatatgatgacagcaggggagtgatgaacttggaggctagagaagagggaagcagaggcttctactgcctcggctgcattgatactggcttgcaaactcccggaggaagaggcccatcatctgctttggtcacttcagtgcaccttgcttgcgaagagtacagtaggcattcatttgttaaatgaatgaataatattaacgtatggtattattgaggtagagataagggagatttggcttaatcgcttgaccccaaggcatacttaggaagttattattattattattattttttgagatggagtctccctctgtcaccaagctggacgatctcagctcactgcagcctccgcctcctgggctgaagcgattctgctgtctcagcctcccaaggagctggggttgcaggcgatcaccaccacacctggctaaattttgtatttttagtagagatgggttttgccatgttgtccaggcaggtcttgaactcctgacctccggtgatctgcccacctctgcctcccaaagtgctgggggattataggtgtgagccaccgtgcctggccaaaaaattattgataataacaattttatacctcaaatatagtgtagaaaaaacattttagagcttagttatttgaataatcaaaaataagtttgttggccgggtgcagtggctcatgcctgtaatcccagcactttgggaggccaacacgggcggattgcctgaggtcagaggtttgagaccagcctggccaacatggtgaaaccccatttctgctgagagtacaaaaattggctgggcatggtggcgaatgcctgtggtctcagctgcttgggaggctgagacaggagaatctcttgaacccgggaggcagaggttgcagtgagctgaagacgcgccattgcactccagcctggaaaacaggtgtgaaattccgtctc

SEQ ID NO: 17025 - protein, 102 aa, Homo sapiens [sequence omitted]

SEQ ID NO: 17026 - DNA, 1616 bp, Homo sapiens
tcagttaagcttcgtaacaaccctatgtcttctctttatagttaagaaaactgaaccttagagaggtgaagaattcgtccagggtcataaaactagcaagtggcaaaattgagatttaaacactgctaggtgttaccttaggatctaaacttttaaccattactccaaagtacaggctgggtgcggtggctcacgcctgtaatcgcagcactttgggaggccaagacgggtggatcacttgagcccaggagttcaagaccagactaggcaacatgacaaaaccccgtatatactaaaaacaaaaattagccgggcatggtagcacacacctgcaatcccagctccttgggaggctgaggcatgagaattgcttgaacctgggaggcagaggttgcagtcagccaagatcgcaccactccactacagcctgggtgacagagtgagaattggtctcaaaaaataaataaactacataggaaataaaactacctggaatcttttcttttacaaaatcaatatgacacacatatcggtacttgacaaagacaacatgaaaaattttataagatattaggccgggaacggtggctcatgcctgtaatcccagcactttgggaggccgaggtgggagggtcacttgaggccaggagtctgaaaccatgcctggccaacatggtgaacgcccccatcccccatatctactaaaaatataaaaattaggctgggcatggtggctcatgcctgtaatcccagcactttgggaggctgaggcgggtggatcacttgaggtcaggagtttgagaccagcccggccagcatggcgaaaccctatctctactaaaaatacaaaaactaaccgggcgtggtggtaggcgcctgtagtcccagctcctcaggaggctgaaacacaataattgcttgaacccagaaggcggaggttgcagtgagccgagattgctctgccgcgctccagcctgggcgattgagactgtctcaaaaaaaaaaaaaaaaagaaaaattgtataagatattaatccaagaattctaagggaggtactagcaaatagtatccagctttttatcacaaagttaacctgcagaaaaatgatgggagctaagatgatacagagggtcaagaaaggtatctccctttaagtgacatttgagcagagatctgaatgaagaaatggcaaagtaataaagactctgaggcatatttggttttttttttttaggaatatgttctcagtgaaccatatggggggaaagcttggtttatccattttatagcatgctgtacagttactaagaaggaaatagttggtcaggcacaatggctcacgcctctagtcccaacactttgggaggccaaggcgggcggatcacttgaggtcgagttcaggaccagccttgccaacatggtgaatccctgtctctactaaaaatacaaaaattacctgggcgcagtggtgtgtgcctgtaatcccagctacttggaaggctgaggcaggaacatcctgcctcaggtagcttgaacctgggaggcagaggttgcagtgagtcgagattgtgccactgcactccagcctgggtgacagagtgagactatgtctcag

SEQ ID NO: 17027 - DNA, 2354 bp, Homo sapiens
  CDS (942)..(1352)
gcagcggcggcagcagctgggctcggtgtaaacaagtccaggcgcctgcgaacccgggcccgggggggacggcgcccgccaggagcgccccccactcccaggccagcccaccccggcggaccgggccccgcgcgcccaggcgaggtgaggcccgcgccgtcagggctccacagcagaccgggctcctcttgtgaccggcgtctctcctttgcctcctagagaatctcgatgctggcctggagcagaaactgagctggaccactggagcctcggtgaggggtctgtaccccacctgggaaaggcagtgggtggctggggctatgtggacagggaggccggaggtatctagaactgccatgtggtgtctgcaaggctctgtccagccaggtttcaaccgtacctgtcactctgccacccccgcgccccaggtgagccccggagtccaggtaaggctccgcgatgcaggtaagagcccctgagcgtagaggaggccttggcgcccgcaggtgagagcccctcccctcctaggtgaccctcaaccttcacggcgaggcctcctacctcctccaggtgggggaccctctccccgatgaaccccctaaaccaccagtgaaccccactgctctccagatgaggtcgcaaggaccaaccagtgcctacccgcccatgctcccccgaaactgggaactgacagcccagcccctccaaagccccttcctccagcttcagctgccaggtcagcaagggtgaggccggaagcaggcgggtgactcaccctgggcacctccgagcctcagtttccccatggatgcaacctgaggcctcctcactgagtcaaaaccgagacgcctctggtccccggagaggctgctggctctggggaaaggagagagcagcccagtgtgacagagcgagtccccacggctctgggagtgcctcgcatgtgtgtggcccaggtcctgacagcccacctactccctccccggcaggcactgggctccctctgctccccgtgggccgctccccgcgtggggccactgcccccggcccccgccatggtgcggatttcaaagcccaagacgtttcaggcctacttggatgattgtcaccggaggtatagctgtgcccactgccgcgctcacctggccaaccacgacgacctcatctccaagtccttccagggcagtcaggggcgtgcctacctcttcaactcagtggtgaacgtgggctgcgggccagccgaggagcgggtgctgctgaccggcctccatgctgtcgccgacatccactgcgagaactgcaagaccactttgggctggaaatatgtgagtcacccacctctgaccccaggctagcctttggcctgaccttccaacacctcctcctgacaagctgtcaccctatagcctttcagattgcataggccgagctcacacaagtcagcatccctgaccacattctctttatcttgcaccttgcaaggggtgtagaacttttctcttaacccatcccttctctcccaggcacttggatccccattagagagttaggatataatcagagtcaccatttatggaatgtttatgtgccttgcactgttgtgtgcctggcgtctattatctcattcaatcattgcagtgatcctctaggtagaagctattattatctctacagaagaagacagggaggcccagagatgttaggtaacttgcccaagatcacccaactggtaagtaacagaatagggaccagaatctgagttggttggttggtttttttttttttcactccaaacccttggtcaccagcttatattgtcatttagagtatcagaaaaattgccccagactctgcaacaacatggagcttgggttcaccagcctccctttccatagtcctcattgccactgctgctgtccagggtctgatttcactaccctgagtctcatttccttatctctcagtggaagataaagccactgcctagcacccaggattgttacagggatcagattagatgctcaggaagatgctcttgggacactgcaagggacaggattcttcaggcgtcgcttggaactgtggtgcctctgtgaggtggatgtcccaggcagagccagccagccagccctgacctgagctcgctgctgaccctgccacagattggctgtgtgtctctggacaggtggcttggccactctggaccgctaccaaataaagagctggccggccaggcacagtggctcacacctgtaatcccagcactttgggaggccgaggcgggtggatcacaaggtcaggagattgagaccatcctggctaacacggtgaaaccccatctctaccaaaaatac

SEQ ID NO: 17028 - protein, 137 aa, Homo sapiens
MCVAQVLTAHLLPPRQALGSLCSPWAAPRVGPLPPAPAMVRISKPKTFQAYLDDCHRRYSCAHCRAHLANHDDLISKSFQGSQGRAYLFNSVVNVGCGPAEERVLLTGLHAVADIHCENCKTTLGWKYVSHPPLTPG

SEQ ID NO: 17029 - DNA, 3628 bp, Homo sapiens
aaaattgttattattttaagatgttgctatgtcattgaaagtgagttttgttattagctaaatcataagatgcttctaatatttctttgttcttactataaatcctctattagtaatgcataaaagcatgcaactccaaatgtatactaaaacaaagctttgttcatgttcactccctcagggcagaatttgggttttcctgctttggggtcccgtagggctttgtccatacctctgtctgcctgttgtatttaagagccagtttatataggtctgttctctcgcctagtctgtgagctgtttcagggcagagaccatcttacacacttctgaatgtcagccacttagcctagtaccagatatgggatggaatcagagtcatttttggtggaactcattttaatctatcagcttcagcaattcactgtccaacagtgctgtttgtagaccccccaaaaagtggggaaaaaaaaaacacacagaagaaaagacagatgtggggacaagctgcagcaacctgcagggatattttaggagggccctgtccccttaggtgcacattaaacagttaaagggaagttcatctataagcccagagaccatagtaaccataaatccactttcctgcagaaaacacaggaggaaaagccaaagcatggttctggagaatcaaaatctagactgaaaaaaaaagttaaattttgtgcttaatagaaaacaatgggttacttaacatgacaatttggaaacagaaaaatttctatctcaataatgtatactttttatcaactctcatgagttccaaaacaagtgctaaggataaataaactacaggaaataatttattttcttctaaacctttgaatgtaaacatcctgctgattgcctgcgattctttgttaacaattccagtactttcatggcagttatcacccccatgacacacagtgcctcagaagagctacatagactgtgagaaggctttcagtaaaggtagttgggaaggctgggtgctgtggctcacgcctgtaatttcagtactttgtgagggtgaggtgggtggatcacttgagcccaggagttggagaccagcctgggaaacatagggagacttcgtctctacaaaaaaaaaattaaaaattagctgagcatggtggcatgcgcttgtgattccagctaccctggaagctgatgtgcgaaggtcacttgagctcgggaggtcaaggctccagtaagctgagatcacaccactgcactctagactgggcccagagtaagactgtctcagaataaaaaagtaaataaaaataaaggtggctgtgttagctcctgttgacaactctcacactctattagttttcatatccagtttaagacctgccagttgtcaggttttatgtttttataacgggtctatttactggaattgtaagtagtagcaaaaggtacaagttaggaatgttgtctgtggatttgtagcccagctcttcaatgcaaaattgcttgaaataagcaggttaatcttgctaagcctcaatttccttttctgtaaaatatagatacaatactttccttagagtattgttgtgaggatacaacgagataatacatagaaagtgcttacttagcacagagcctggccattgctctcggcccattggttcatcatggtgcattgcgattcatttttgcataccgataaataaagagtatgcactgttaaccactatgtttttggtgtccagttgtttctctttctttctacttcacccctcctcccccatcccccgccagtgccaccacacactccatactttctcattttcctgttcagggctgcaggtgcggagttctctggtcagatctattgcctgtgatttataatttatagggaaaaggaagtatctcaagccagtgtatgtaaaggcattagataaccatgtgttttacttgtaagccaagactttcataggaagccctttagagaatatatagcctgaaaaagaacttgtaaaagaaaacaaaattttacaaaacgtgagcccacccccatcatcagttaggcgtttaaccaaatggggcccacttcaaacgtttaaggattgtagagaatcgagaaataaaatcagataagcatacgggaggtctagactcctcactgttctgctgtcttgaacactgacaccactctttgttgaggttcctagcacatgccttggacagtgtgtgccccataattacttggacatatttgtctcttgataccctgaggtgggtgtcgggtcccttaatccatgttgatcacccctgctcaaatcactgccttaactgcatgtacggggatggtgtttgctcagtgctgagggcttatcaagctggacttctcattggaaacatttcaagttgtaattgcatcacagaaaagtaaatggtacgttcttcatggaaacagtctttgaaatgtcagacagaaagcaacagcggtgcatacagtgacgcttttcttgttgaggaaactgtattagataaggtcttttctgtctggctttcctttgagctgactgccattatcataggacttcacactgtagcttgtactggagtgagggtcctagagtagctttctcagggtcgagtgatcttgaggcgagagcatgccctgcagcagaggaacagacctgacaggtatgaacccaagtctgactttccagatttctcagcagtgttccctgctctgaggaagtgctgagtaactgcatagcgactgttccctatcctattccctgaatacaatcgaaaagattgctggtggtaaatatagggagtagcttagagagagcctaatgttatcagcactattggtagataattaatacctgcaaatagtttgtactcttgacagtatttcaaggcaaagctatagcagggtagttgctgagagatccggggaaacgtgtttttctactagtggaaagaatagtctcccactggttgtgaggttgcagcattttagagctacagaaagagctgagaccaggaggaagaactaggcaactgctaggctctcatattctctaggaagcaaaagaagttcttactctgctaagaaccatggcaaaatgaattctggctttaggggctttggaatgcccagaaatggttggagtgaggaaaagtaggagaatgcaaagaatgaattaagtgataaatctgtaagttgcaggtcctctgcagcgtgcaaaactggaaccccaggtaacaaccaagaaaacctccatgaagctggaatactatgcagtcataaaaaaggatgagttcatgtcctttgcagggacatggatgaagctggaaaccatcattctcagcaaactgacacaggaacagaaaaccagacatggcatgttctcactcataagtgggagttgaacaatgagaacacatggacacagggaggggaacatcacacaccggggcctgttaggggatggggggtaggggagggatagcattaggagaaatacctaatgtagatgacgggttgatgggtacagcaaaccaccgtggcacgtgtatacctatgtaacaaacctgcacactctgcacatgtcccagaatttgaagtataatt

SEQ ID NO: 17030 - DNA, 2319 bp, Homo sapiens
aatgtatttatcttcattgaacagtcgtcttcagaactgttctttttttcttgagacagggactcatgctgtcacccaggctggagtgcagtggcgcaatctcggctccctgcagccttcacctcctgggctcaagcaatccaaccccttctgcctcccaagtagctgggactgcaggcgcgagccaccatgtccagctaatttttgtatttttttgtagacatggggtttcaccatgttgcccaggctggtcttgaactcctgagctcaagtgacctgcctgcctcaaccacccaaaatgctggaattacagtcatgagctactgcaccccatccagcggaattgtcagttctgaggtgacaaatgttccccaaaatcactatgctatgcaaagacatgcattaaaaaccacagggagtctaggcacagtaactcatgcctgtaatcccagtgctttgagaggctgaggtgggaggattgcttgaggccaggagttcaagaccagctgggacaacatggcaagaccccatttctaccaaaaaaaattagctgggcttggtggcacgcgcctgtggttctagctatttgggaggttgaggtgaaaagatcgcttaaacctaggagttcagggctgcgatgagccatgatcacgccactgtactccagcctgggtaacagcgagactttgtctctaaaatagtaataaaaataataagataaaaaccccagggcttgtggggaaaattggatcgaggtacaacactaaaaaaaaaggtcatcagtgccacatgaaacaaagtaggaacctaataaaagtggtagagtggttttacacgttaagtgattaagaaataaatagtgcaacaaatatgatactttaccttgaaaaatacctgaagctcagttgcggaagtggacattggaagggttgcagcttgtgagtcactgtgaagtggtggaggagagttatctggatggaatctgatggatttggttatggaagtagcccataacacacacggaatggaggtagctggcagatatctgtgttgcatgcatgtaggcattttgtgtattcctgcattcctacgtgtagctgcgttcatctatgtggagttttctgcattcacccattatttcttgaggatgatgttgtgtgtaagcaaatgtgaacttcgggttatgctcaattattccctaatacattgatctcattgaaacaagttcacattttcaaaacaagcattataacggaactgactctatacagttcatgacatgcagcttctggatttggcgagttggaggaatgagaatatagaaaggttacactctacataattttcttgttctcaagtaacaaacccatgttaattagaaattttagagttaatccattttattaatggtcaacatatacccaaagtatttcacgacaccaacgtgtgcatcgtgtatgtctgactcatatgctttgactcctcatcagaattctgcaggagcccttctccctaggataaatccctcaattttaaggtatgccctgtagggccctttacagtctcaccctgttcagccttatcattagtcctccctcttactcctccccagcccctcaggaatgcatagctgtttcacttcccttaaaccaagcatgctttctcatacttctgtgttgtttcccttcactgtctcttctgaccagagtgattgatgtagccacaaaatagagtcccttccagtctcagcccaagcaccttgtgtcccatggagccttctctgctaggagctttcagcacttgtaataagtagctggggccctagttaagctgcagatttcagagcccctccccaaacctaaagcagcagcatcttgagatggagggtgtcctacgtaatctgcaaatgtttcccgttttgaatgtcagagaactacttgtgtttacttataaggctcttgcaggcgcttgtcactgtatcttctgtgccagatattgtgtctggcactcagtaaacgtttaggaataaatgaatgctgttgagggttttgtgtgttgtgcaagtattgagatgtcttaggctttgctctggcgtcctctagagcctgaaaagttgcttcatttctcagcagcatttaccaaccacttatttaaaaagctaataggaattgttggtatttagtgagagatggggtataacttaagggatgaactaacaaaagtatgataggcatatgaataaaccaggcaatttagagaattatttccttctcacctttttttctttccagaagtctcagaagtggtaatgtttatgtt

SEQ ID NO: 17031 - DNA, 3023 bp, Homo sapiens
  CDS (1807)..(2193)
ggtgcaattattgtcattgttgttatttatcatcatcagtatcattacaaaggctcagctggaaggcctgaagtgcccattatacacatagggaaactgaggcccagagaggggtcaaggcttgcacagagttgcccctgggggaaggaggcaggactcggactctggcctcagtttccccacctgagaaacaggccacataactctagtgacctcctgggggaagggcagtcaggcccttgggtggggcttaggcttgaccactggccacctgaggtaccttggaactctggccctgagtgcctcgctattctctgccttctgtgtgtcactgtgccccatgagtgcctccaatgtccttctgtattcccaccctctaccacactgttcccaatctgtgtttttagggtgctcgcttgtcccccaccctctgccctctgtcctatctcctgactgatacctgtattacctctcaccgggccctcaatgccccagcctcatgacctactcttcctggactgtctgtgctcccagccagccttgtcccatcaccccagccttgtatgtgcaccttcagggcccctgtccctctgacacccccatcctgccccccacaggaacctgctgtacgtgtacccgcacagcctcaacttcagcagccgccagggctccgtgcgcaaccttgctgtgcgagtgcagtacatgacaggcgaggaccccagccaggctctgccggtcagtggctgtgccccagggaaggggggtagggcatcccccatgggtccctcatgaatccactctcccaggtcatctttggcaagtccagctgcagtgaatttacccgcgaggccttcacaccggtggtctaccataacaagtatgtagggggacacgtgaggaacttgggggcactcatgggggtaggaggatgtcccttatatatacacataaggcagcatcgatgggaagatgggggacaggaagaagagaggtagaggctcccagagtgctaatgagggaagctgaggcagacagcagagacagtggggcctagcagcaataagggcgtggcatggcagaggtgatggggcagacagtggggaccccagcccccagcagatcccccagcccgattctgccaggtcccccgagttctacgaggagttcaagctgcatcttccagcctgcgtgacagagaaccatcacctgctgttcaccttctaccatgtcagctgccagccccggccgggcactgccctggagacacccgtgggctttactgtgagccgtcccctccctccctccccctgagccctcctcgtcccccaacctggccgcagacctgacctccagcctctccccagtggatcccactgctgcagcacgggcgcctgaggaccggccccttctgtctcccagtgtctgtggaccagccgccgcccagctattccgtgctcacacccgatgtatgtgccctggagctcctgcctgccaatgcattgtccccagaagcactcccgagtcacctgccttccttcctgtcaatcctgggaggcttgttatcctctactggtgcctccagggcccccgtgtagctcattattcccctattaatgcctctctgtgtcctacatgtcctccccaaagattcccattgcctctctgctccattcccactttagccaccctgactgccttcctgatcactgtcccctgccctcgtagtaccttatcattccccatgaatgcaccattgttaatgaccctaggcctcaaatcctcctatcctgtttcctgacctactcaatgaatattcattcaccctgtgtctccattctctgcccccgtcttggcatgtggatttccagcctgcccagtggaccctctcagtctactgggaccagggctgggggcagggtgcttggctgcacccccagaccgggctacactcacgctgcagtgtcgcaatggctggggccgctgggtgacctgatcagtcagggagggctgaccagtgcccacctggtgcctccctcccacaggtggcgcttccgggcatgcgctgggtggacggtcacaagggcgtgttcagtgtggagctcacagccgtgtcctctgtgcacccccaggtacggggtgggccgggaaccaagagtcccgccctgctcccctcttgcctgccctacgattgagtaacagttgccgatggccggggaggtctggcctcaggccttggacgtgactttggtcagctggacccagctttaagggaagctgctgattcaggcaggggtggtcttcattccctgaggccccaccctgctcactccacatccctacccaggacccctacctggacaaattcttcaccctggtgcacgtcctggaggagggagccttcccattccggctcaaggacactgtgctgagcgagggcaacgtggagcaggagctgcgggccagtcttgcagcactgcgcctggccagccccgaaccccttgtggccttctcccaccacgtgctggacaagctcgtgcgtctggtcatcaggcccccgatcatcagtggccagattggtaagcgaatgtggcctcagacctcagtttccccatccacatggcttctcagtcctgaggtcctgagggatcttctataagcccatttacctctctggccatttttctcatctgaaaaatgacctccagtcccctgcacccagagaaggtcttctgtgaccctttggcccgggtgcagcggttcacgcctgtcatcccagcactttgggaggccgaggcaggcagatcacctgaggtcgagagtttgagaccagcctgaccaacatggagaaaccccttctctactaaaaatacaaaattagctgggcgtggtggcgcatgcctgtaatcccagctactcgggaggctgaggcaggagaattgcttgaacctgggaggcggaggtgacagtgagccgagatcatgccactggactccagcccgggcaacagagcaagactccatctc

SEQ ID NO: 17032 - protein, 129 aa, Homo sapiens [sequence omitted]

SEQ ID NO: 17033 - DNA, 2261 bp, Homo sapiens
tatatcttagtcctatgacttcctttgcctctccacatatacacagagggaaattatttaatatttaatccaaactgctcaattttctttttctttttctttctttttttttttttttgagacagagtctcgctctgtcgcccaggctggagtgcaatggtgcgatctccgctcaccacagcctccctagtagctgggactacaggcgcatgccccaacacccagctaagttttgtaattttagtagagacgggtttcactatgttggccaggatggtcatggtctgctgacctcgtgatccacccgcctcgacctcccaaagttcaattttcttaaaagtgaccaccaacaccatcaacatatgtttatagactagatgtatcacttgtttacccaaattgtagcataaatatctgtttttagaaagcttttccataagtctttctatatgattggattattaagcaaggctatgattaggaaataaaccactttcccctttagctagttctaatgaaagctttccaaattaaacactgtgtttgaacacttcttccattcatagcatgtgctcatcaaaaagtgctttccgtttctggtatgtcaactgtactatttataacctagttaacaaagccaacatggtgaaaccttatctctactaaaagtgcaaaaattagccaggcatcatggcacatgcctgtaatcccagctacccaggaggctgaggcaagagaattgcttgaacctgggaggtggaggttgcggtgagccgagattgtgccactgcatccagcctgggtgtcagagtgaggctgtctcagaaaaaaaaaaggggaggggggggtggttccaagatggccgaataagaacagctccagtctacagctcccagcgtgagcgatgcagaagacgggtgatttctgcatttccaactgaggtaccgggttcatctcactggggcttgtcagacagtgggtgcagtgcaccgagcgtgagctgaagcagggtgcggcattgccttacccaggaagtgcaaggggtcagggaattccctttccaagccaagcgaagctgtgacagatggcaactggaaaatcaggtcactcccaccctaatcctgcacttttccagtggtcttagcaaacggcacactaggagattatatcccgtgcctggctcagaggatcccacgcccttggaacctcgctcattgctagcacagcagtctgagattgaactgcaaggcagcaacaaggctggtggaggggcgcccaccattgctgaggcttgagtaggtaaacaaagcagcgggaagctccaactgggtgaagcccaccgctgctcaaggagacctgcctgcctctgtagactccacctctggcggcagggcatagccaaacaaaaggcagcagaaacctctggagacttaaatgtccctgtctgacagctttgaagagagtagtggttctcccagcacagagttggagatctgagaatggacagactgcctcctcaagtgggtccctgacccccaagtagcctaactgggaggcatcccccagtaggggcagactgacacctcacacggccgggtacccctctgagacgaggcttccagaggaacaaccaggcagcaacatttgctgttcaccaatattcgctgttctgcaacctctgctgctgatacccaggcaaacagggtctggagtggacctccagcaaactccaacagacctgcagctgagggtcctgactgttagaaggaaaactaacaaacagaaaggacatccacaccaaaaccccacctgtacatcaccatcatcaaagaccaaatgtagataaaaccacaaagatggggaaaaaacagagcagaaaagctgaaaattctaaaaatcagagcgcctctccccctccaaaggaatgcatctcctcgtcagcaatggaacaacgctggatggagaatgactttgacgagttgagagaagaaggcttcagatgatcagacttctccgagctaaaggaggaagcttgaacgcatcacaaagaagctaaaaaccttgaaaaaagattagacgaatggctaactagaataaccagtgtagagaagtccttaaatgacctgatggagctgaaaaccatggcacaagaactacgtgacgaatgcacaagcttcagtagccgactcgatcaagtggaagaaagggtatcaagtgattgaagatcaaatgaatgaaatgaagcgagaaaagaagtttag

SEQ ID NO: 17034 - DNA, 1948 bp, Homo sapiens
ctgttagtaaagtgcttagaacagtgctgaacttgtagtcaatcctgtgtaagtttttgttagataaaatagaaaactggctgggcacggtgactcatgcctgtaaacccagcactttgggaggccgaggcgggcagatcacgcggtcaggagttcaagaccggcctggccaacatactgaaaccccgtctctaccaaaaatacaaaaaaattagccgggtgtggtggcagatgcctataatcccagctacttgggaggctggggtaggagaattgctagaacccaggaggtggaggttgcagtgagccaagatcatgccattgcactccagcccaggcgacagtacgagactccgtctcaaaaaaaaaaaaaaaaaaaagaaaaccatacattccaaaaatagcgattgagcattagctctgtgctaggggctgggaacaccaaggagaagcacccacccctgtctagatggtgttgatgggatgccagggaagacttggcggagggggtgatgcccacacggtatcctgaaggaggaatgggcctgagccaggcaaagaggagcagggagggtgtggctagcacttcatgcacaggtctagcaagtgcaaaggcctgggggtcagagagagcaggatgcatttgaagagctgtctagcatggctggagcacagcacaggaagagttcatactccacctgtttgtctgtccatgtgtccatccttccatccggcacatgaatagttacatgagttgctgtcatggcccccactgccaggactcttctgtttagcccagaaggccctgtctatctctccagcctccctggctcttgccgctgacggtaccctccacctccagctctatccagttacatgcactcccttgaatacatcttgcttgctcctgcctctgtgcctttgcacctgctgtccactgtgcctggaataacctttcttttgttttgaaccccttttgaaaaataactctccacctgctctgattttgcaagaaatatgcctgccttcatcatcattaagactcaggaaggaagggtcattttgccttattatttccccctccaggaatcatccccctgacccacctgtctgggctgggtttattgctttctcctttgtgtctttgtcacagccctgactatactgtgccacctgtgtctggcctctctgccagactgagaatgcaatgaggacagggactgggtgtggttcattgtcactgctggccagagagacccaggaggtcaccagacctgggtcctgccctcaagaaccacgccctcgagggaaatgatgcacacaggaacagtaaccaggatactgggcagagtagactagtaggcgcctgggtcctctggtcatggccatggggggcccaacgtgaagttcccaaggagcagcagaggggtgttctctgcctgccagggcctgactccagctgtgcaaacagtttttgcaaaatgcatcttggcctccaccactccatttgtcctgcacagtttgctttggcttcaccccagtctcaggcccttcatcccttcccaccggtccccactccttccattggtttcccaggccttgcacctcagactactgggagcactgtctgagccaaaccctagggctcaatgaaaaccagacgtaaggctgggtgcattggctcacgcctgtaatcccagcactttgggaggctgaggcgggccaatcacctgaggtcgggagttcgagaccagcctgactaacatggagaaaccttctctccacgaaaaatacaaaattagccgggtgtggtggcacaagcctgtaatccccgctacttggcaggctgaggcaggagaatcacttgaacccgggaggtggaggttgcagtgagccgagatcgtgccattgcactccagcctaggcaacaagtgcgaaactccatctc

SEQ ID NO: 17035 - DNA, 2005 bp, Homo sapiens
tgctgcagccacaacaagtgccaccaccaggggccttccagctgccagtgcaggctttccagagccggggactggggaacctgcagtcatcacctcagcaattctggtggcagccaggccagccagggcagcgatgatgaccgtaatgaaaagtgggatgacagctccacactggtggatgagttgagaacaccaggcagaggcatgtacctggtctttgatggttcagtggacctgcactaccattgcagtgcaaagtgcaagagttgaagcttggaaaccttcacctagatttaggaagattcagggaaaagtctggatgtccacgcagaagcctgctgcacgagtggaaccctcatggagaatctctaccagggcagtgtggaggggaaatgtggggttggagcccccacacagagtcccactggagcacttcctagtggagctatgagaagagaaccactgtcctcctgacatcataatggtagatccactggcagcttgcactctcagcctgaaaaagctacaagtactcaaggccagcccttgagagcatctacagatgctaaaccctggaaagccacaagtgtggtgctgcccaaggctttgggagcccaccccttgtaccagcacgcccttgatgtgggataggaggtcaaaggaagttattttggagctttaagatttaatgactgctctgcttggttttggacttgtgtaggcttgtagcccctttcttttggccaatttcttccttttagaatgggaatgttgatccaatgcctatacccccattgtatcttggaagtaacaaacttgtttcttattttacagggtcataggcagaagggactagccttgtctcagataagactttggactgtggacttttgagttaatgctggaatgagttaaatatttgcaggactgttgagaaggcatggtagtttgtttgtttgtttgtttgtttgtttgtttgtttgttttttgagacagagtctccctctgtcaccaggctggagtgcagtggtgcgatcgcggctcactgcaatctctgcctcctgggttcagatgattcccctgcctcggcctccccagtggctggggctgcaggcctccgtcaccgtgcctggctggttttttgtgtttttgtagagatggggtttcaccttgttggccgggatggtctcgatctcctgaccttctgatctgcctgcctcggccacccaaagtgctgggattacaggcgtgaaccactgcacgcagccggtagtattttgaaatatgagaaggacatgagatttgggagagaccagaggtggaacaatatggtttgaatctgtgtccccgcccaaatctcatgttgaattggaatccccagtgttggaggtaggacctggtggaaagtgattggatcatggggcggtttctcattaatggtttagcactatccccttagcgctgttcttgtgagagagtttgcatgacatctggttgtttaaaagtgtgtggcacctccccccacacttcctcctgctccagccgcgtaagacatgcctgtggccgggcgcggtggctcacgcctgtggtcccagcactttggggggctgaggtgggcggatcacgaggtcaggagatcgaggccatcgtggctagcacggtgaaaccccgtctctactaggaatacagggaattggccgggcacggtggcgggcgcctgtggtcccggctactcgggaggctgaggcaggagaatggcgtgggcctggaaggcggagcttgcggtgggccgggatcgcgccactgcacttccgcctgggcgaaggagcgagactccatctcaaaaaaaaaaaaaaaaaaaaaagcaaagacgtgcctgctacgctttcaccttccaccatcattgaaagtttcctaaggcctctccagaagccgaatagataccagcatcatgcttcctgtacagcctttagaaccatgagccaattaaacctcttttctttat

SEQ ID NO: 17036 - DNA, 2477 bp, Homo sapiens
gaaagttttcactgcatctcttgtgggatacgtataatgtttggcagatgatacttttaaatgacaataacaatagttatttttcagagagaggaatcaagatagccctgcaaattcagtgtagttgttaattctctgtattcttattaacaagattcctttattcatttatttatcaaatagttatcgagggccttatataccagacatcagtttaggtgtttaggatacattagagttaaaaaaagacaaaaatccctgccctcgtcaacttaaattttagtgagggaaacaatacataataaacataataaatagtaaatgacatggtatgtaggaaagtgataagtgttatgggaaaatcagagggaaagggggttagtgagtgctgagggaatgtgggttgccattgaaatggagtggttagtatatgcttcattaagaaggtgtcatatgaataaagactttgaaagagatgtatgagttaccaactgctacataaaaaactaccccaaaactcagtggcttaaaacaattaaacatttgttcactcatgaatcagtagatctgttagttcttagtctgagccaggcttgttttttctctatagggcttgctcacacagttatggttagctacaggttagctggtggctggctttgctaatcttggctgggttctttcttacgtatgaagtcccatctgggacaacttgactcagcctcatatgatctttaattatccttcagtaaactagcctggacctgttctcttggcacaataggatctcctgaggtttgggctcagaaccagcacaatgttacttcgttatattctgttgctcacagaaagtcacaaggcaagtccagattcataggctggggaaatagacttgatctcttgatggaaaagctgcaaagtcacattgcaaaaggctgtagatactgagggggacagccatttttgctgtcttccacagaaggcaagggagtaagccttgtgggtgtatggtgctggaagggatgggtgaagagtggaggaggtggcagagtattccaggtagacagaatactctgtgcagaggctctgtgagagtgtactggtgttaaaagaacagaggctagagtgtctcaaatggagtaagtgaggagagagttgtaggagatgaaaccagggagaaacaaggacaaaatcaggaagaggtttctttttgccataattaggacttgggcttttgatcagagaaatgaggtttccccctcgttttttgtgagttttattctccatatataaggtcaagattttatcttaatctttcattttcagcagtttgactgtgtgtctaggtagtttttgtttttgttgttgatgctgttgcctgggtttttttgttttttggtattaatcctgcttggggttctctgagcttcttggatatgtggcttgttgcctttcattatttttagaaaatcctctgccttatttcttcaaatatttcttctgccctctttcttcttcttccacttgtatggtacctgacatctcttcctgttctgctccactacaggtaagccagtgcttgcatctcgtctctcctgggaaagatctgtctttccttggattttaagcttatagttgtcctgtaaccccagctctgatgggatcaagaaaagttatgattttgtagttcattaactttttcttattgttaggaaaggagcaatattctcccaactctgctccattagagggttttgagtagaaggcaggacataatctgatttatattttaacaagagcagttaggttactgtattgaaagtaggtagaaggcagggttggctctaacgaatttgaatgaggagcctcagcacttttcggcgccattttcgagtgatacctgatctcatcaatctagcggaagagacaggataacctatccaagagtatagcgccactatgactccgccggaaaaattactttaaaaatcgccaaaaattacttggagcaaagggcagtaggcggagcttcgccaaggctggcgcagtcggttttgacctgtagcagagaaccaattctggagaacagcctcacttctttgattgaatactcacataatgctttggaacaggacatgagattagggtttaataatgatagaatgaagaccataataaaagagacctctacttacctcagcaattcttacctttcttacctatttgatgaagatgtcttttgaaaggtgtactgcaaggaacaaaatgtttgtaaattctgcttttaccaaggtttcttttttagttgatgccaaagagttccaatattgaacatcttaagtctgttacttggagtatggattgagtttggagcttactcagaggactacaggagagtatccaggaggtggataattactgtaccttcctcatggaaaaagttttatttaaagtgttatttctcgttgaatactatc

SEQ ID NO: 17037 - DNA, 2251 bp, Homo sapiens
  CDS (1511)..(1888)
tttttctatgcgatgttaagttttggaggaactagaaatgtttgaccagaggcacccacaatcaggtttccagtatctcaaagcttgtcttgtggataaggagaaaactcaacgggcacaactaggaccaataattgggagtgtgagggtgacaggtttcagttcagtatctgaaaattaggctactagagctgcccaactgtggaacaggctacctgaataggtactgagcacctcatcccgggaggcattcaagtagactctggctgactgccttgatgacagtgttggatgagaagctgtattagtctgttctcgcactactgtaaagaaatacctgagattgggtaatttataaagaaaagaggtttaattggctcatggttctgcaggctgtataggaagcatggctggggaggccacaggaatcttacaatcatggtagaaggcgaaggggaagcaagtacctcttacatggctggtgcaagaggaaaagagagagggggaaggtgctacacgcctttaaacaaccagatctcgtgagaactctattgagagaacagcaccaaaggaatggtgctaaactattcaaaagaaatcacccctgtggtgcaatcacctcccaccaggccccacctccaacattagggatcacaatttgacatgagatttgggtggggacacaaatccaaaccatatcagaagctgcttttactgaaaggcctctccagtcagaaaactggattgtcgagtgctccaataagcagagtaattctgggttcttcggtgctaaaaaaaaaaaaaaaaatagaggagattactctccttgaacaaaatttgatctattgaaaaattttaccttggattttttttcacctatttctatttaaactttaccgaaaaaaaaatcaaggaatcatttttcttctccatgctcccctggattcttcaaacaaaggaaaaattttagtaggggttaggtgagggaggagtgagtgctaggactggatttgaaaaggtcagttgttgaagaaggaaaacagaggcaataattatttaaaagcatggttgcccaaatgtgattttcagtactggttttggtgatggcgggagaaaattcaagtagggctccctgacttgcaagtaacaaacacttctgccttttctagttcccacagacctacccccaacacacacacctatcaccccatcaatccaccactgctctttgattttctcataacagtaaagagaatgcaaacaaatctttccttctgaagcccaaaactggatcttaaaatcttaaaagttgggccatgagcggtaaggacaccagaagaatctaaaatgcctgcttaaatcaggcagtgaatcttatggagtctacagcagggtttggcaaagtaggcccaccacttgatcatacaaagaaagttttgttataacacagccatacccatttatgcagtgttttggcagctttcacaccatgatgatgacttgactctatatgacaaagaccatagggccttcaaagtctgcaacatttactatgtggcccttaacagaaaaaaaattgccaacctctagcttagggcagtggttctcagccctggctcagtgtcagaatcacctggggtacattaaaaatagagatgccaggctgggcgtggtggctcatgcctgtaatcccagcactttgggaggccaaggtgggcggatcacgaggtctggagttcgagaccatcctggcctatatagtgaaaccctgtctctactaaaaatacaaaaaatgagccggacatggtggcatgcgcctgtagtcccagctacttgggaggctgaggcaggagagtcacttgaactgtggaggtggatgttgttgcagtgagccgagatcatgtcactgcactccagcctggcgacagagcgagactccgtctcaaaaaaaaagaaaaagagatgccaggctgggcatggtggctcatgcctgtaatcccagcactttgggaggccaaggcaggtggatcacttgaggtcaggagctcgagaccagcctggccaacatggtgaaaccccatctctactagaaatacaaaaaattagccaggcatggcggtgcatgcctgtaatcccagatgctcgggaggctgaggcaggagaatcgcttgaacctggaaggtggaggttgcagtgagctgagactgcgccactgcactccagcctgggcaacagagcctgactccatctc

SEQ ID NO: 17038 - protein, 126 aa, Homo sapiens [sequence omitted]

SEQ ID NO: 17039 - DNA, 2708 bp, Homo sapiens
  CDS (1321)..(1644)
aatacaaactcactggtttgtgaaagataattagattttaattataaagtagtaatacaaactcactggtttatgaaagataattagatccaaattacatttctgacaaaattgggcccctatatgtaattaaggctgtggaacaaaatttggggtaaagtagcctgtagaatgcagatcacgtaaaatattaaatttgacacacagaaaaccaaaagtaaattccctagaaaagacatgtctaacgaacagaatgtaaattccgtagaaactcgggtcctcaaaccacaaagacatttgtctttaaaccaggaaagacttgccagaaaagacaaaaggtcttctgtcatcccaggagagatgtaaggtcctttatttaccagatccagaataaagtcaagaggttctaccttgattttagagggagagagagtcttggcctgacaaaaggtgtgccgtggaagcagagagctccaggggctcatatgagtactgcacaccagttctaagcatcacaaactgtgtccaaaagtaatcctattcaaggtcctacctctggacactcttcatgtcaacctaaataacaaacagagaggggctctctaaaagaaaataatgtttatttgggaatagggtattggaacaggagtccacaggtcatagtaaattgtttgcatattcaggaaggtaaaggaagacaatgggtgttaaagaaaaaatgaggaggattacataattgttttgaaataattatccttgcctataaggatccataacaagggtggtggcagcccgaggttggacaagtagttgctgggcagatgtcctcagagaagtatttttgtgcgtgtgtaaggttgcagtggcctttgtgcagagttgtggtttttgcagagtcttctgtgacagttttgctattatgtatacaagcatgagaaccctcccttcacagccttccctggctctatttgtcagggtttttttatttttttgttttttttaaaaaaaacaaaaaaacagtgactccattttgattctgacaactttcattgtcagaactgaattgtttctttatctgtaaggtctgttctccatctctttttctccccttataatttatcaaataaaacttttttatacttttgcattttctatgtttggagtttactgattccatccccttgctggagttgaacatgtttttctattttctataaattgataattagagctataggtgtgatcagattcaggttatttcccaccaatccccatccctgttctttttttgctgctgctgctgcaagaatcgttcataatatgtatacttctaataagagacactcactctctaatttccttccttgtcatcctagtttgtttccttttctttcttcccttccttcccctcccatctctttttttcatcttcctctttccctcccttcctcccttccttccatttttccttccttccttctgaccgtccatctgttgttccttcctccttccctccttccttccaagagccaatgcttccttgctgccttgtcatcctacatgtggctaaacaagacagatgatttcttaaatttatcgtccctctctcccaaatttgcaagagtttgggatcctcttaagttttaagacatccccaagaaaattcctcacttgttttctccattttataccctggcacttgaagttttcttcctatagtctgaagacttcttaaaatgtagagcctgatcttgttctccattctattcctagtgcctaagatagtgccaagcacacagtaggcatttactgtaatatttgagctgcatcaactgtgtcagttagatcctggcatactgaatggaataattgagattataatggactatttcaaaggtatatgtgcagggttaagagaaaccaacaagaaatgataagatgctaaactagtaacagagccagctggtactccaaggtaccaggacaagagaaggaacaaacctagagggctctaggagtggataacattcctggagctgtagccttgggtgcaggaacactacaaccactgccaccctgtggctcagcaggaaaaagatgaggaaatacatacactaaccttattttctcctaccctcctatctgctgatacctcttaattcctgaacttacctagaagccagtctataaaagtcagcctcccagaattcaggaaaaagtgaggggtggagaatggatctggagaagcagatgtagaaactgtagtacaatggacaaaaccttccctggagtatagcagttattagtttcccaggaggctaaaactttgtttcgttgggcttggacagtgattaagggatgcaggagcagggaaaaaagaatttggcctgaatatattaaagcagcagtccataaatcccctccactcaaatctttctacagctacttagtgcccttcagttacttttatacaatttcaagtctgcctttagtgttaattttaacctgatttaacctatattccaggaagtggtaagcaatattcagttgatctgtgccagacccagccttttaattaagagattattctggctgggtgtggtggctcacacctgtaatcccaacactttgggagactgaggcgggtggatcacgaggtcgggagatccagaccatcctagctaacacggtgaaaccccgtctctact

SEQ ID NO: 17040 - protein, 108 aa, Homo sapiens [sequence omitted]

SEQ ID NO: 17041 - DNA, 2554 bp, Homo sapiens
  CDS (1113)..(1427)
tttaaattaatgtgtatttctcttctctctctctcacatacacacacacagccatttaatccaagctttcattcaaaccaaggatctttccacaaaatccctgagagtcaacttttactgtttactaaaactgtcttcactgtgtggagcttacttctttgtgaagcttggtgtttcatttggacaggccaatttatggaaagctgtccttcatactgaactgaaattgatcttttcatctgtgcctatcattcctggaatcaaatgagataccatatcctgaaattttttgaaatggcaaagcactgaataaatataaaatatattaatgtcagttctactgtatagagtttgaaaatttgacaagcacactgtcctctccaagtcattggaatagatgaatatgagaacagaacaagagagatactctgcacaggttttggaagtgctcctttcaatttgatattaatccattaatcagtattctttaaactactctatttaagcagtgagaggcagggaccaggttaagccaagacctagagaataaaaacaaagccaaagtagaaagaaaaccaggacccaccaccaccccaggcctgcagcaaatacatcagtgttcactcaaggcccaaggacccttcagtcagcttgtgatgaatactgttgagcctgggactctcccttcaggacagtgctcccctctagcccaggaaaagtccagtaataccatccatgtgccaaggcctcgaatcatggaccccaagagcccacttggttctctatccctctgtggccaatatggtacctaagcttcaagacaaagtcggctttactcttccccctccttttctcaagcagaaggagtctctcatcatagccagcatagctggggatgtgctgagtcacacttgaagccagcatgtctctgaatctcacccaaggcccatagcaagtactgtctagctaccactgctaactatgcagggccaaagggctttttagtcagtagttaatgaattgtggcaggactgagtccttctctttaaggcagctggttctcttctggcccagggtgtgtctagaaataacattaggagctagggcctggaatgggagcctcaagtctccggctagtgctctatcctactgtggttgagctggtatccaagttacaagacaaagtcctctttattcttccttctcctcattttaagcagaaagaagtctctcccagagctgtgagctgtgctacctggggttttgggagtggtggtgcaagcacaccctcggctgtcctagccagtgtctcgctgggtcacgtgttccccaagtctactttctcgagtccagcacagcaccaggacttgccaaggaattgcagtcctcttggcctagactgtctttcaagtttacttaggaccccatagcatcttagcccatggtggtggggcttgctagaagaaagggtccaacaactgggatgggtgagtccactctggctagggctggtgtatatgctccctccataggcattgactaagttctatacagtgttgcttttctgacagggcagcaatgagttccaatgctaagtcccacaatcactgcactctccccaccaagagcacagatcttctctcagcaccacatggcagctgctgggagttgagggtagggtggtgtcagcaattcaaggctgtcttttctatcttcttaagtgcctctttcagtgatctgaggttaaaaccaggtaccgtggtcactcacctgatttttggatattatgaaggtgcttttttgtgtgggcaattattcaatttagcgttctatggggaggacaatcagtagaggtttccatttggccatctcgctcctcctcctctgttccaattctgagtccagcaaacaaaaatagcgccctttggaaagaagctactataggacaagcttagcagggagctatgcttcacctccatgagagcagactacctacctaactatttactttggaaaagagctccagatgaaggcctgatgagattcccatgcttactctgaaatcatcattttggaatcagtcattaaagcttcgtaaatatccaagatatttattgtacacactactgttcaatgtaattaataaaatattaatttataacatgctcttagcccaaccaaaagatcatgctaattagttttcttcaaaaaatattaataagtagtaaaaatcctaccttgagtattcagccaatattaagagttatgcctggtggggtgtggtggctcatgcctgtaatcctagcactttgggggaccaagtcaggcagatcactttaggtcaggagttcaacgccagcctggccaacatggtgaaacccgctgtctactaaaaatacaaaaaagttagctgagtatggtggcggtcacctgtaacccaagctacttgggagtctgaagcagtagaatcgcttaaacccaggaggtggaggttgcagtgagctgagtcacgccactgcactccagcctgggtgacagagcaagactccatctc

SEQ ID NO: 17042 - protein, 105 aa, Homo sapiens [sequence omitted]

SEQ ID NO: 17043 - DNA, 1938 bp, Homo sapiens
actatccttgagtgtttcactacgtattaaatttccacaatgcatcactagagcctatattgtatctgtggacactctttaaatgtggacatttaagcaaaagtcgaaagaataaatctagaaataaaaatgaatgtgaaatttgatgagaaggattggctcctgctgcaaataaatttctgttcattatacattacagtcagtggtattctattatagcagcatgaaatggtctaatacatctgatcaagaatggagaatctcagtcctatgaggacaaagaggcttccatgacctactaagttgcctggtattgttcagtctctcctgcaggctctttgtcttgtagcctaagtatctcttggtagaaaaaagaagtctcaggacaggtgggtgaggagatgcactctcatgtcttaagttcagctggtgctatgctgggggctactgtttgatctggagaaacaatgggcctatctgggctgccttctgctactatgtcatgggggaaagaagtactggatatggatggccttcctctcaggtgggaggacacaaggcatcttgatgttgtgttgttgctcaaatcctgggtccccacaccagctcttctatttttaccacctgcagagttctcctttatttgctttttgtaccatttgcagtgcttagggttgtgcctagtgagagggagcgggaggaggtgggtctgtgccttcttgtttgagctacagcttacttagatgtttttgatccttgtttctccaatattaatgattaatttttaaaactttaccctaaattaatctgtattaccttttttccataaactccataaagacagaatgtgtttcatttttatataattaaacaccctgcctgcaatttacaaacaaatgatatgtcatttaagtttcataaatgggaaaaagattaatcacagacagtttatttctttaaaaaataacacaaatttcttatttctgtatttgtcataagttcaacctttttgcattatcttgatcagtgtaaaatgcttggatggtcagtgttgtttgacttgtgtctgtatttggttaggatccatttaaactctctaggataatgtcaaaatcaatttcttcctttatactttcttattttcaaagaaatggtgctaaatatttctatgaatatatggaaatatctatgcgaatatgtatctgactaaaaatgttgcgggcatcttttctgtttttttaaccctttgtaatatttttattttgtttatttagtgatataagggaaaattgtgagcatttaactacataatctttatgtttccaccaaactcaattttttagttcttagtatatggcctataatctaactttaatttatcccttttatattagcttattttcttgttaacaacaaggatatctcttctggagtatctcaagtcaaggtagaaaaagtagtcaacaggaaaatgaacagaacagttttggatatgtatgagaatttaaagcaaatgtttctaaatgagaaattgtaactcaggaaatatttggcacattctatcaaaattttgtgaattttgataataaaacattcacaattcaattaggagtaaaggaacatcagaagaatttgagagcataccatggctggcagtccataaaagactagttaggaacatcagcttttaatcatcgaccctgctttcaggtttcattttaaacttatagaagaggggaagacatcagtgtgcttatttggcctttactctaaatcttaaaaggaagaaaattttaatatttcttagtttgagcccaggtgcggtgtctcacgcctgtaatcacagcactttgggaggccaaggcaggcggatcacttgaggtcaggagttcaagaccagcctgccaacgtggtgaaaccctgtctgtactaaaaatt

SEQ ID NO: 17044 - DNA, 2069 bp, Homo sapiens
tcgcaatgaatactgtttttatagtgctgtttttcaaaatttctcacctccctaccctttacttcatttggggtctgcattttctttgtatttccccttgcccttactttcttcttataatacgtattacatttctgtagcatttaaacttttgatgaatactttcccctggtactatttcttggatactcacagaaaccctacaaattaagtaatgtccatcttttccagatagtgaatccagtactgaaatgttaaattaattgttcaatattccttagctagtaagtgggaagagccagaattcaaacctatctcatcgctttatacttaaattttttttctatcggtcttttttcagtatttgcgattttattaagaaggaagtttagaccatgggtggcttaacatgccctaataggtgaatttttttttggctttccagatggcttttatttatttgcattgcaaatgctttttttttaaaaagagattttctgaggctcttagttgtttactacttaatattctccactgtcatttctctttaatgacttcattaaaaataattgagcaaagtgttataaagtttgattctatctcctaacatatttttccattattgctaactactatgtaggacagaaaaaatgcttgaagtttcctcaaatagattttattatttaattctgtctgactttaaaagatttgcttcaaaaatgtctgttaagcaaaaagtatgcttgaattactaatttaaacacttcctgccagaatgcatttttttgcgtattaaacatggcattccagaagaacatagtggccttatatgagcttggtcagaacttcttttggctatctgaatatgtaaattgtcattggaacacaatgaaagtgttttatgaagtgtatttgatggataagtgagtaaatcaatgaaaagcttgcacatagttttttttacaataactacttacttgaatgtgtacctttgtgatgttgctgatattttagaggtaacaacagaacaaagacttctagatgaagaacactgacaagaactttgtataaattgtttattgtgatatttgcttatattaaaagtcatgtatctatttctgtaatttgcagatagtctaacatcatttataaatatttaactgaagagttggcaatggcttttttaatatgaaaatattttcaaatgtgtgaaagccggttctgacaattaaaaaaaaagttttctatttagtttctacacatacaataaatatacacacttggtaattttgtactggtaacccgtaaagaattttcctgtcctattgcggttaccgttactgttaagtttgcatacagtaaaacaattttaccttaatgcattagtttattggaaatttactgttagctatgtaaatatactagcataattaaaatgttatttgataatctgaatgtaaatacacttaaaaattacttttcaattaagaaatgtcgaaggaggccgggcgcggtggttcatgcctgtaatcccagcactttgggaggccgaggcgggcggatcacgaggtcaggagatcgagaccatcctggctaacacggagaaaccccgtctctactaaaaatacaaaaaattagccgggcgtgtggcgggcacctgtagtcccagctacttgggaggctgaggcaggagaatggcgtgaacccgggaggcggagcttgcagtgagccaagatcgcgccactgcaccccagcctgggagacagagcgagactccgtctcaaaaaaaaaaaaaagacaaaggaaattcttctagttcctttaaggatttctctagcacaggatcagagaggatcttggttattggtgactggtgagattctgttgggtgtttggaagcttcaaatgcatggagccaccccttaaaaatgtctcactggaggcaggcacggtggcttatgcctgtaatcccagcattttaggaggccgaagcaggtggatggcttgagtatatatacttcgcgagcaccgtgggcaacatagtgaaaccctgtctctacaaaaagtgc

SEQ ID NO: 17045 - DNA, 1834 bp, Homo sapiens
ttacgtagatagttcggatgcaaatggtcatttggcttgaatgttctctactttctttgtatggatcttttgccaataaactggttatctgttaccagtaaaacagtccagattttgactctgaatctgaacgggttcactaaatataataacaaaaggaaatatttgtttccccttgatttcctcaactcacgtaattcttgaaacaaacccgtaacgtgggtattattttattcctattttacaggtgaggaaactgagctttagagaggtcaagtctatttttaaatttacacagctccattatttcagtaacagaactgacatttgaaaagcagtctaacttcagaatctattgttttaactattctagaaattaacacgctatagagaatgagcagacgttttgagacagaacttttaaaaaaaagcatttccatgataatcccctgctattcaaaatcaatgacaaaaattgctcgtcattttgttctttcttttccttcactagctatcagttctcatctgggaaaactactaacaacgtatggaatagtttcatgtaaagtatctagtatgaagttagacatcgatgatcataaatttcacttttttgggcattttagataaggagattatccgagtttataacacatagttcaatggaaattaggtttgataagacacaagtcaatgcgatatagtaaacagtagacacatcaaatgtgtcaaatttcagaagtgttgatattttaatagttatatcttttagtatctatagtgtgtaccaagttttggtttaatatctcctgataaccaacccaaaaaataagaaatgtataaaataatattctgtactccctagctaagtttttatgtaacatgtaataattatacctttgttacaaaagcaaacaagaaaaaagccctgaataattgtgttcccataagtagaacttcgggcagggatcactgattgcagtttgaaaaccagaagccccttggcaagagtgtgccactgttcacagcacttttgaggttcggaggttcagggctatttgttcaccataacgaagaaaagctcaaagcatgagatttattggcagaaaccatccatagcatgattgctgtcattttctaggaagatcaaatgaccaacatatttattttgccataggggggtagtcaaatttgttaactcagggttacacaatctcttttcctgtaaatagcataatcactgtgtataaatgcatattttacatcccacattttaactattttatattgttttcaaatcaacaaaacaacaaacaattttatattgtttcaaatcttattggcatactgtcacatgagtccccaacaaaaacatgtctttgcatttcagtttatagtttaaggggaaaatagaatgtatgtgatcaagtgttgtaagacaggtaagaacaggtcatgagaacccagataaggtagctaatacataaatctgaaacaaaatgcatgactatagaaaaagagagtcttgaaatacgggcaggttttcaacaaggggagagggaagtgattaggtagtgatactccagatgaagtaaaacctgggaagcaaaggctctgagtttcaaaaccacagggtgtgttggaggtcagtagcacagtttggctgagatgcatggtacttgttagaaaacaagattagaaaatattactgaaagtggccaggtgcggtggctcatgcctgtaatcccagccctttggaaggccgaggtgggcggatcacgaggtcaggagattgagaccatcctggctaacacggtgaaaccccatctccact

SEQ ID NO: 17046 - DNA, 2756 bp, Homo sapiens
aaaatacttagcccagggcccatcacacagtaaccaatattaagtgttggctcttagttactatgatatgctctgtcaagcatcaactgacctggtctacttccagtcaataggtagtctctacatggaagccaaataaaagatactgttgtccatatttcagcagagtggtttcctcaggggaggcagagaaggaatggaatcaagagcattacgtagacaggttcagttatatccataatataatttttatttgtctaagtggcagatacaaaggtatttgttagagtattttatctctttctggtgcctaaaatttttcattaaaaaatgctgtaggggtggtttggtttgtgcagtgaaaccacctatgttattcacaaccttgcgagagatgtatcaacagctctggttcagagatgaaaaagtgaggcccagaaggctcttccggccagccttcaaaggaagggctgaaggctcagtggtgactgtgtacatcaaagtggttaggcactatgcagtgtaagcagtggtcatattacatgggactatgtttgaaatcagtaagaatgaaaggcagaataacgttgaactccatttaaataaatgactggggcaaaatatggaatctgatttttcttggagggggggattgagtatcaaagtgtgtattccaataaagtatctgtccaatgtgacacttttcaagtgcctaagaccctacgaggccacggccatcgctgcctgttctaccttagctttggctctgccgtgccctggcttccctggctttgccggtggcccgtccacactggcatatgtccatgcaggtctagagaggcctcttatttcttttttatgtgagtctccattctaaatgttatcatcttaattttgtaccacatattgttttttcttgtttggatgatatcaccgttgctacaataaacaccttccactacaattcatcttctgctttattacacgttgagttgacagaatgccttccaaacattcctttctacttaccctgtgagcttttggccatgttgtacctgagaactgttgctaacttgcggatttcgggcagattacactgaccagagtccacattcactttttattcttacatcctaacaggtcagtgtatattactttcagtgactatgagagtgtacagggactgcctgcctttcggtataaagttcctgcagaaatattagccaatacgtcagacaatgccggcttctgtatacctgagggaaactgcctgggctcaggagttctgaatgtcagcatctgcaagaatggtaagaactcagagaggggacatgataggggtgtcaagaatgcagaaggattggagttcaacaaagaatatgtagctgggcgtagtggcgcacacctacagtcccagctactaaggatgctgaggtgggatgatcacttgagcccaggagttcccaagtccatcctgggcaacatggcgagaccactgtctctaaaaaacaaaacaaacaaaaaagaatatattgtcagcccaatagaaagatcagtttctttcaagaacaatgtttcataacatggctattgaatggtaaaaaaaaatcatggcttttctgtgatgctttttatttctagaatgccatgttgtgtttttttttctggacagtggtttagaagtcttaacagtaataatagctcatgtttactaagcacctgatgtatgccagtcactgtcctaagtgctttacatatttacatgtagttaatgcctgcaaaacattaactgatttcatgttcaaaacaatgctaaggctgggcacggtggctcatgcttgtattcccagcactttgagaggccgagatgtgaggattgcttgaggccaggggttcaagatcagcctgggcaacatagcaagaccctgtctctacaaaaaaaaaaaaattaaaaaattagctgggtgtggcggcacacacctgtagttacagctgctcaggaggctgaggcagagagattgcttgaacccaggagttcgaggttgcactgtgctatgattgtgctactgcactccagcctgggcaatagagtgattccgcacctccccaccaaaaaaaaaaaaaaaagctaaaagaaaaagtggacaactcagttttaagaaagtacgtatcatggcaaagattctcagtgattttgaagcagagttagttttaaaccctgacacaaatgtcccagtgtttcttaatgtcagagctactctgctcctttccatgaatgaggcagaattatcagtggcacaactgacaaaactattttcttcatcttgaagagtagttttaacagccacatgttgcagagttattcacaatgaacttactagatagtagacattcagcggcctgtttttataattggggaaactagggctcagagagggaacgtgattttgatgcgactcctccctctgagcagatccctggcggaactcagggtcttctcatatttgccctgtgattccctcttgggctgtaattcctctttaaaatttccctggagagctctctgtgtagtccctttctcctgaatagtaatgtgctcacttttgctcccttatctatctcattttaaaatctcctttcaggcctggcatggtggcgtgtgcctgtagacccagctactcaggaggctatggtggaagggtcgtttgagcccagtttgattctagcctgggcaacatagcgagactccatctttt

SEQ ID NO: 17047 - DNA, 2053 bp, Homo sapiens
gaaagaaatgattcatttcctacttacagactttttaaagccacattcagtattctcactacctctaggttttgctaacatctactttggttagcactagaaaatttaattttttttgtcaggaaagcacagtaataaattgcctactgttgcctaccacaataatgaaagtctgaaataagtaggaaatgcattaagttacccacatgtccagagtaggcaaatctatagagacagaaagattagtgattgcttagaaatggaaatatgaggctgggtgccgtggctcacacctgtaaccccagcactttgggaggccgaggcgggtggatcatgaggtcaggagatcgagaccatcctggccaacatggggaaaccccgtttctactaaaaatacaaaaaattagccgggcgtgatggcagatgcctgtagtcccagctacttgggaggctgaggcagaagaatggcatgaacccgggaggcggagcttgcagtgagctgagatcgtgccactgcactccagcctgggtgacagagcaagactccgtctcaaaaaaaaaaaaaaagaaatggaaatatgagggtgaggacccagtgaatgacaggtaatgagtatggagtttcttttaagggagacaaaaatgttctaacattgattgtggtgatggttgcacaatcctgtgagtatactaaaatccaatgaattatatactttaaatgggtgaattatatggtatgtgaattacatctcgaagtcattttttttaaatgatggggaaatcaaagtctgaaaataagacctgcttaaaagaaattttgacagtcgatgttgatattaactactttttcctgaaataataaaccataatccttttccagaccttcatcctcttttcctaatacattttccagagaaagcaatggaatttgagaagatggctaagttcagatttatacaaactagatagaaactttgataatagtttgcaactgttgatattttctatcagatagaatactgaaattatcctcagtagtaggcttttcctctttgtgaggaaggaaacattggtagattttgttacttatcttctatagaaaatgactatagttatacagatgaaaagctgtactttgactacaaaagggaatgcaggagttattgttgggtgctacttagttacagcatactcccatttcatatcccctccagttaaaagctttgagattcatctagaacattactccaggtgactgacactcttaaacattgagcccattttcctgtatctagtgctgtttggcgatattcttctggactgtaaggaaaaagtggatttggccatacagtatcacatagatggattgtttttgctgtggtctatgaaaatgagccacatgctatcttttatttatttgtttggttatttttacagcttatctcactttggtggaagtcttcttgggctttcaattttaaagttttagctaattggatgtcttggacctgttttatttcagggttaccatccattgacccatcaggcagctccccatcttcctcttctgctcctctggcaagtttttccggcataccaggaacaagggttttcctgcaagggccagctcctgttgggactcctagtttcaacagacaacatttttctccccatccttggacaagcgcctcaaactcatgtaggaatcctggaggaactcttcccaaagagttttgaataagttattaaatcatttatttcagttacaacaccatgttgtaactttagtaaactaagtggtatacagatgcccaaggtttgttctgtggtcatgtgaaaaaattgtcagtcatttttagcatagaaaacttgagaattattctttcaagccaaaaatgttttacagtagaacttggatcaagaaaagaggtactaggctgggtgcagtggctgacgcctgtaatcccagcactttgggaggcctaggcaagaggatcgcttgagcccagcagttggagaccagcctgggcaacagcaagaccctgtctctatt

SEQ ID NO: 17048 - DNA, 2091 bp, Homo sapiens
tattcttatctgcattttgttagaagaacacagttaataaagtgggtgtggggaagaaaacagtgcaggagaaggagaactggaagaggaaccagagtggcttgagttatctagtaaagtcttcattgcatgatgtgaccagctctcagaggggcatctaatacagagcagtttagtttaacctcagaaggtcatcagggtgctagaatcatgtcccattttcatggtaattgggcaagactgggaaaatgttttgggaatacacattttatcttccacttccagcagtggcttctaaccactgaggactctccacgttaccaatctctactgacctacctcaagctttgtaaaatcttatttaccgaacaaattacatttttaagtaataattaagcccccccttttctgtagagatatataataactgttaacctggggtcatttttatcgggctttatataattccaacagaaagcaaaggactgtgagtgcttaagttagcctgagcagtaaagaggcttttagacctactgagaatagtttttggattcacattaccactgcttgacctgagactcgatttgggagctagaaactaaaaccagttatgcctttccattgaatagatggaggctgggaggctcgggcttgtctagcttgtagggactcaagggcactttggtcgtgtcacggtgctgctttctctcctgcgcgagcctcatacttgctttctctgttgaatggtaaaagccagcctcttgtttgctattccggggttagaatttcaattccttttttaaaaactctgtttagatcagaaaccatccagacactcattcagaaaccatctggggaaggtatgacttgagatagaaattgaagagatagagaggaggagaagaagatagtatacgagttagtttaaatgaccccagatgagtttggccgggaaatcaactgcagaatgcatcctctgtccctggcctgtatccctcaagggcctttgatagagtcttggcttagttgcagccacttttcctctagaactttaactcagtaaaggtgtgcagtaaaaatggggaagagggatgaggaggagccaggagagaatcgaggaagagcaaatattacgagcgtagaacgcgaagcttggcatgtctgcctggttccacttactcacgtttgttgagctccttctatgtctgaagctgtttctaaaacgtcagtttctagaaaacaggatcctgaattcagctaagcatgattcccagggccatccctgggaagctgtcctgaagatgcctcctgctaagacgggttgcggaggggagtcagtggctgaaagggtgatttcaggatagattgtcctggcaaataaggaggggtcctctgcatgaataagcagtgtaccctgccaaaggaagctggcaggaggtgattcctgctgaagcctgacagtacatgtccaccctgaactcatggccttggatgcagaccggccaactgtacacagttgagcgaggaagtggcgacagcacggtttgaatctggctgataaaacagatgttcgggggaagggctcttattttctcccagttataggatcgggggtgggggaagaaaacctaattccctatctgccaaatgtttctgttggtaatgtcctggcaacagtgagatgcccccaagaatggagtggttgaaagttctagctatcgactcagccctggatgtaaattctgaattctgtgtgaccttgggcaagttacttaacctctctgagtacccttggcctcatctgtaaaatgaggataatgatacctacttttggcggggtgcaggggcttgtgcctgtagtcccggcactttgggaggctgaggcaggtggatcacttgagatcatgagtttgagaccagcctggccaacacggtgaaaccccgtctctactaaaaatacaaaaattagctgggcgtagttgtgggtgcctgtaatcccagaatcgcttgaacccaggaggcagaggttgcagtgagccaagatcatgccattgtactccagcctgggccacaagagtgaaactctatctc

SEQ ID NO: 17049 - DNA, 1710 bp, Homo sapiens
atgcggcggcgtggtgaaatagatatggcgaccgagggggatgtggagctggagttggagactgagaccagtggaccagagcggcctccggagaagccacggaaacatgacagcggtgcggcggacttggagcgggtcaccgactatgcagaggagaaggagatccagagttccaatctggagacgggagaaagaactggcaaaagtcactatcaagaaggaagatctggagctaatagtgagtggtagtgcctaactagtgtatgcggaggggaggctattctgcttaatttgggttgtttcctgaaacaagcggagtcagtatatttggtggcacattaatgcctgggaacctatgtaacatgatttttttctgcagatgactgagatggagatatctcgagcagcagcagaacgcagtttgcgggaacacatgggcaacgtggtagaggcgcttattgccctaaccaactgatgcgtgctttctcaaatatacctactggattaatttatggcaataaaatttttttttgtctttttcagttttatcatcttgggtcaagtagagtgtatactatatcctatgttgtggagaatttatatgttggagactaactgaatttaagtgacccattaaaatctagcacacctgtatgaaaaatcagtgtagaagaatacctcatgtgcagatgctaggtggcaggccagtctcattcatctgactagctctcaacagtattcaaggtacatctggagtctcagcagagttactgtactcaaatggcatgtgtctccaagacagcttatgaatatctaaaaggccagctacctgcctaggagccactatatatatagatagatgtaggttatgaacccagttcataggccaccttgagttagaattttggtacctacaacatgcttgattttgagtgattaaaaaaaaataatttggctgggtgctgtggctcacgcctctaatcccagcactttgggaggtcgaggcaggtagatcacgaggtcaggaattcaagaccagcctggccaacatgtgaaaccccgtctccactgaaaatagaaaaattagctgggcatggtggtgggcgcctataatcccagctattctggaggctgaggcaggaatcgcttgaaattggaaagcagaggttgcagtgagctgagatcacactactgtactactgtactccagcctgggggaaagagtgaaactccatctcaaaaaaaaaaaaaaaaaaaagcccgggcacagtggctcacacctgtaatcccagcactttgggaggctgaggcagtcggatcatgaggtcaggagttgaagacaagcctggccaacatggtgaaaccctgtctctactaaaaatacaaaaaaaataaaattagccaggcgtggtggtgcatgcctgtagtcccagctactcaggaggctgaagcagaagaattgcttgaaccagggaggcggaagttgcagtgagctgagattgtgccactgtactccagcctgggtgacagagcgagactgtctcaaaaacaaaacaacaaaaaagaatttaggggccaggcatggtggctcatgcctgtaatcccaacaccttgggaagctgaggcaagacgatcacttgagcccagcagtttgagaccagcttgggcaacacagtgagatttcgtctctaccgcgctccccccaccacc

SEQ ID NO: 17050 - DNA, 2252 bp, Homo sapiens
  CDS (451)..(1269)
catgcagcgcggctgggtcccgcggcgcccggatcggggaagtgaaagtgcctcggaggaggagggccggtccggcagtgcagccgcctcacaggtcggcggacgggccaggcgggcggcctcctgaaccgaaccgaatcggctcctcgggccgtcgtcctcccgcccctcctcgcccgccgccggagttttctttcggtttcttccaagattcctggccttccctcgacggagccgggcccagtgcgggggcgcagggcgcgggagctccacctcctcggctttccctgcgtccagaggctggcatggcgcgggccgagtactgaaagcacggtcggggcacagcagggccggggggtgcagctggctcgcgcctcctctccggccgccgtctcctccggtccccggcgaaagccattgagacaccagctggacgtcacgcgccggagcatgtctgggagtcagagcgaggtggctccatccccgcagagtccgcggagccccgagatggggcgggacttgcggcccgggtcccgcgtgctcctgctcctgcttctgctcctgctggtgtacctgactcagccaggcaatggcaacgagggcagcgtcactggaagttgttattgtggtaaaagaatttcttccgactccccgccatcggttcagttcatgaatcgtctccggaaacacctgagagcttaccatcggtgtctatactacacgaggttccagctcctttcctggagcgtgtgtggaggcaacaaggacccatgggttcaggaattgatgagctgtcttgatctcaaagaatgtggacatgcttactcggggattgtggcccaccagaagcatttacttcctaccagccccccaatttctcaggcctcagagggggcatcttcagatatcctcacccctgcccagatgctcctgtccaccttgcagtccactcagcgccccaccctcccagtaggatcactgtcctcggacaaagagctcactcgtcccaatgaaaccaccattcacactgcgggccacagtctggcagctgggcctgaggctggggagaaccagaagcagccggaaaaaaatgctggtcccacagccaggacatcagccacagtgccagtcctgtgcctcctggccatcatcttcatcctcaccgcagccctttcctatgtgctgtgcaagaggaggagggggcagtcaccgcagtcctctccagatctgccggttcattatatacctgtggcacctgactctaatacctgagccaagaatggaagcttgtgaggagacggactctatgttgcccaggctgttatggaactcctgagtcaagtgatcctcccaccttggcctctgaaggtgcgaggattataggcgtcacctaccacatccagcctacacgtatttgttaatatctaacataggactaaccagccactgccctctcttaggcccctcatttaaaaacggttaactataaaatctgcttttcacactgggtgataataacttggacaaattctatgtgtattttgttttgttttgctttgctttgttttgagacggagtctcgctctgtcatccaggctggagtgcagtggcatgatctcggctcactgcaacccccatctcccaggttcaagcgattctcctgcctcctcctgagtagctgggactacaggtgctcaccaccacacccagctaattttttgtatttttagtagagacggggtttcaccatgttgaccaggctggtctcgaactcctgacctggtgatctgcccacccaggcctcccaaagtgctgggattaaaggtgtgagccaccatgcctggccctatgtgtgttttttaactactaaaaattatttttgtaatgattgagtcttctttatggaaacaactggcctcagcccttgcgcccttactgtgattcctggctccattttttgctgatggttccccctcgtcccaaatctctctcccagtacaccagttgttcctcccccacctcagccctctcctgcatcctcctgtacccgcaacgaaggcctgggctttcccaccctccctccttagcaggtgccgtgctgggacaccatacgggttggtttcacctcctcagtcccttgcctaccccagtgagagtctgatcttgtttttattgttattgcttttattattattgcttttattatcattaaaactctagttcttgttttgtctctccgaaaaaaaaaaaag

SEQ ID NO: 17051 - protein, 273 aa, Homo sapiens [sequence omitted]

SEQ ID NO: 17052 - DNA, 1969 bp, Homo sapiens
  CDS (571)..(882)
gagctcgcggcagtacggggagcgcccgcccgccccgccctggacccaaccaagcgtcccgcggaggggtgcggccacttgggggcaggagaaagcggagtacgccacccctctagggacccaggaagcgaggcgagcctcaggtggacgcggtggtgtggaccacggcgatcagggcctttccccctgctgtggagacggaggtgcgaggggacgccggcggctccccaccttctggccgagtggccttctccgcctccggctggactccctcggggcgctccctccagagccgagtcgggctggccgggggcggctgtttggcctgagtgtcgtcttactaaagcggaacgccggaggggaggccactccgagagaaggcggtccccggcggaggtggcttcgtgaatcctgcagccccctgcccgcccgccactcgagacgccgcgcctcgtgggtttcacgctggatggagggggcgccgccgaggatgcccagcctccccctctaattctacctctccagttcctcaggtagacacagcctctgtctgctgtggttttagtgcccatggcccctcagaaattatttttgtcccctcccgatagtggctttgggggatggagggcgagagatgcaaagggccagtggaagattttttatagcacaaggaatcaagccaggagatggaggtttcattgccacctcggggtctggggagggggcgagccacacctctccggtcagtctgcgcccaccaggacctgctgctgggaaccgcacacgaaaggagagacacccagcacctggcccctagacccgcagggcgtcaacctcctgggcttctgcctttctaggtttcctctgactttgctgacccaatgacccctggccacgggtggcaaaaacgccctcactgagcccttcgctaaaggagtgccggggtttatgtgtctggcttttaaaatgggatgaggagacaaggaaacaggacctgagaaaggacactatccaaaatctgatgctctcagaagtcaactttaaaactgccctgctccgcggtggctcacgcctgtaatcccagcactttgggaggccgaggcgggcggatcacgaggtcaggagatcgagaccatcccggctaaaacggtgaaaccccgtctctactaaaaatacaaaaaattagccgggcgtagtggcgggcgcctgtagtcccagctacttgggaggctgaggcaggagaatggcgtgaacccgggaggcggagcttgcagtgagccgagatcccgccactgcactccagcctgggcgacagagcgagactccgtctcaaaaaaaaaaaaaaaaaaaaaaactgccctgctcttttcatccaaagatgaatatatgaagccagctgttactggttgaaagtgtgcctcttgtttgcatggcaaaggaattcagttttgtgtttatttacagctgaagctctcttgaaataattgtctcagtcacagcttttacattttggggaaccatgccattagaactgaatattaggaactgtgatcttttgtcttttcacaattgacaatacattcagaacttatttctgataaaactgggcagtttctaaggatactgtacttatgatttaaagtcataactccatgatgcaaaagagaacaagaaatatgtttcaatgactgccttttaaattagcggtactccagcactttgggaggccgaggtgacaggatcgtttgaggccgggagttcaagacagcctgggcatcatagccagaccttgtttctactaaaaataaaaaataaataaattttccgggcatggtggcccatgcctgtagccccagctactcaggaggctgaggtgggaggatggcttgggcctaggaggttgaggccacagtgaattatgattacaccacgggactctagcctgggtgacagagtgagaccctgtctg

SEQ ID NO: 17053 - protein, 104 aa, Homo sapiens
MAPQKLFLSPPDSGFGGWRARDAKGQWKIFYSTRNQARRWRFHCHLGVWGGGEPHLSGQSAPTRTCCWEPHTKGETPSTWPLDPQGVNLLGFCLSRFPLTLLTQ

SEQ ID NO: 17054 - DNA, 2282 bp, Homo sapiens
ttctttaaattctacaaagagatacacttcccccaaatacatttactttactgacagcaaagttagtttccatttggaaaagttatcctgtttccaacatcgagttatctctgttgccagaaaatcaaaaggcagccaatccgatttgtaaacctttcctctggcacattgtcaagatctcttgcaaaacgaaattgtcctacagccctcccctcccctgtggctctaagtgcagttctgccccatctaaatattaatattttgcaatcgtgctctttatgagcccctggcagagtggagatacgccacagacgggttgaggagagagtcgtggggaccacctggccagtggctgtggtcttaatggagattgacaagcccaaaggaggtttgcaaataccctgatgcctgcagccggctttgcatccagcagctccctccacagatttacagtggcctctattgtccttgaagagctgcttagaaacaaggttgcaaagctttctccttggggccttgggaaggctggatgaaccctcgcgtctccacctgatagggctgatccaagtgtttctgggtggtggttttccacactggttttatttaaggtctatcaacaggtgctgagtgtgaggcagggaggcaagtgtttttctttttttttttttgagacggagtctcgctctgtcgcccaggccagactgcggactgcagtggcgcaatctcggctcactgcaagctccgcttcccgggttcacgccattctcctgcctcagcctcccgagtagctgggactacaggcgcccgccactgcgcccggctaattttttgtatttttttttagtagagacggggtttcaccttgttagccaggatggtctcgatctcctgacctcatgatccacccgcctcggcctcccaaagtgctgggattacaggcgtgagccaccgcgcccggccgcaagtgtttttctgtgggtgtttcttccttttaaccaactgcaccacatgcttctggtttcaaagcagaaatttcttctctgccactttcatgttttatgtcttttgacttataggagtgccttagttgaaattccatgaaaagggtgtgaagtgtggatcaccttgcttagactctgttaggaggttgagtgcttgtgcaggctgggagagcatgcacttcttttcaggaggcaggtgaagggagcaggtgggatgaggcagaagactggccagaaagaacacttttctccccatgagttttgcagttagacagaagtagtaaggacgattgtgaagttcttgaaagtgagaagagagaacatgttcctttgaaattaaaactcagtttttcctgatttttcacgttagctaaaacgtgccaggaaacgggcttttcctgatttctttttttccctagtacaataacataatgactaaatttggaaaagtactttgcagttttcagagcactttgttattcacagtaactgcagagatccccccgttttagatgagaagggaaactgaggtgtgaagaaggaaaggaacaggagagaagtgacaaagatgagtaaagtattggtaatttcttttctctgggagttctaacattctaacaggcttgtagtttaagacgtttctagatagcagattctcacacctaactcactatattttccaaacttatctaactataagaatccgctggtgtgcttgttcatatacagattcttaggcccatcttctagttattctgatttcagttggtctggggtgatctaggagtctgctttttttaacaaggtcatgtggggattcttatctcttggcatgtttgggaaattttacatagccggcagctgaagtgcacatggaaataagttgtccaaggtcacgcaatctgaactccctgatccccacctggtgtctctggtccctgagcccacatccccctaccacccactgttccacagctgccttcccagggacacagagtttgtgatcaatactgaataattctgccacgtctttattgtcatgccttcatcacctactacgtatgaagctgtccagaaacaggagggatttaagggtgagggagagaatgaagaagacagacacaggcataagagacaaaaagaaacctcaatgttattaaaaattcaagccaggtgtaggggtgcacacctgtagccctagttactagggaggctgagacgggaggattgcttgagcccaagagttcaaggccagtctgggcaacatagcgagcctgcctc

SEQ ID NO: 17055 - DNA, 1742 bp, Homo sapiens
gaatcattaggaggaaatagctgcaaacctggaaacgtccctggagaatacttaattcaggaataaaggtttggattgatgagggctaaaataaaacttggcagcgacagcattctagtaacttttagccacttctccccatctcactggggtattcctgctggtatattcactagcctgagctctgctcctgagagggctgcaggagctgggtgggttgggagacacaggtgtgtgggaggcgccttcaccaagtgccgcacaattgccgggtacccctctgtgcctttaactggtcggtaaacagaaagcaggatgtgcttatctgaatagtgacaacagttgcaagcactcagtcacaaagttcagcattctggctttagatggaccagcgtggggctctggaagctggtgacttgggagtgcctgccgtacacatgggtggggaagggatggaaagtttagcaaggacttgccgagttattaagcaaagactctgtaagtgcgtcagaatgggaaggcagctcagaacctttccacttcaccctttttgttgttggaaataggtaaactgaggccagtgaacaggaatgtgtatttcaataataccaaagctaacttctatcactgtgagttgtgtgccaggccctgggttcactgccttctgagtgttatctcttttaatctctgccacagctctgtggggtaagcactggtgttatacccatttttcagataaggaaacagagcctcagagagtcaggttacttcctcaaggtcatagaactagtaagtcacagacctagggcacaggagcaggtctgtgtgggggtcagagccacagctgtcccccacacgctgggggcctcctccacaaagtggtttcaggtggggctcagcccacctctgggggaacccattcatatactatgcaaggtttcacaggtgtgtgaattcattttccattgctgcgtaataaattaccacaaacttaatagcttcaaacaacacatatctgtcattccacagtttctgtggaggccaggcctggttttcctgagttctctgctcagagtctcacaaatctgtactcagggggtcagcctgattatggtctcacctgaggcttgggatccccttccaaactcactaactgttggtggaattcaattcatgcagggagagcactgaggctgcaagctcatggagaccacccactgtttcctatgtgtggccctctccacaacacagccctttgcttcttcaaaacccaaccaaagaatctctgtcttcaggaacagcctccgaccctctttgaaggggctcacctaattaggccaggcccacagaggaaaagctctcttttgattaactcagagtcaactgattagggactttatacctgcaaaatctcttttgccacacagcataacttaatcaaaggaatgtattccatcccattcatggatcctgcccatactcaagggaaggccataatacaagcatatggtcattaggggccatcttagtcactactgttcgtggattgttctccagcttcctggaggagaggagagcaggagacagagctaagagtgtttgtaaaatagggcagtgggaaaaggtaggtcttgtgagtagcaggctacttaagatgcctagtgggtctaaatgtcaaatgctattggcagattttccgtgcaaggtatgaccaaaaaataattatttcattaactttgtgc

SEQ ID NO: 17056 - DNA, 2793 bp, Homo sapiens
tatgcatttggttattcataatcagattttgttctgtgggttaaagttgaataatattttttgaggctcaaattgttctagctttgaccattttgggagctccttccgtttgtctcctgtgttcttctggtaagcccctgccatttttttttttaagtgtttccttaatttcctttactacaaaatattccaggctcatcttgtaacttcgctgccccagccctagagtcaggcacttctccacggagtcctgctttcctttattggagaatgctgtttagaaaccaaggtctggttgctaggtatgttcattgctacagcagttatcattgcttctgggtcctctcagcagacaaagctaggaaacagataattcagcacctatctgtatatatgtatgctaaagaatatgagtttgtactgataacgcttattctgatctaacctcaaaaagttcgttttattttagtctttcccttttcatgatgacttctttctccaacagtgaaaaaccctctcagtcattttcttagttggggtgaaggttattttccactggttttgctcctattatcgtggccctgattaacacacatttccacatgtggactatagattatttgactcaactcgcctttgagatgataacatctggaggcagaggcaagtgtttctgattttacatactctgtgattctgcacccagagctgcactaggatgtactgaatgcttgatcagcatcttacctgctgaataccccatttggatctgtgcccgctcggctatgctctccctctctgcagttcacaactctcctgccaattgtatttgtcttaaacaatactcctttcccgttcctagctttagaattctttgtgagatgagaactgtagcctaatgttagaagctctaaagcctgcccggtccaagatcagaaaccactaccactcatttccataccacctgctcttggtaggcatgtgtcagtagaatggattaattggaagtaaactggaataggacagagtgcagagacccatactgcctggccctgccacctgtgaccagaacttgtcacttcactgctctggggagtggaggtctatcagagaaggcaagtgtgttagtatgacacacttagtggcttgaaacaacacccgtttatcatttctcaattctgtaggccagaaggctgagcattgcatgactggcttcattgctgggggtcctagaagactaaacttagggtgtcagttgggttttcagggcctctgccaggctcagatggttgtggaaaattcagctccttgtggctataggactgaggtcccctgccccctcacccctattttccattgctggctaccaggcaggggccactctcagttcctagaggcccccatatttcctttccatgtggtctcctccatcccctgtgacacagcctgtctcccacattgagtcctgctcatgcttcagctctttttgccaagaggagccatccttgtaagggctcaccagctttgttctggcccactcaacgtaatttcccttctcaggtcaactgatgtggtcagcaaatacctgcaggctcacttttgccacataatgtgccatgatcccaggagtgacgtctcatattcatgggtcccgcccatacacagcaatgagggtcactggagtcactcttagtgttctgccagctgcagctgaacatgatcaggtcttaattctggcaccaaagtatttacctgtggatctgtgtcccatggttcccctgacaagataccagaaacttggtggcttaaaaacgacagaaatgtattcttataggtctggaggccagcagtgtgaaatgcaggtgtcaccaggaccatactccttctgacagctctaggggagaatgcttccttcttttcccagcttttggtggctcctggcattccttggcttctggctgcaccactcccatctctgcctctgtcttcacgtggccttcccctgttggtgtgtgtctgcatgtccaaatctccctctcctttctcttataaagacataggtcattggatttagggcccatcgtaaatccaggacaatttcatcttgacatccgtaactgattttatctgcaaagtctctatttccaaataaagtcactttctgagatttcaggtggacagttatttgcggggatagtattcaccccactagattcagggttgtgggaagtgttgcttactaaactctggttcacggagctgccaaagaaaagagatttatttttaaacctaggagagaaggcaagcttggctgctgtggaggctggggcccatcctcagaccatctgctcccctcatggtgacacagatctgaaaaccaggtgggttgaaggctggcctagaggccctgtgtccttaagatccagacactttgcagtacagtcagctcgcagtctctgtctttgtggattcaatcaaccacggatggaaaatatttgagaaaagaaacaaaactggccgggcgtaatggcttacccctgtaatcccagcactttgggaggccgaggcgggtggatcacgaggtcaagagatcgagaccatcccggccaacatggtgaaaccccgtctgtactaaaaatacaaaaattagctgggggtggtggggtgtgcctgtaatcccagctactcaggaggccgaggcaggagaatcccttgaacccgggagcagaggttgcagtgagccaaggttgtgccactgcactccagcctggcgacagagtgagactccatctc

SEQ ID NO: 17057 - DNA, 1701 bp, Homo sapiens
  CDS (443)..(820)
aagatacaaaaaaaaattatccaggcatggtggcgcatgccggtagtccaggctacctggcagggcactgagataggaaaatcacttgaacccgggaggctgcagtgagccgagatcacgccacggcactccagcctaggtgagagcgagactctgtctaaaaaaaaaaaaaagcactcagaacagttcttggcacacagtacctgctgaataaaaggtggctgttattattgaaggggatatcacatatcaaggttaatggccctgtcctcaaggagcttatatttgtgcagatccatgcagatgaaccaagccagaagcaataaatgagcaaacaaatgtgatgcaaagtcagtaaggacaaaagtactgaaagaacacagcataatcatcctaaaaattaacaaccataatcaccgcaagccaataaacagatccaaaaatgttccactcagtcatttttttttttaggcaggtaccttggtccttagacaaaagtgagttagaatttgactctgactcccagaggggagacgcttatatcatttggcttcatagaggtgaattaccagacaagcaaagaactcagtgtattccaccactgacctgcctttgggaatgggtggctctgcagggcttcatcaagatgaagagctaccccagcagcaccaatgtggagaccgtcaacgatggtgctgagtcggccatgttcaagcagctgttccagaagtggtcagtaaaggaccagaccatgggcctggggaaaacgttcagcattggtaaaattggtgagactgcccccagatcatcctctcattgctaagactctagaaaagcaggcacagatgcttcttactcactcggcttttcccaaccctttctccacagctaaagttttccaggataaatttgatgtgactctgctacacaccaagccagaggtagctgcccaggaaagaatggtcgatgatggcaacggaaaagttgagatctggactctgcttttcttctctctagggtgggacttccaggaagggaaatgccgagcctgaccctccagtaagactcttccaaattcatggaaatgacaaatctaacaccaaagcagtggaagttccagcctttgcctcctccctaaactccaatgatgtctttctgctgcgaactcaggcagagcactacctgtggtatggcaaggtaggatggctgggccccgggtcagaccagcccctcggagcccagacctgcactcccctcctcctgtcagcaaggtcaaaggacctagagtaggctggagtgcttgctttggcagcacatatactaaaactggaatgatacagagaagattagcatggtccctgtgcaaggatggcatgcaaattcatgaagcgtttgatattaaaaaaaaaaaaaaaaaaaaaaagctgggcacggtggctcatccctgtaatcctagcactttgggaggctgaggcaggcaaatcacgaggtcaggagttcgagaccagcctggccaacatggtgaaaccccatctctactgaaaatacaaaaattagctgggcatggtggcacgcgcccatagtcccagctactcaggaggctgaggcagaagaatctcttgaaccagggggcggaggttgcagtgagccgagattgtaccactgtactccagcctgggcgacagggtgagactccgtctc

SEQ ID NO: 17058 - protein, 126 aa, Homo sapiens [sequence omitted]

SEQ ID NO: 17059 - DNA, 2880 bp, Homo sapiens
  CDS (110)..(1975)
gcgggtccgggtgaagcgggaggcagccagagtcggagccgggcccgagcaccaggcgcaggcccggcgcccgcctgcccgcaccctcgtcctcacagacgccacagccatggccatgatggtgtttccgcgggaggagaagctgagccaggatgagatcgtgctgggcaccaaggctgtcatccagggactggagactctgcgtggggagcatcgtgccctgctggctcctctggttgcacccgaggccggcgaagccgagcctggctcgcaggagcgctgcatcctcctgcgtcgctccctggaagccattgagcttgggctgggggaggcccaggtgatcttggcattgtcgagccacctgggggctgtagaatcagagaagcagaagctgcgggcgcaggtgcggcgtctggtgcaggagaaccagtggctgcgtgaggagctggcggggacacagcagaagctgcagcgcagtgagcaggccgtggcccagctcgaggaggagaagcagcacttgctgttcatgagccagatccgcaagttggatgaagacgcctcccctaacgaggagaagggggacgtccccaaagacacactggatgacctgttccccaatgaggatgagcagagcccagcccctagcccaggaggaggggatgtgtctggtcagcatgggggctacgagatcccggcccggctccgcaccctgcacaacctggtgatccaatacgcctcacagggccgctacgaggtagctgtgccactctgcaagcaggcactcgaagacctggagaagacgtcaggccacgaccaccctgacgttgccaccatgctgaacatcctggcactggtctatcgggatcagaacaagtacaaggaggccgcccacctgctcaatgatgctctggccatccgggagaaaacactgggcaaggaccacccagccgtggctgcgacactaaacaacctggcagtcctgtatggcaagaggggcaagtacaaggaggctgagccattgtgcaggcgggcactggagatccgggagaaggtcctgggcaagtttcacccagatgtggccaagcagctcagcaacctggccctgctgtgccagaaccagggcaaagctgaggaggtggaatattactatcggcgggcactggagatctatgctacacgcctcgggcccgatgatcccaatgtggccaagaccaagaacaacctggcttcctgctacctgaagcagggcaagtaccaggatgcggagaccttgtacaaggagatcctcacccgcgctcatgagaaagagtttggctctgtcaatggggacaacaagcccatctggatgcacgcagaggagcgggaggaaagcaaggataagcgccgggacagcgccccctatggggaatacggcagctggtacaaggcctgtaaagtagacagccccacagtcaacaccaccctgcgcagcttgggggccctataccggcgccagggcaagctggaagccgcgcacacactagaggactgtgccagccgtaaccgcaagcagggtttggaccccgcaagccagaccaaggtggtagaactgctgaaagatggcagtggcaggcggggagaccgccgcagcagccgagacatggctgggggtgccgggcctcggtctgagtctgacctcgaggacgtgggacctacagctgagtggaatggggatggcagtggctccttgaggcgcagcggttcctttgggaaactccgggatgccctgaggcgcagcagtgagatgctggtaaagaagctgcaggggggcaccccccaggagccccctaaccccaggatgaagcgggccagttccctcaacttcctcaacaagagcgtggaagagccgacccagcctggaggcacaggtctctctgacagccgcactctcagctccagctccatggacctctcccgacgaagctccctggtgggctaatgctgaaggggcagccagtcaccagagcgcccacctggcacacccccctcaccccagccctgcgcatgggcctgctgcttgtcccgcctgtctctcccacagcccctgtcttttctgttcaatctcagggtaaccttctcccttgtcatctcagcctgagccctggaggctgggcctgcccactccagctccatcccttatttattccttccagcagggccctcttccctaggttcgggccagcaggaggtgccggctggagtctccaccatagactcagtggcctggcctccccagaccccagagccaagaacactaagcactcgccggcccttcggcaccctcgccctccctcccgactcaacccggccgttgcttctgtatatagagaaataagttattggccgcgcgcctcccttcagtccacggtactacccgggcctcccctcgtccctcttctagtggtaccgcccaggccttaatcacccccattccgtgcggtggtatctcccaggctctacattctcgggagcggcgcctcccaagggggtcctgggaccttctcgcgctcctcctggcctctgagggatgcgtcctacccgcgccatcgccccgtggcccaggacggggacctccccttagtccgtcctcccaccgccgggccctgccccgcatcccggccttatgcactgcccctcccacccggccccgcccaggcacggccgaccccgccccgggcaccgcccaccgagccatcctgcctcgcctccccccacgcctgcagcttctcgcgaggggcggcgacggtcccctggtggcaggaggggctccccctgttgcgggtgaggcggctgctctctattttcagatgttgctgtagaaataaagacggtttaaatctg

SEQ ID NO: 17060 - protein, 622 aa, Homo sapiens [sequence omitted]

SEQ ID NO: 17061 - DNA, 2138 bp, Homo sapiens
  CDS (81)..(1613)
aacggcccggaagtgcggccttgtagtcggtcaggaggaagcggccacggcagagcctggtgcctgaagaggagtcggagatggcggctgcagaggctgtgcatcacatacacctgcagaacttctcacgctctctgcttgagaccctcaatgggcagaggcttgggggacacttctgtgacgtgactgtgcgcattcgtgaagcttcgctgcgtgcccaccgctgcgtgctggcggccggctcacccttcttccaagacaagctgctgctcggccactctgagatccgtgtgcctccggtggtgcccgcgcagacagtgcgacagctggtagagttcctgtacagcggttcgctcgttgtggcgcagggtgaagccctgcaggtgctcacggccgcgtcagtgcttcgcatacagacagttatcgacgaatgcacgcagattatcgcccgcgctcgagccccgggcacctctgcgcccacgcccctgcccacccctgtgcccccgccactcgcacctgcgcagctgcgtcaccgcctgcgccacctgctggctgcacgtcccccggggcaccccggtgctgcacacagccgtaagcagcgccagcccgcgcgtttgcagctgccagcgcccccaacacctgccaaggctgaggggcctgatgctgacccctcactgtccgcggcccctgatgaccgaggtgacgaggatgacgaggaaagtgacgatgagaccgatggcgaggatggcgaaggtggcggcccaggcgagggccaggcacctccttccttcccagactgtgctgctggcttcctcactgctgctgctgacagcgcgtgcgaggagccccctgcacccactggcctcgctgactacagtggtgccgggagagattttcttcggggagctgggtcagctgaggacgtatttccagacagctatgtatccacttggcacgacgaggatggcgctgtccccgaaggctgtcccactgagacccctgtccagcccgactgcatactgtctggatcccgcccgcctggtgtgaagaccccagggccgcccgttgcactcttcccctttcacttgggtgcccctgggccacccgcaccacccccttcagcaccatcggggccagctcctgcgcccccacccgccttctaccccacactccagcccgaggcagcccccagtactcagctgggggaggtcccggctccctctgctgctcccaccacggccccctcaggcacccctgctcgcaccccaggtgctgagccacctacgtatgagtgcagccactgtcgcaagacgttcagctcccggaaaaactacaccaagcacatgttcatccactcgggggagaagccgcaccagtgcgccgtgtgctggcgatccttctctctacgcgactacctgctcaaacacatggtcacgcacaccggcgtgcgcgccttccagtgcgccgtctgcgccaagcgcttcacgcagaagagctcgctcaacgtgcacatgcgcactcaccggcccgagcgcgcgccctgccccgcctgcggcaaggtcttctcgcaccgcgcgctgctggagcgccacctggcggcgcaccctgcgccctgatggcgctggggcctggcctcgcccacggtggatccggggcctcccgcacagtcggccacgcccgctgcgggacccgtggttcccgccactagaccacgctccctcctgagcgcaggtcctctctctcccttcaccctttctccataccagggcctaagtccgccttactcctctcctccatgtacttgaaccctccaggtggtgccgggctggggctggggctggttagaccacttctgagaactggactatttcctgcgtaaaccgggcgctcaggcgcttggacccggcccaagatttgactccggttctcaccccgccctctcctggggtggtggtgggggctggggggccgcttgcctgccccagggtcaggctgggcaaggtccctagctctctacccaagctgttactccctcatggggcgcctaaggagactcaagtggacccatcatatatgggggctgggcctcgggactctcgctctaataaaggactgtaggccatggggcctaaaccacg

SEQ ID NO: 17062 - protein, 511 aa, Homo sapiens
MAAAEAVHHIHLQNFSRSLLETLNGQRLGGHFCDVTVRIREASLRAHRCVLAAGSPFFQDKLLLGHSEIRVPPVVPAQTVRQLVEFLYSGSLVVAQGEALQVLTAASVLRIQTVIDECTQIIARARAPGTSAPTPLPTPVPPPLAPAQLRHRLRHLLAARPPGHPGAAHSRKQRQPARLQLPAPPTPAKAEGPDADPSLSAAPDDRGDEDDEESDDETDGEDGEGGGPGEGQAPPSFPDCAAGFLTAAADSACEEPPAPTGLADYSGAGRDFLRGAGSAEDVFPDSYVSTWHDEDGAVPEGCPTETPVQPDCILSGSRPPGVKTPGPPVALFPFHLGAPGPPAPPPSAPSGPAPAPPPAFYPTLQPEAAPSTQLGEVPAPSAAPTTAPSGTPARTPGAEPPTYECSHCRKTFSSRKNYTKHMFIHSGEKPHQCAVCWRSFSLRDYLLKHMVTHTGVRAFQCAVCAKRFTQKSSLNVHMRTHRPERAPCPACGKVFSHRALLERHLAAHPAP

SEQ ID NO: 17063 - DNA, 2452 bp, Homo sapiens
  CDS (312)..(2039)
ctgttgcttcccgtctcctcggcggctcccctcccccgcccggctctccgcgccccttctgggcggcggggcggcggagccgtcggcgtgcggccctccttgcgttcgtgcgtgcgcccgtggcccggcgcacgtcccgcgacaccgaggccgagcggggcagggggctgaccgccatgaccccccagagcccggcgtgagggggccgagatgcggtgacctgccagcacctgccgcagccttcgtccgggagtcgccccatctctccacgcatcggggccctgtgccccttgctgctgcagccgggcaccatgtcgacctcgtccttgaggcgccagatgaagaacatcgtccacaactactcagaggcggagatcaaggttcgagaggccacgagcaatgacccctggggcccatccagctccctcatgtcagagattgccgacctcacctacaacgttgtcgccttctcggagatcatgagcatgatctggaagcggctcaatgaccatggcaagaactggcgtcacgtttacaaggccatgacgctgatggagtacctcatcaagaccggctcggagcgcgtgtcgcagcagtgcaaggagaacatgtacgccgtgcagacgctgaaggacttccagtacgtggaccgcgacggcaaggaccagggcgtgaacgtgcgtgagaaagctaagcagctggtggccctgctgcgcgacgaggaccggctgcgggaagagcgggcgcacgcgctcaagaccaaggaaaagctggcacagaccgccacggcctcatcagcagctgtgggctcaggcccccctcccgaggcggagcaggcgtggccgcagagcagcggggaggaggagctgcagctccagctggccctggccatgagcaaggaggaggccgaccagcccccgtcctgcggccccgaggacgacgcccagctccagctggcccttagtttgagccgagaagagcatgataaggaggagcggatccgtcgcggggatgacctgcggctgcagatggcaatcgaggagagcaagagggagactgggggcaaggaggagtcgtccctcatggaccttgctgacgtcttcacggccccagctcctgccccgaccacagacccctgggggggcccagcacccatggctgctgccgtccccacggctgcccccacctcggacccctggggcggcccccctgtccctccagctgctgatccctggggaggtccagcccccacgccggcctctggggacccctggaggcctgctgcccctgcaggaccctcagttgacccttggggtgggaccccagcccctgcagctggggaggggcccacgcctgatccatggggaagttccgatggtggggtcccggtcagtgggccctcagcctccgatccctggacaccggccccggccttctcagatccctggggagggtcacctgccaagcccagcaccaatggcacaacagcagccgggggattcgacacggagcccgacgagttctctgactttgaccgactccgcacggcactgccgacctccgggagcagcgcaggagagctggagctgttggcaggagaggtgccggcccgaagccctggggcgtttgacatgagtggggtcaggggatctctggctgaggctgtgggcagccccccacctgcagccacaccaactcccacgccccccacccggaagacgccggagtcattcctggggcccaatgcagccctcgtcgacctggactcgctggtgagccggccgggccccacgccgcctggagccaaggcctccaaccccttcctgccaggcggaggcccagccactggcccttccgtcaccaaccccttccagcccgcgcctcccgcgacgctcaccctgaaccagctccgtctcagtcctgtgcctcccgtccctggagcgccacccacgtacatctctccccttggcgggggccctggcctgccccccatgatgcccccgggccccccggcccccaacactaatcccttcctcctataatccagggcggaagggggcctggctccatccggctgccccattccggctccctgggagatcagtgttgtgagtgcatgtgaaatgggggatccccacccccagtgcccttccccttcctggggcccactcacactacaccctcttcctttcccaccccacctccccggagagaaactggacatggggcctggggaggggagctggccagaggaggacccctttcccgtggcattagaagggggaggggtggctggggcccccacccattccccctccctccaaactcccaacccccagtcagtgtttgagcctcctcgttcccctcacgcacccgctcacgcaccctcggtgaatccttggtgatgattttggcaactttgggaataaatggcaattcccacgggcttggc

SEQ ID NO: 17064 - protein, 576 aa, Homo sapiens
MSTSSLRRQMKNIVHNYSEAEIKVREATSNDPWGPSSSLMSEIADLTYNVVAFSEIMSMIWKRLNDHGKNWRHVYKAMTLMEYLIKTGSERVSQQCKENMYAVQTLKDFQYVDRDGKDQGVNVREKAKQLVALLRDEDRLREERAHALKTKEKLAQTATASSAAVGSGPPPEAEQAWPQSSGEEELQLQLALAMSKEEADQPPSCGPEDDAQLQLALSLSREEHDKEERIRRGDDLRLQMAIEESKRETGGKEESSLMDLADVFTAPAPAPTTDPWGGPAPMAAAVPTAAPTSDPWGGPPVPPAADPWGGPAPTPASGDPWRPAAPAGPSVDPWGGTPAPAAGEGPTPDPWGSSDGGVPVSGPSASDPWTPAPAFSDPWGGSPAKPSTNGTTAAGGFDTEPDEFSDFDRLRTALPTSGSSAGELELLAGEVPARSPGAFDMSGVRGSLAEAVGSPPPAATPTPTPPTRKTPESFLGPNAALVDLDSLVSRPGPTPPGAKASNPFLPGGGPATGPSVTNPFQPAPPATLTLNQLRLSPVPPVPGAPPTYISPLGGGPGLPPMMPPGPPAPNTNPFLL

SEQ ID NO: 17065 - DNA, 1626 bp, Homo sapiens
ttgcattgtcaggtaaattgcctttttttctgtgggacgtcatcaaaaaggcttgaaaaacactgctggaatcaatttatcctgttttctattcttctgaatgctaattttttttccttgagccattctactttcatttcaatcatgaaatatttccaactggccttgattaatgctttaacttttcaaagaaaaaacacccacacacatctcagtagaaaatatggtgaactgaagatgatatttggttttcaaaagaaaagtttggccaaatgttctgcattgcatttctgaggcacacacaggagcgggtgccagggtatttgactgtaggtaagtgaacaaggagctatacagatagaatggcacggggtttgacagtaatcagaacaccacatcagaacacttgattgcacttcaactctcatgctgtgtttgccccaaataatcttaaaaattgtgactatatcgaataagttcacaatacttattaggatgtggtgaaactgaattatttgaagtaggaagacccgaagttcttcgcctatgagactggtgaagtgatttgtagccaacatgctccaacccatctattaagaaaactatggcatctattaagaaaattcaaaatcttaaacagagaaatccatatttagaaaacatggccagattaaatagggggtgggttattttcttaaatacgttttgtcaatttcacgtgaaaaatgaaaacccctagttcatgttacatattacatttctgttaagatgtatgttcctctgtttctaatagaagttgtggtggtttggaagtgaaaattgaatgtgagcacaggccatgtaaaggaaggagaaagtgtaaatgttaataacaggaaaactgaatttagctctcatgaggcagtcaaggaaatcattcattgaacatgttgggaaatacttttcatttggtgaccaaatacctacaaattcatttacaaaaaagaaaaatgaaagttacctcagaactaaactcagaaatatgtcccacatgggttcttgtaatgtttcttggtgaatgtctttatagaaagaagtgggcatgaaatgatgactcagtaattaaacacatgggggaagggaggctgtagaaaacactggattctatatttaaaatttcattcagttcactaatttgtttttactgaccaaagctttctatacctatgtagagtgtctgagaactagaagggcccatcagttgccactcggatgatccttttgtctcttttcagataaggccccagttcaacagcgtcctctgtgtcaatcagatactcccaggaatgagtgagccctgccgttttcccaagttgcccctcagcacattccagccagttccaaaacttttggcttgtttttgacacaaggccagataagctactcaaactggtttttttaaaaaaagaaaacaaccccaatctatattccttttttaatactgtgtacataacctgctgctcgaaagactaggttttcccctttccagctagttgtgttgtttctttatgtagacagctttaaatcatgtttacatgattcagccattttaaacaacctcttcctatttttttttcctttttgtac

SEQ ID NO: 17066 - DNA, 1651 bp, Homo sapiens
aacttaaatatattctttcccccaacagggttaatcatctcattttagtggagccttggggtttccctgaacgaccagaccttgctgatcaagacagaccaattccagtttggatcagagccttgggagcagcattgactccctttaaccctttagctggcctaaggattgcaggaccctttggtgagtgcttatgttctaggaaagcaaaatgtttgtaagttatgagaagagcagaattcactattgttagtcaaaatcttaaaaacaaacaagaaaaccctgaacccttactttttctcctcttcctctaataagtaccatgtcttgcacaaagacgaatgcaactaggttcttctcctcaaaggagagtctttatattgtaaacattgtgaataattagcaaagtagaaaaggagggaatgctgaggataaggttagtcagtcctcaacactctaaaaaaagccaggcaagcagagtgttttggggagtatataaggacctctgctagtccagggcctgggagaagtgtagcatgttgccctgctggtgagcactggagagcgtttggccaattgatgataccatttggtaccataaaacctgatttgattgaccctggggataacaggtaccaccacactcacagattcttcccttatccatgtcagagtgttggaaagataaagttattttttccacaacattttggggactcctgatatatatttctggtcatattttgaggcaccagtgtctagtccctgattgacttttatttgactctcagcagttctgtctcaaccccatagccatgggaatttccttccctcattgtcacagataatgatgttctgaacttctgtctttcccccgtacaacttgtatgaatttggagtacttttagttgtaagtaactgaatacccaagaggcttaaactagaaggacttttattatttccttaataagcaatctggagataggttttagcacttgttctggttgcttgctcattgatgttagggtttgggtctgtgtctgtgattttcttgacttttttcctcacggtggtttgatgcctgccatagcattaagcatcatctcacaaatcagcgccttgagcaaaaagaaataaaagcacgaaaaatggtccttctctccataatgctttgtcagggaagaaagtcctctctggaaggctccacctgacctctgcttatgactcggcccactcctagtccttccaccagcaaagaagaaatttctgtgatgcaccaatcatgatttgtttccagggcctgctttcctgggcatgttgctgcctaattgatactatagaaaagatgcgttctaaccaggtgctgtggctcacacctgtaataccagcactttgggaggctgaggtaggcagatcacttgaggccaggctttgagacaagcccggccaacatgacaaaaccccatctctactaaaaatacaaaaaaattagccaggcatagtggcacacacctgtaatcccagctactcaggagaggaggctgagacatgagaattactcaaacctgggaggtggaggttgtggcgagccaagatcgcaccactattctccagcctgggcaacagtgcaagaccctgtctcaaaaaaaac

SEQ ID NO: 17067 - DNA, 3277 bp, Homo sapiens
ggtttttgtgtagctgctttctctcacagtgtttgtaaacttgaacccaagtgcaccgttcacagtctccagctccagctcttcactaacacctttattccttgctgttggccttgggacccttactgttccccttgctgtgtagaaacagatgcagtcagacccacataagctggactttggactgaaacctgagttcctgagccgccctccaggccccagtctttttggagccatccaccacccccatgacctggcacggccttcaactttgttctctgccgctggtgagtgtgggtttgggtggggggacagagctgagaaatgtagttctcaggtaactaaataaatgaggtttgggctctgagctgccgctcagtcaccacctacaaaaatacagttaatgccagcttgcaaggcaacatcgcagcacatccagggagttgggaatcttcagtgatacactctctttcattaaaggaggaggcagagatcatctttcccttacagggattcacattgcttcggttcattatttgcttctatattaaaccagtataactcacaagcatgtcagttgctattgagaaagatctgaaggcttgcaagggcagatcggaaggaaacaatgccaggaattatagaaggatgcggtcgcccttaatacggtgcccgcagagcactgtaattttgcaccgggatgctcagtcatgccgtgttttaaagtcctgaggataaagaaaggcgattaaggcagttgccaggagtatggtctgtgatagggaggttgggccactcggttgctggttttctctgctacaaaacgtaatactattgcctggttggttatagcggtggaagaaatttaggaaacggtgtaaacaaacacccaagtgacctgctcatcggatctgtaattcatttaacctctgagaatacacactgtcaagtgtgcgtgtggaaggggtgaggtagagagtgacgattatgctcattcctgctccaggtacaaacaaaagacagcggctgtaaggactgtgtgtgtgctggatgagaacagccctcttggtattaagggtttcttgtcattctgtcttctctaaagcttttttaagtgtaatttctggcacacagagctcagctcagttaacacttaaaaatgatggcactgagctcattctgctaataacttcatacccactatgctaagtagaatttattcttctggacgtaagcagtcaaggggctccccatttctgatccttacgagacaagtcttacagccatcctgccagctgccaccccaggcttttatccaagactcactgttggtggacctctggctcttctgttcaggaagagagaagcacccacactgcaagaaatcatcattataatgggccttagctaccaaagcaagtgcgtccccctggagggtagatggaatttgctaaggtctcaggtttttctctgtcagtgctgtctggggacatatttgaaggctctgttaccatggcacctaggctctgagacagggctacatgaagagcaatttttggaaagaatagatttctctctggcttccatttgagccaagtggatgaattggcttcttttgcttcaataattctggaactgcaaggcacccctgggggccctgggctcagcaaagctctggtcttcattgaagcattaattagcttgcactacacagacagtatgtggccaaaattttatttagctgacaacactgctaacggcctgatgaatattctggaatatattcacttggtggaggcggggtatcatttttacacttcccaggtggaaaataagccagtatgtagggctgaatagataactcctcaggtgtcttccaattctgaactactgtgacggggatgatgttcctcctgtactgagtggcttcctctccaaacccaggccacaagacttttgcagcccagggaacagcagtccaaaacataaatcgagttaacagagtgtagacagcaacgacccctacgtttaatccattttcctaagggaatttatatttgtttataggaacttagacaaaatgcaaaggattatggaacagtttttagtaaattctttatccaggccttgtttatacttccattctagaatgtaaccttctttagcataagcagtatgggattctgcccaaaatagttatttggtgaaccttgtaactgatgtgtataacttgtacatacttaagaaatccagccattttcatcttgctattgggtgctaatcccatgaatataaactagagacttcttcagatgaccctggcaaatctctcgtctaggacaaagcctgccttccaggaagctagcctccttagctagtaagtagcctcgtattaacaagcccatttggtgccctaaggcctttagaaatgtccttccctaattcacatttgcacactctctttctctgtctccttccttccttcctttcctggcttccttcaggaacaggaatagaggcatcttcaagaagtacacattaggcaaaatacagagaagaggaggaaatgtggatcaagggacaactgaaggaaaccactaaattagacctgagttccctggcaggcaaagcaaaaacctgtcagagtcagttataagattttcagtgccccaaaacataagaatcaaccagcttttcctggcattgaaagttgagagacatcagaggacttcatctcctaaaacctaattgagctcacaataatgagttttatagagtcgggccttatagtatccttcgatgtgggtgcatgcgaactaacatactcttcaggagaagggattctgcaagtccccagagcagcgtagccaagaaccacagcttcaggaccacccctcctgagccagggatgataacgggctgggtttctggaagtgtttctcaaagtgaaaacttggtcctccgagatgctctatgaggagtggattccatgacgaaatgttcccctcttagagaacgaaggagcctataagcttattaataagcttattaatggctctaagaagcccttcagtaaagaaacttgcttagctttttttaatccagtatttctccaaatttacttggttataaagcctcccctcctcccatgacccagggcagttatctctgtctttgtaatactgtgtgtcatcggcttaaaaaagaaatacctgtttttggtggtggccagccacgctgggaaagagaaagagggatgattgattttctgcttcct

SEQ ID NO: 17068 - DNA, 1646 bp, Homo sapiens
gtgcctagccatcattccattcctcctccttcgcctctcataaaaagaaaatattgtgtacctgcaaacatatgctctgctatcagcattcagacacccaaacaccgaaatcatttagcagctcttactgctgtcagtaagcagatgatggcgtaaggggtttagaatttgatatgtgttttctaaagcatctctcaaaataggcattgtctatttcttgtttgttgcttgtgggaaatttttcgtcaagtgtacctgtacctaacccatgactaaaacttacctagatcttaatttctagatttaaaaagaagaaaaaagggatcaagtaaggaacagcgaagtaaagaatatctaagattaaaagtaggaatagctacaattacctagatttcaatttctgggttatttttagtgtgacaaagtaaagagtgtccaaaattacaaatctgagggataattcaaagatccttttttgttgtcattgttcctgggggaatatgtttcctgggggaaggagcatatctgactggtcccagggaagaaatgaagtagaactggtattgaagagatatctttctatgggaatccagcaaaaatactgggttccaagaacttgcttgcctggggaactcccagattctttaaaaaccttacatgtgaaatagcttaacataaatatataggtttagacatactgattgatgtttcagtgcctatttttatatgcatttatatcgctcaggtcatctattttccacttgttctattaagtcatggttttgcaaatggtcaccatttaaatataaggaagggacctattttgcttctttcatattcttcgacatttcctcaatgaaagaataaggaaagtttaggagtgagttacttagggtgtattctactctgaggatttcagttttactatagctgtatttaatcttatattaattgggcacttatattaatttagtgcctgtataatgttggcactgaaatggttctttagtgtgttgtgagaaaatttcaatgaagtcatttatagaaaactgtttttctcaagggaatttccctttccccttttcagaagtcagaggaaaaaaaaactggaattagagtatagagttagagataaagcgaaacgatggcagaatatgctgagacatttgctcaggggttaaaagacagggagtttatagaactcccttttctgcttgtcataaggttatctgttccttcttttggacatctctctagaggtgttcccaagctttgtatcacagattcttttatcgtgggggtcctaaactttaaccatttaaaaataaaaaccaagggttaccaaacaccttaatagagacttctctatgaagttacaagaagtaaacaaccatatggaagaatttgatgtgttctttgaagtcactgcttgtaagagaagacaacgtgtaatttttgagttactgtatgactcacgttggaaatgtttaaagccttctgtaggcatggtgtggtggctcacacctgtaataccagcactttgggaggccgaggcgggaggatcacttgcacttaggagtttgagaccagcctgggcaacataatgagactttgtctctacaaaaaaaaaaaaaattaaaaaaatt

SEQ ID NO: 17069 - DNA, 1855 bp, Homo sapiens
tcatgattagctttgccaaaccatctccctagattatttttctttttaaatttcactttgcatttggttaatcattccctgggaaagcacacggggcaggtgggcctccttgtcttcactttgccattccctatctgatgaattctgaacctcagtttttcatccaagaactggagttaaaacacctgcactattatacagggcgtgaggctgttgtcatgataatcaatgagctgatgtgtggttgaagctcttatctgactccatagatagttttaaactacctaagtataaattcagcagctttgcttaagatttaaagcaggtattataaatatgcattcctttgccgatcttttaatagaaggacaggcctattcttttgaagatggatctgctgatgagagctcccctttgtctactttacatcaaccacacccttatttcattgttttgtgattccagtgttggtttctttaaagtaaaggaagaatttagatatttgccgagccattctgaatatagaaacttcctagatcgcatatcccttgatcttttatcgttaatttactctcatctaattaacagcgttttgtttttttttttagaaattgacttttattaagtctttccaaagtagccaacttagttttcaaagaaaatttctctctatttttatgttcatctaatcagtgacagtaataagtcaatcagctcatgtaatcccagtaacaaacagcaggattgtggacacacacagtggagccctgatatgctgcagctggacagtgggagctgagcaggcagggcacccccccccaccgccggccaggactccaggccttcggtgttcagtcttgccatggcatcagtcattggttttgtatagggagcagagaaggttatttaatctggttagtcagataagtggagtttactcgtatgtgaaattgctttctttgctgtgctgtgaggagctgtacaaatataaggtgctgttactgattattcagccaacatttatggactaccaactctgtacctggcacagttttggttctggggtcagagatgacaaactcctaccctgggagtccactgagcgaccataccaataggtcatggcctcagagccgtgtggcccacggcccctgtgactctctctgctgtggacctttctcctagaacccgatcatcagccagttcttccccaccctcctgctctggtccttctcggccctgctcccctccattgtctactactctacactgctggagtctcactggaccaagtgagtgcccgggagccccgaggccctgcccctaagaaggatatctctgaccgctcccttgtccacaccctaaccccccagctgctcaggcagtgggcacatggcaggggcctcactgggggcacatagagcatttgggggactgcgagtgctcacctttgacttcctgcaggtcgggggaaaaccagatcatgatgaccaaagtctacatattcttgatcttcatggtgctgatcctgccctccctgggtctcaccaggtatatgccaccaccttctgctctaaattcagaataagagtcacatcaggagagcactgtccccaggagaatgcaaacggtttggcagcagaagcaaacctctaacaatatctaagcctgtcgcaaccactcggcgtgcagtagggctgggtcattgattcttctggcaatatgattgattgttcttctttaaaaaagaaaaaaacaccatattggtcaggctgttcttgagctcctgacctcaggtgatccgcccgcctcggcctcccaaagtgctgggattacaggcgtgagactctgtctc

SEQ ID NO: 17070 - DNA, 1622 bp, Homo sapiens
agccttataaatgcaatgactgtggcaaagcttttaatcgtagctcaaggcttacccagcatcaaaaaattcacatgggatagaccacttacatataaatgtgtatatatgtgaataaacctacagccttaacttacttattttatatggaatcgtttatactgacaaacatgtagaatgttggtaaaggttcagaattgctctcaagaatatccaacttcaggccgagtgtggtggctcatgcctgtcatcccagcactttgggaggccaaggcgggcacatcacgaggtcaggaggttgagaccatcctgggtaacaggtgaaaccccatctctactaaaaatacaaaaatttagctgggcgtggtggcaggcgcctgtggtcccagctgctcgggaggctgaggcaggagaatggcatcagcccaggaggcggagcttgcagtgagctgagatcgcgccactgcactccagcctgggtgacagagtgagactccctctcaaaaaaaaaaaaaaaaaaaaaatccaacttcatacaaaatgtatgtttatttcctgaaatgtttgaccttaacctgttcaataaagcctgtgtccctcaaaatcagggtgcagtctgcagttttgagttgacaggtccctgtgaatgaggaagcagcacaaggagggctctacgagcgctgctagactgagtaggttaaaataatttacctaaactcttttcccttaagtatcagtggctcacactggcttcaacaatacggaaatgcattagctcatgttggaggaggtccaggagtgcctagaattccaacttcaaattaggtccttgtcttagaacttaacccagccacccaggaccagagggcccagccctatccccttcctcagagaggcaggctgggctagcaggtacacgccatcattactggtgtggttggcatttatggagcacataccagtgccaggcacagaagcaaggtgtcacagcaaggttctgaggtcacacttgtgtcccaggggcttgctgtgtgacctaggacatcattgccctccctgaaactcagagccttatttgtgtatctgaaaacatgcactgtgagagggtactgagaggaaacaatgtagagaaacatgccttactgggcctgtcagagaacgagcactcaagcaaataccaacccccccatccatgccagcatctccagcacacccgtgtgcgcacaggccctgaggctgatgactgtcttgtactggcctagttgccccacttttttttggtaggggggaacgcggtgaggaggaaataaagacagtggagaaaaagacgaaaatgggccgggcgtggtggctcacgcctgtaatcccagcactttgggaggtcgaggtgggtggatcatgaggtcaggagatgaagaccatcctggctaacacagtgaaaccccgtgtctactaaagatacaaaaaattagccgggcgtggtggcgggcacctgtagtctcagctacttgggaggctaggcaggaaaatggtgtgaacctggggggcggagcttgcagtgagccaagatcacgccactgcactccagcctgggtgacaagagtgtgactctgtatcaaaag

SEQ ID NO: 17071 - DNA, 2151 bp, Homo sapiens
  CDS (48)..(1070)
gaggcctgaggcggcggcgcgaggcagtatggtttgaagtggtgaacatggatttttctcggcttcacatgtacagtcctccccagtgtgtgccggagaacacgggctacacgtatgcgctcagttccagctattcttcagatgctctggattttgagacggagcacaaattggaccctgtatttgattctccacggatgtcccgccgtagtttgcgcctggccacgacagcatgcaccctgggggatggtgaggctgtgggtgccgacagcggcaccagcagcgctgtctccctgaagaaccgagcggccagaacaacaaaacagcgcagaagcacaaacaaatcagcttttagtatcaaccacgtgtcaaggcaggtcacgtcctctggcgtcagctacggcggcactgtcagcctgcaggatgctgtgactcgacggcctcctgtattggacgagtcttggattcgtgaacagaccacagtggaccacttctggggtcttgatgatgatggtgatcttaaaggtggaaataaagctgccattcagggaaacggggatgtgggagccgccgccgccaccgcgcacaacggcttctcctgcagcaactgcagcatgctgtccgagcgcaaggacgtgctcacggcgcaccccgcggcccccgggcccgtgtcgagagtttattctagggacaggaatcaaaaatgcggtgcgtctttctacgtgaataggattttgtggctggccagatacactgcatcatctttttcatcatttttagttcaactttttcaagtggttttaatgaagctcagttatgaatcagaaaattacaaattgaaaactcatgaatcaaaagattgtgaatccgaaagctataagtcaaaaagccatgaatcaaaagctcatgccagttactatgggagaatgaatgtgagagaggttctcagagaggatggccacctcagtgtaaatggggaagcgctgtgtaagtatggcttcgttttcctgtgggcgtcggtcgtggagttggtcccacacgctgtcatgttgggtactagcagtagagaatgaacggcccgtgtgacatggtggtcctcactgatgacgacgggctgttggagctgctgcttaagccctcaccacagaagctcatagccaccagatcgcatttgctttgattgttgactgtctcgtgtgtaattgagtttcccagtttctacagactgccattgctatgcacggctgagatggacagagtttgcttgtgaatccgccacactcactgcctgtcaccacacctgcaggcgacgactgtaagggcaagagacacctcgacgcgcacacagccgcccactcgcagtcgccacggctgcccggtcgggcagggaccctctggcacatctgggcatgtgcaggttgtctctcgccccgtctccgtctcatctcgccctgtcaccatgctatttgtgtcttgtgtggtttgtgcttggaattcaagtgctttaaagtcttgctgtaaaaactgacaggaatagtattaactttggtttaaaacagggtgaatctctctcgaaaagctcccttgtaaatattttttggaagcggagtctcactctgttgcccaggctggagtgcagtggtgcaatcttggctcactgcagcctccacctccagagttcaagcaattctcctgccacagcctcctgagtagctgggactacaggcgcacaccaccacacccagataatttttttgtatttttagtagagacagggtttcactgtgttggccaggacggtctcgatttcctgacctagtgatctgcctgcctcggcctcccaaagtgctgttggcatcttaaaaaaaaagttagtttcaaaaataattgtctcacctgctaatgaataaacataaagccattgatttttcttttaaattctcataagccatatttctttgcatgtcaaccatgttgtaattacatagttgcaggaattcacaagcaggtgttaagtcactgtgaggagacagccacccacagtgagaactggaacaaaacttactttgggaggctgaggcgggtggatcacttgaggccgggagttcaagaccagcctggccaatgtagcaaaaccctgtctcttaaatt

SEQ ID NO: 17072 - protein, 341 aa, Homo sapiens
MDFSRLHMYSPPQCVPENTGYTYALSSSYSSDALDFETEHKLDPVFDSPRMSRRSLRLATTACTLGDGEAVGADSGTSSAVSLKNRAARTTKQRRSTNKSAFSINHVSRQVTSSGVSYGGTVSLQDAVTRRPPVLDESWIREQTTVDHFWGLDDDGDLKGGNKAAIQGNGDVGAAAATAHNGFSCSNCSMLSERKDVLTAHPAAPGPVSRVYSRDRNQKCGASFYVNRILWLARYTASSFSSFLVQLFQVVLMKLSYESENYKLKTHESKDCESESYKSKSHESKAHASYYGRMNVREVLREDGHLSVNGEALCKYGFVFLWASVVELVPHAVMLGTSSRE

SEQ ID NO: 17073 - DNA, 2406 bp, Homo sapiens
  CDS (121)..(507)
gctcaagcatggcggcggcggcattgggcagctcctcaggctcggcgtccccggccgtggctgagctctgccagaacaccccggagacctttttggaggcctccaagctgctgctcacctatgctgacaacatcctcaggtgcagggcaacggggtcggacggcgggtaccggggtgggtgggccgcggcaccttgttcggccagggactggggcgtccggcctgagcttcagagggcagcgacgcccggacagaccgggacctggagctggttctgctcctaacgtccgagcccgccggccaggggcctcgggacccggccaagtcccacccccgctcgagaaaaggaagtttctttgcagttgtgacttggcacctgcagtcagggtgctgcgggtgaactggagtcccggaagcggggccgggcggaggagaggtaggaaggcgtgcttcagacactgccgctcttctcgtcgtttaacggcctcagatatcgggacacaacggtaaccgcaccgcgcgtgtcattccccctgcgtgcatttttcgagcggagtggcttacatttccacatacttatcagaagttactcactgacaaagtgatgttttcttcccatgttgagactatccgagtactaaagcataatgcttctgaagtggtgggttttaaaatttttaattttttttctgcccacttttgttgattgaaacattatagtattttgaagttacagtttttatattaatacctggattctactatgtaacataaccctttaagaattcgtggaggtaatcgccttggatgagagtaatttccttcattctcctgtcagcaaaattgcacttctagaggtctaagggaccttgtagattttgggaattgggaggcaagtttgattattcattttgaataagtacccacctcaactcttcagatcaaatgatctgaagggacatggtgtgggggggtagggaaatggaactgaggttaaaggagagccacttgctttaggggtgttacctcatttatcaggtcaccgtgattaattaggttctctgttcccctcagcccctggtgcattaagtgtttggtatattgtcatgaagtctaaaaggaaattctcagtttcaaggttataggtttcacgtgacccaattttagacattagttacatgtgcagtttttaaaatccatgtcagtaatatttcatttaggcaatggtaatgatttttaaagtaaattgaagggaaaatatattgagcccttattttgtggcagatgctatgaaagatgcaacatgtggcctgttcacagctacataattgtgacctgtgtggggaccaacttcgtgctctgtgacaccttctcaactcaccttttttactctttgaggccttacagctcttcacagtacaaggatgccaagggactccataaatgaactgataggctgggttctccagagcccattagctgagacttaccacctggaaagccaccaggctatttaaaaccccactagtcagaaaagagaggtggccttgtaatgaagcctcacttctgctttaaatctagtgaaacccaaaatgctgaggtttagtatgaggggggaacctttgcatgcaaataatgacatttagcatcataatcttcattatgaatgtttactaatggctcgttgctgattttcgtttttgagacggagtttgctcttgttgatgaggctggagtgcagtggcgcgatcttgactcactgcaacctccgcctcacagcttcaagattctgaaagatgaggggtgtgacaatgagcgcaaaggatagtggacacactggaataatgctgagaaattaagagtttaagaaagtctttgtgcgttgcttttccaaggataggaaagaggatatgatgggtttgaagtctaatgtccctacagccctctaagtctttgagggctttagggtcaggcctttggtatcagtctatacacaaaaccacggtcagtttactcaacatacttaataagaaaaagaatttgaggaactggatgtgactgtcattgctggagcctgtttgcagtatacttttactgagaaaaatagattaatgtgaggtccagagatgatataaaaataaaattgctcactgggcacggtggctcacacctgtaaccccagcactgtgggaggccaaggtgggcggattgcttgagcttaggagtttgagaccagcctgggcaacatggctaaaccccgtctctacaaaaaaattaaaaaattagccaagcatggtggcagacacctgtagtcccagctacttggagggcagaggtgggaggatggcttgagcccataatcatgccactgcattctagctttgatggcgaagtgagacctttctc

SEQ ID NO: 17074 - protein, 129 aa, Homo sapiens
MLTTSSGAGQRGRTAGTGVGGPRHLVRPGTGASGLSFRGQRRPDRPGPGAGSAPNVRARRPGASGPGQVPPPLEKRKFLCSCDLAPAVRVLRVNWSPGSGAGRRRGRKACFRHCRSSRRLTASDIGTQR

SEQ ID NO: 17075 - DNA, 2322 bp, Homo sapiens
  CDS (243)..(2099)
cttgcaagatgcttctctgccgccataggctggaggttccccgggaactttcccttccttcctagctgaggaagatccctcacttccgctcgccgcgccaccggtcccacctccccgccccccgctgggtcctagcgccggcccctgtttggcagggtccgggctccgtcggtgcgaggagccgacgccgacgccacggagtcagcacaagtctcatcagagaaaccccgttcaccaaggccatggaagtggaggctgcagaggcccggtccccagcccccggctacaagcgctcgggccgccgctacaagtgcctgtcctgtaccaagacatttccaaacgcgcccagggcagcgcgccacgctgccacacatgggccggcagactgctctgaagaggtggccgaggtgaagccaaagccagagacagaagctaaggcagaggaagccagtggggagaaggtgtcaggctccgcggccaagcctaggccctatgcgtgtccgctatgccccaaggcctacaagacggcacccgagctgcgcagccacgggcgcagccacacgggggagaagccctttccgtgccccgagtgcggccgccgcttcatgcagcccgtgtgcctgcgcgtgcacctggcctcgcacgctggcgaactgcccttccgctgtgcgcactgcccgaaggcctatggcgcgctctccaagctcaagatccaccagcgtggccacacaggcgagcggccttacgcctgcgccgactgcggcaagagctttgctgacccttcagtgttccgcaagcaccggcgtactcacgctggcctgcggccctacagctgtgagcgttgcggtaaagcctatgcggagctcaaggacctccgcaaccatgagcggtcccacaccggcgagcgccccttcctctgctccgagtgcgggaagagcttctcccgctcatcctcgctcacgtgccaccagcgcatccacgcggcacagaagccctaccgctgcccggcctgcggcaagggcttcacgcagctcagttcctaccagagccacgagcgcacgcactcgggggagaagcccttcctgtgcccgcgctgcggccgcatgttctccgacccctcgagcttccgtcgccaccagcgcgcccatgaaggggtgaagccataccactgcgagaagtgcggcaaggacttccggcagccggcggacctggccatgcaccggcgtgtgcacacaggcgaccggccgttcaagtgcctgcaatgtgacaagacgttcgtggcgtcctgggacctcaagcggcacgcgctggtgcactctggccagcggcccttccgctgtgaggagtgcgggcgagccttcgccgagcgtgccagcctcacgaagcatagccgggtgcactcgggggagcgccccttccactgtaacgcatgtgggaaatcctttgtggtgtcgtcgagcctgaggaagcacgagcggacccatcgaagcagtgaggccgcgggtgtgccccctgcacaggagctggtggtggggttggcgctgcctgtgggcgtggcaggtgagagttcagccgccccggcagcaggggcggggctgggggaccctccagcagggctgctagggctgcccccggagtcaggtggtgtgatggccacacagtggcaggtggtgggcatgacggtggagcatgtggaatgccaagatgctggtgtccgggaggctcctggtcccttggaaggggcaggcgaggcggggggtgaggaggctgacgagaagcccccccagtttgtgtgccgagagtgcaaggagaccttctccacaatgacgctgctgcgtcggcacgagcgctcacacccggagctccggcccttcccctgcacccagtgcggcaagagcatctctgaccgggctgggctgcgcaaacacagccgcactcacagctcagtgcgcccctacacctgcccccattgtcccaaggccttcttgagtgccagcgacttgcgcaagcatgaacgcacccaccctgtgcccatggggacccccacacccctggagcccctggtggctttgctaggaatgcctgaagaggggccggcctgaagcccatgaccccccagcaccacactccgggagcccagcccccatcgggggcctcctgtacctccttttgcctggctctgctctttagactccagatccctacccctcagcaactagctcccctgtcggccagctaagagagctgggacagtggaggctggcagaagctgagacgtgactgtctaggagtaacactcattaaagctttcattttggcacc

SEQ ID NO: 17076 - protein, 619 aa, Homo sapiens
MEVEAAEARSPAPGYKRSGRRYKCLSCTKTFPNAPRAARHAATHGPADCSEEVAEVKPKPETEAKAEEASGEKVSGSAAKPRPYACPLCPKAYKTAPELRSHGRSHTGEKPFPCPECGRRFMQPVCLRVHLASHAGELPFRCAHCPKAYGALSKLKIHQRGHTGERPYACADCGKSFADPSVFRKHRRTHAGLRPYSCERCGKAYAELKDLRNHERSHTGERPFLCSECGKSFSRSSSLTCHQRIHAAQKPYRCPACGKGFTQLSSYQSHERTHSGEKPFLCPRCGRMFSDPSSFRRHQRAHEGVKPYHCEKCGKDFRQPADLAMHRRVHTGDRPFKCLQCDKTFVASWDLKRHALVHSGQRPFRCEECGRAFAERASLTKHSRVHSGERPFHCNACGKSFVVSSSLRKHERTHRSSEAAGVPPAQELVVGLALPVGVAGESSAAPAAGAGLGDPPAGLLGLPPESGGVMATQWQVVGMTVEHVECQDAGVREAPGPLEGAGEAGGEEADEKPPQFVCRECKETFSTMTLLRRHERSHPELRPFPCTQCGKSISDRAGLRKHSRTHSSVRPYTCPHCPKAFLSASDLRKHERTHPVPMGTPTPLEPLVALLGMPEEGPA

SEQ ID NO: 17077 - DNA, 1546 bp, Homo sapiens
atgaaaattattagcatagcatataagataatttataaagaatctagaatctaaaatgtacaggaggatgtggataggttatatgcagatactataccactttgtataagagtctgaagcattcgaggattttgatattcaggggggttctggaacaaatctggatactgagggatggctctacagcctttcagaattaaattttctatgattttaatggttctttcaaagaccatgacagtaatcactgacgcctgttgccttacaaatctgcttgtacaagtaacatttccatgattatatgtacaagtaaaaaatacccactatacaaataacaaatccaagatcagtgaaattgagtacgatgacaattaaaatggtttgcataaatgtcctataacacatggaacacatgattcatcctcttgctaatgttcccagtttggcatcttctaagatcatattatttgagcacaattcttgatgcagaatcatctctctgttcccctactcgcttgtgagagggaacatttcctccttatgtgtcttagaatatttttacctaacatgcttaaacaaaacaaatttcattcttaacatcaggctctgaaagttccttttagttagcatttgctatattgacagctggtttgacaagtacatattttagcataagaaaaaaacagcaggccgggtgcagtggcccttgcttgtaatcccagcactttgggaggccaaggaggcagattgcttgagctcaggagatcaaggccagcctgggcagcatagcaagaccccgtctctaccaaaaaaaaaaaagaaaaaaaattacaaaaactagccagatgtggtggcgtgcacctgtagtcccagctcttgggaggctaaggtgggaggatgacttgagcctaggaggcagaggttgcagtgtggttgagattgcactactgctctccagcctgggtgacaaagcgagaccctgtttcaaaaaaattaaaaacagcagatgagtttcttttttaaaactggattcaggatcagtgtaatgttactgatcttcaatagtaaccacaaacttaaaaaatctttacatattgccgtatgtattagatattctgatatttaatagctgagacagtcataccttatagtattattatcccaattttactagtgaggaaacaagcagttaataactgttagagctcagattcacattctgaaagttatagaaattaagaacatagagcctatgttcttaatttcaccaaaatatctcctcccaaattatacataccctttcaaacctaccttcctctcttagtaattaatgataccgtctttcaatttacatgaatcagtatcactattagtaaatgtattttatgccattatataacagactaatttatttattctgtactctactgtgatattttcctctatcttctgcaagattttcatttttaaaaattactgtcttggctgggtgcagtggctcatgcctgtaatcctggcctaggcaacaagagtgaaactccatctc

SEQ ID NO: 17078 - DNA, 3054 bp, Homo sapiens
  CDS (12)..(1541)
tggtgaccaagatggcggcggagctggtggaggccaaaaacatggtgatgagttttcgagtctccgaccttcagatgctcctgggtttcgtgggccggagtaagagtggactgaagcacgagctcgtcaccagggccctccagctggtgcagtttgactgtagccctgagctgttcaagaagatcaaggagctgtacgagacccgctacgccaagaagaactcggagcctgccccacagccgcaccggcccctggaccccctgaccatgcactccacctacgaccgggccggcgctgtgcccaggactccgctggcaggccccaatattgactaccccgtgctctatggaaagtacttaaacggactgggacggttgcccgccaagaccctcaagccagaagtccgcctggtgaagctgccgttctttaatatgctggatgagctgctgaagcccaccgaattagtcccacagaacaacgggaagcttcaggagagcccgtgcatcttcgcattgacgccaagacaggtggagttgatccggaactccagggaactgcagcccggagttaaagccgtgcaggtcgtcctgagaatctgttactcagacaccagctgccctcaggaggaccagtacccgcccaacatcgctgtgaaggtcaaccacagctactgctccgtcccgggctactacccctccaataagcccggggtggagcccaagaggccgtgccgccccatcaacctcactcacctcatgtacctgtcctcggccaccaaccgcatcactgtcacctgggggaactacggcaagagctactcggtggccctgtacctggtgcggcagctgacctcatcggagctgctgcagaggctgaagaccattggggtaaagcacccggagctgtgcaaggcactggtcaaggagaagctgcgccttgatcctgacagcgagatcgccaccaccggtgtgcgggtgtccctcatctgtccgctggtgaagatgcggctctccgtgccctgccgggcagagacctgcgcccacctgcagtgcttcgacgccgtcttctacctgcagatgaacgagaagaagcccacctggatgtgccccgtgtgcgacaagccagccccctacgaccagctcatcatcgacgggctcctctcgaagatcctgagcgagtgtgaggacgccgacgagatcgagtacctggtggacggctcgtggtgcccgatccgcgccgaaaaggagcgcagctgcagcccgcagggcgccatcctcgtgctgggcccctcggacgccaatgggctcctgcccgcccccagcgtcaacgggagcggtgccctgggcagcacgggtggcggcggcccggtgggcagcatggagaatgggaagccgggcgccgatgtggtggacctcacgctggacagctcatcgtcctcggaggatgaggaggaggaggaagaggaggaggaagacgaggacgaagaggggccccggcccaagcgccgctgccccttccagaagggcctggtgccggcctgctgaccccggccgcacactcgactttcctggcgctcaccacgcagaggggcacgggccagcctcgggcgcagagggaggagtgacctttctttttctttttattgtcgttcgttttgtttttccacccttttgcctggctcctggcacctgtacctctggactctcctatcgggggattaaaaaaaaaagtaaaatgacaaaaaaagatacaaaaaagaaaaatgaaacaaaaaagtcaaactcttaaaaacaaggccggccacccacacagccgcctccccggctggagtccgagccgggaaggggtagtgggcgggagggaccaggacgccgccccgcgccctcccctccggatgccccgccgcccgccgccctctgcccacgaccattccagccagtgcgcggggacccgggcggcgggcggtggggcgcagcccctctctggcgaccactttgacgtttgtctcttcctttgctttttctctgcaaatgcatcctcgcccagagaccctcacgcgccgagcagcgagcgttttagccgagaagccatggagtgggttggggcggggaggggcagtagggtggggggatgggtgggcaggatgggggtacagtgggcggctggggagggtttagccacagatgtgttgtattttttgaaagtgcaataatttggtattttgaagacccggcgtgtggtcaggaacccccggggaaggcgggggcccagggtgcggcaccgtgtggcgtgggggggtctcagttttctagccagctacctcggtaattccaattcaggttaacttccctacggaacagcacagatgtccacagatgtccacagctgccgccgccgccgccgccaccataccccggtccttggggcatgggttgcggtcgcttcccaaggggcagcagggaccccggccaccccggctctcggtttgggttgattcctctcctttttgctcttggttttccgacgggtacgaggctggcccggcaccctgtcccccgggagcctcactcttccagcaggaccagaccaggggcctccttcctgtccccaggcgttcccggcccctcgcaggccccacccatgcccttggcctcagggtccaacaactgggggagctaccagggctctgccttcaggagcccacagctgggcaccccccttgccccccaggagaccggggcgcaggcggggcaccggcctcacctggttctccaacaccgctgcctgcggtctgttttgcttttgtcctccccagcccagaattttcctttgtataaacagaactcctagtcaggaagcaatatcatttcaggtctaaagaaagggacgtgcatctggccgagggcagttcagtctcactgcagagcccgcagcccgctgcgcagctcggcccctcccgcccgcacgggcagctgaaggccgctgttttctaatatttgtattctaatttaattgtttttaaaaaatgcaaataaaaaaggtcgaggtggagcc

SEQ ID NO: 17079 - protein, 510 aa, Homo sapiens [sequence omitted]

SEQ ID NO: 17080 - DNA, 1216 bp, Homo sapiens
  CDS (84)..(1139)
agtcgcgcagagtggagtcaaaggcaaccagtgctcgctgcggtctctggggatcgggaccgcggcggcggcccgcgagcgggatgttccggggcttgagcagttggttgggcttgcagcagccggtggcaggcggtgggcagcccaatggagatgctccacccgagcagccgtccgagacggtggctgagtctgcggaggaggagctgcagcaagcgggagaccaggagctcctccaccaggccaaagacttcggcaactatttatttaactttgcatctgctgccacaaaaaagataactgaatcagttgctgaaacagcacaaacaataaagaaatccgtagaagaaggaaaaatagatggcatcactgacaagacaattataggagattttcagaaggaacagaaaaaatttgttgaagagcaacatacaaagaagtcagaagcagctgtgcccccatgggttgacactaacgatgaagaaacaattcaacaacaaattttggccttatcagctgacaagaggaatttccttcgtgaccctccggctggcgtgcaatttaatttcgactttgatcagatgtaccccgtggccctggtcatgctccaggaggatgagctgctaagcaagatgagatttgccctcgttcctaaacttgtgaaggaagaagtgttctggaggaactacttttaccgcgtctccctgattaagcagtcagcccagctcacggccctggctgcccaacagcaggccgcagggaaggaggagaagagcaatggcagagagcaagatttgccgctggcagaggcagtacggcccaaaacgccacccgttgtaatcaaatctcagcttaaaactcaagaggatgaggaagaaatttctactagcccaggtgtttctgagtttgtcagtgatgccttcgatgcctgtaacctaaatcaggaagatctaaggaaagaaatggagcaactagtgcttgacaaaaagcaagaggagacagccgtactggaagaggattctgcagattgggaaaaagaactgcagcaggaacttcaagaatatgaagtggtgacagaatctgaaaaacgagatgaaaactgggataaggaaatagagaaaatgcttcaagaggaaaattagctgttcctgaaatagaagaataatccttaacagtctgcaaactgacattaaattctagatgttgacaattactg

SEQ ID NO: 17081 - protein, 352 aa, Homo sapiens
MFRGLSSWLGLQQPVAGGGQPNGDAPPEQPSETVAESAEEELQQAGDQELLHQAKDFGNYLFNFASAATKKITESVAETAQTIKKSVEEGKIDGITDKTIIGDFQKEQKKFVEEQHTKKSEAAVPPWVDTNDEETIQQQILALSADKRNFLRDPPAGVQFNFDFDQMYPVALVMLQEDELLSKMRFALVPKLVKEEVFWRNYFYRVSLIKQSAQLTALAAQQQAAGKEEKSNGREQDLPLAEAVRPKTPPVVIKSQLKTQEDEEEISTSPGVSEFVSDAFDACNLNQEDLRKEMEQLVLDKKQEETAVLEEDSADWEKELQQELQEYEVVTESEKRDENWDKEIEKMLQEEN

SEQ ID NO: 17082 - DNA, 3389 bp, Homo sapiens
  CDS (541)..(2958)
aggcccggcgctcctcaagatggctgccgacagtgagcccgaatccgaggtatttgagatcacggacttcaccactgcctcggaatgggaaaggtttatttccaaagttgaagaagtcttgaatgactggaaactgattggaaactctttgggaaagccactcgaaaagggtatatttacttctggcacatgggaagagaaatcagatgaaatttcctttgctgacttcaagttctcagtcactcatcattatcttgtacaagagtccactgataaagaaggaaaggatgagttattagaggatgttgttccacaatctatgcaagatttgctgggtatgaataatgactttcctccaagagcacattgcctggtaagatggtatgggctacgtgagttcgtggtgattgcccctgctgcacacagtgacgctgttctcagcgaatctaagtgcaaccttcttctgagttctgtttctattgccttgggaaacactggctggtgccactctttgtgcaaattcaccacaaatggcgaagaatgtatgtaggagaatgtcaaggtcctggtgtacgaactgatttcgaaatggttcatcttagaaaagtgccaaatcagtacactcacttatcaggtctgctggatatcttcaaatcaaagattggatgtcctttaactccattgcctccagttagtattgctattcgatttacctatgtacttcaagattggcagcagtatttttggcctcagcaacctccagacatagatgcccttgtaggaggagaagttggaggcttggagtttggcaagttaccatttggtgcctgcgaagatcctattagtgaactccatttagctactacatggcctcatctgaccgaagggatcattgtggataatgatgtttattctgatttggatcctattcaagctccacattggtctgttagagttcgaaaagctgagaatcctcagtgtttgctaggtgattttgtcactgaattttttaaaatttgccgtcgaaaggagtcaactgatgagattcttggacgatctgcatttgaggaagaaggcaaagaaactgctgatataactcatgctttgtcaaaattgacagagccggcatcagttccaattcataaattatcagtttcaaatatggtacacactgcaaagaagaaaatccgaaaacacagaggtgtagaggagtcaccgctaaataatgatgttcttaatactattctcctgttcttattccctgatgctgtttctgagaaaccattagatggaactacttcaacagataataataatcctccatcagagagtgaagactataatctctacaatcagttcaagtctgcaccatctgacagtttaacatacaaactggctttgtgtctctgtatgatcaatttttaccatggagggttgaaaggagtggcacacctctggcaggaatttgttcttgaaatgcgtttccgatgggaaaacaactttctgattccaggattagcaagtggacccccagatctgaggtgttgtttactgcatcagaaactacagatgttaaattgttgtattgaaagaaagaaggcacgtgatgaggggaaaaagacaagtgcttcagatgtcactaatatatatccaggggatgctggaaaagcaggagaccagttggtgccagataatctaaaagaaacagataaggaaaagggagaggtaggaaaatcttgggattcctggagtgacagcgaaggagaattttttgaatgcctaagtgatactgaagaacttaaaggaagtggacaagagagtggcaagaaaggaggacctaaggagatggcaaatttaaggccggaaggacggctctatcagcatgggaaacttacactgctgcataatggagaacctctctacattccagtaacccaggaaccagcacctatgacagaagatctgctagaagagcagtctgaagttttagctaaattaggtacatcggcagagggggctcaccttcgagcacgcatgcagagtgcctgtctgctctcagatatggagtcttttaaggcagctaatccaggttgctccctggaagattttgtgaggtggtattcaccccgggattatattgaagaggaggtgattgatgaaaagggcaatgtggtgctgaaaggagaactgagtgcccggatgaagattccaagcaatatgtgggtagaagcctgggaaacagctaagccaattcctgctaggaggcaaaggagactcttcgatgatacacgggaagcagaaaaggtgctgcactatctggcaatccagaaacctgcagaccttgctcggcacctgttaccttgtgtgattcatgcagctgtactcaaggtaaaggaagaagaaagtctcgaaaacatttcttcagttaagaagatcataaagcagataatatcccattccagtaaagttttgcacttccccaatccagaagacaagaaattggaagaaatcattcaccagattactaatgtggaagctctcattgccagagctcggtcactaaaagccaagtttggaactgagaaatgtgaacaggaggaggaaaaggaagatcttgaaaggtttgtgagttgcctgctggagcagcctgaagtgttagtcaccggtgcaggaagaggacatgctggcaggatcattcacaagctgtttgtgaatgcccagagggctgcagctatgactccaccagaggaggaattgaagagaatgggctccccagaggaaagaaggcagaactccgtgtcagacttcccaccccctgctggccgggaattcattttgcgcaccactgtgccgcgccctgctccctactccaaagctctgcctcagcggatgtacagtgttctcaccaaagaggactttagacttgcaggtgccttttcatcagatacttccttcttctgattcttctagcattactcgttggtggcttcagagacagtgctgcctcctcctgagggagggaaggtaccagggagaacctgggaggtcctggagagggccctgtccagttgggtgatcaggaatcaaaccagcatcggaaagacttcccagcaccaagcttgagctgtgtcgtttcgtggagggggcagcgaggatgggcttgagctgttgagagatttctgccctagagatggcctttgtatatgggggggtggtggggggacacaaacacatcagacactccgtcctcacactggcaggacgatgttcatcgcattctcttctgtgaccagcctctaggctagcggctgcattcgtggtctgtgcaaacacttcgtggttctatatatcagcagcaagtgtgcaaaataaaggacctgttaactcag

SEQ ID NO: 17083 - protein, 806 aa, Homo sapiens
MYVGECQGPGVRTDFEMVHLRKVPNQYTHLSGLLDIFKSKIGCPLTPLPPVSIAIRFTYVLQDWQQYFWPQQPPDIDALVGGEVGGLEFGKLPFGACEDPISELHLATTWPHLTEGIIVDNDVYSDLDPIQAPHWSVRVRKAENPQCLLGDFVTEFFKICRRKESTDEILGRSAFEEEGKETADITHALSKLTEPASVPIHKLSVSNMVHTAKKKIRKHRGVEESPLNNDVLNTILLFLFPDAVSEKPLDGTTSTDNNNPPSESEDYNLYNQFKSAPSDSLTYKLALCLCMINFYHGGLKGVAHLWQEFVLEMRFRWENNFLIPGLASGPPDLRCCLLHQKLQMLNCCIERKKARDEGKKTSASDVTNIYPGDAGKAGDQLVPDNLKETDKEKGEVGKSWDSWSDSEGEFFECLSDTEELKGSGQESGKKGGPKEMANLRPEGRLYQHGKLTLLHNGEPLYIPVTQEPAPMTEDLLEEQSEVLAKLGTSAEGAHLRARMQSACLLSDMESFKAANPGCSLEDFVRWYSPRDYIEEEVIDEKGNVVLKGELSARMKIPSNMWVEAWETAKPIPARRQRRLFDDTREAEKVLHYLAIQKPADLARHLLPCVIHAAVLKVKEEESLENISSVKKIIKQIISHSSKVLHFPNPEDKKLEEIIHQITNVEALIARARSLKAKFGTEKCEQEEEKEDLERFVSCLLEQPEVLVTGAGRGHAGRIIHKLFVNAQRAAAMTPPEEELKRMGSPEERRQNSVSDFPPPAGREFILRTTVPRPAPYSKALPQRMYSVLTKEDFRLAGAFSSDTSFF

SEQ ID NO: 17084 - DNA, 4396 bp, Homo sapiens
  CDS (111)..(4001)
gagaagaagaggaagtgaaggctacagggtatccacgtgggttctgagcgtgtttctacgtccctggaagccggtcatttaagctcattcctcgccacggcttagtcaacatgggtcgctcgggaaagttgccctctggtgtctcagctaagttgaagcgctggaagaaaggccacagcagcgacagcaaccccgccatctgccgccaccgtcaggccgcccgcagccgcttcttcagccggccgtcaggaaggagtgacctgacagtcgatgctgtgaagttacataatgagctgcagtcagggtccttgcgcttgggcaaaagcgaagccccggagacgcccatggaagaagaggcggagctggttctcaccgagaagtcctcgggcaccttcctgagtggcctttccgactgcacaaacgtcaccttcagcaaagtacagcgcttctgggagtccaactcggctgcccacaaggagatctgtgctgttctggctgctgtcactgaggtgattcgctcccagggagggaaggagacggagactgagtactttgctgctctgatgacaacaatggaagcagtggagtccccggagtccctggccgccgttgcttacctgctgaaccttgtcctgaagcgtgttcccagccctgtgcttattaagaagttctctgatgcctccaaagccttcatggatatcatgtcagctcaggccagcagcggctccacctctgtcctccgatgggtcctttcctgcctggccacccttctgcggaagcaagacctggaggcctggggctaccccgtgacccttcaggtgtaccatgggctgctgagcttcacggtgcatcccaagcccaagatccggaaggctgcccagcatggagtatgctcagtcctcaagggcagtgaattcatgtttgaaaaggcccctgcccatcatcctgctgccatttccactgccaagttctgcatccaggagattgagaagtctggaggctccaaggaggccaccaccacgctgcacatgctgacgctgctgaaggacctgctgccctgcttcccggaaggcctggtgaagagctgcagtgagactctcctcagggtcatgaccttgagccatgtgctggtgacagcctgtgccatgcaggcctttcacagcctcttccacgccaggcctggcctgagcaccctgtcagcagagctcaacgcccagatcatcacggccctgtacgactatgttcccagtgagaatgatttacaacccctgctagcctggcttaaggtcatggagaaagcccacatcaacctggtgaggttgcagtgggacctggggctaggccacctccctcgcttttttggaactgcggtgacctgcctcctttccccacactcgcaagtgctgactgctgctacacagagcctcaaggagatcctgaaggaatgcgtggctccccacatggccgacattggctccgtgacctcctcggcctcaggccctgcccaatctgttgccaagatgttcagggcagtggaggagggcctgacgtacaaattccatgcggcctggagctccgtgttgcagctgctgtgtgtcttcttcgaggcgtgtgggagacaggcccaccctgtgatgaggaagtgcctccagtccctgtgtgacctgcgcctctcccctcatttcccccacacggcggctcttgaccaggcagtgggggctgcggtgaccagtatgggacctgaggtggtgctgcgggctgtgcctttggaaattgatggctctgaggagactctggatttcccacggagctggctgctgcctgtcatccgagaccatgttcaggaaacgcgacttggttttttcaccacctacttcttgcccctggctaacaccctgaagagcaaagccatggacctggctcaggcaggcagcacagtggaatctaagatctacgacacactccagtggcagatgtggacactcctgcctgggttctgcacaaggcctacagatgtggccatctccttcaaagggctggcacggacgctgggcatggccatcagcgagcgtccagacctgagggtcaccgtgtgccaggccctgcgcaccctcatcaccaagggctgccaggcagaggctgaccgtgctgaagtgagtcgctttgccaagaactttctgccgatcctcttcaacctgtatgggcagcccgtggcagccggggacactccagcccctcgccgggctgtgctggaaaccatcagaacttacctcaccatcactgacactcagttggtgaacagtctcctggaaaaagccagtgagaaggtgctcgaccctgccagctctgactttaccagattgtctgtcctggacctggtcgtggccttggctccgtgtgctgacgaagctgccatcagtaagctatactccaccatccggccctacctagagagcaaggcccacggggtgcagaagaaggcctaccgagtgctggaggaggtgtgtgccagtcctcagggccccggggccctcttcgtgcagagccacctggaggacctgaagaagacactgctggactcgctgcggagcacctcctcacccgccaagaggccccgtttgaagtgcctcctacacatcgtgaggaagctctcagctgaacacaaggagttcatcactgccctcatcccagaggtgatcctgtgcaccaaggaggtgtcggtgggcgcacggaagaacgcttttgcactgctcgtggagatgggccatgctttcctaaggtttggctcgaaccaggaagaggccctgcagtgctacctcgtcctgatctaccctggcctggtgggcgcggtgaccatggtcagctgcagcatcctggccctgacccacctccttttcgagtttaaaggtctgatggggaccagtacagtggagcagctgctggagaatgtgtgcctgcttctggcctcccgcacccgtgacgtggtcaagtctgcactgggcttcatcaaggtggcagtgactgtcatggacgtggcgcacctggccaaacatgtgcagctggtgatggaagccattgggaagctttcagatgacatgcggcggcacttccgcatgaagcttcggaacctgttcaccaagttcatccgcaagtttggatttgagctggtgaaaaggctgttgcccgaggagtaccacagagtcctggtcaacatccggaaagctgaggcccgggccaagaggcaccgagccctgagccaggctgccgtggaggaggaagaagaggaggaggaggaggaggagcccgcccagggcaaaggtgacagcattgaggagattttagctgactcagaggacgaggaggacaatgaggaggaggaaagaagccgaggcaaggagcagcggaagctggcacgacagaggagccgggcatggctgaaagagggcggtggggatgagcccctcaacttcctggatcccaaggtggcccaacgagtcctggccacgcagccagggccaggccggggcaggaagaaggaccacggcttcaaggtgagcgccgatggccggctgatcataagggaggaggcagacggcaacaagatggaggaagaggaaggtgccaaaggcgaagatgaagagatggctgacccaatggaagatgtgatcatcaggaataaaaagcaccagaagctcaagcaccagaaagaggctgaggaggaggagctggagataccccctcagtaccaagctggaggctctggcattcatcgccctgtggccaagaaggctatgcctggggctgaatacaaggccaagaaagcaaaaggtgatgtgaagaagaaaggccggccggatccctatgcctacatccccctcaacagaagcaagctcaaccgcaggaagaagatgaagctgcagggacagttcaaaggcctggtgaaggctgcccagcgaggttcccaggtgggacacaaaaaccgcagaaaggatcgtcgaccctgaggcccagggcccctgggctgccctgtggtccagtctgaggccctttcagcccccaggctgccttgccaccagctccaggtgctcaagattctggcagagcctggactcaggatgacttggaactagggcttggctctcagaagtcctggattttggaaactccaaatggaatcacccttcagagacatccctggtgcctggagatgggaatgtggcctcagtgcctctgagtaggtgccatgaggcacctttgctttctgcccagagtggccatgagcaccagaacagatgatctccatttccgccagctgcctgtagccacgtggcatcctgcctgtggtctgggtgagatttactgtgaccagatgtagaataaatgtgtctcatcctgc

SEQ ID NO: 17085 - protein, 1297 aa, Homo sapiens [sequence omitted]

SEQ ID NO: 17086 - DNA, 3917 bp, Homo sapiens
  CDS (111)..(2813)
gaaatccaagatggcggcgctaggctgaccctcctgctggtgacggaagtaccgcctcctcccgtctgacgcccctcaggggaccctgcatcgctccagccgccgcggccatgtctgggccaggcaacaaacgcgccgccggcgacgggggctcagggcccccggaaaagaagctgagtcgtgaggagaagaccaccacgactcttatcgagcccattcgtcttggaggcatctcttccacggaggagatggacctgaaggtactacagttcaaggacaagaaactggcagagcggctggaacaacggcaggcttgtgaagatgaactccgagaacgaattgagaagttggagaagcggcaggccacagatgatgccacactcctcatcgtcaatcgctactgggcccagctggatgaaactgtggaagcccctctccgatgccatgagagccagggggagctgtcttcagcgcctgaggcacctgggacccaggaggggccaacatgtgatgggactcctctcccagagccggggacatcagagctgagagaccccttgctgatgcagctgcggccccctctcagtgagccggccttggcttttgtggtggcactgggtgccggcagcagtgaggaggtggagctggagctgcaaggccgaatggagttctccaaggcagctgtgtctcgtgtggtagaggcctcagaccgcctacagcgccgggtggaggaactctgtcagcgagtgtacagccgaggggacagtgagcccctcagtgaggcggctcaggcacacacccgagagctgggccgtgagaaccggcgactgcaggacttggccactcagctgcaggagaaacaccaccgcatctcattggagtactccgagctccaggataaagtgacatcggcagagaccaaggtgctggagatggagacaacagtggaggacttgcagtgggacatcgagaagctgcggaagcgagagcaaaagctcaataagcacctggcagaggccttagagcagcttaactctggctactatgtatctgggagctcctcaggcttccaggggggccagatcacactcagcatgcagaagagcgacgagctggggctgcagaagaagctacgcacagaggtcattcagctggaggacacgctggcccaggtacgcaaggagtatgagatgctgcgcatcgagtttgagcagaatctggcggccaacgagcaggcggggcccatcaaccgtgagatgcgccacctgattagtagtcttcaaaaccacaaccaccagctaaaaggggacgcccagcgatacaagcggaagcttcgagaagtacaagctgagattggcaagctccgggcccaggccagtggctctgcccactccacccccaacctgggccacccagaggattctggcgtcagtgccccagccccagggaaagaggagggtgggccaggccctgtcagtacccccgacaacagaaaggagatggctccagtgcctggcaccaccactactaccacttcagtgaagaaggaggagctggtcccctctgaagaggacttccagggtataacccctggggcccagggcccttcctcccggggccgagaacctgaggccaggcccaagcgggagcttcgggaacgggaaggtcccagcctaggacctccacctgtagcctccgctctctcaagggctgatcgggagaaggccaaggtggaagaaaccaagcggaaggaatcagaactcctcaagggtctccgagcagagctcaagaaggcccaggagagccagaaggagatgaaactgctgctggatatgtacaagtcagcgcccaaggagcagcgggataaggtgcagctcatggcagcggaacgcaaggctaaggccgaggttgatgagctgcggagccgcatccgggaattggaggagaggaatcgaagggagagcaagaagatcgcggatgaggatgccctgcggcgcattcggcaggcagaggagcagatagaacacctgcagcgcaagctgggtgccaccaagcaggaggaggaggctctgctctcagagatggatgtgacaggtcaggcttttgaggacatgcaggaacagaacgggcggctgctacagcagttgcgggaaaaggatgatgccaactttaagctaatgtcagagcggatcaaggccaaccagattcacaagctgctgcgggaggagaaggatgagttgggcgagcaggtccttggcctcaagtcccaggtggatgcccagctgctgactgtgcagaagctggaggagaaggagcgagccttgcagggcagcctcgggggtgtggagaaggagctgacgctgcgcagccaagccctggagctcaacaagcggaaggctgtagaagccgcccagctggccgaggacctgaaggtgcagctggagcacgtgcagactcggctgcgggagatccagccctgcctggcagagagccgggctgctcgtgagaaggagagcttcaacctcaagagggctcaggaggacatctcacggctgcggcgcaagctggaaaagcagaggaaggtggaggtctacgcagatgccgacgaaatcctccaggaggagatcaaggagtacaaggcgcggttgacctgcccctgctgtaacacccgcaagaaggatgcagtccttaccaagtgcttccacgttttctgcttcgagtgcgtgcggggccgctatgaggcccgccagaggaagtgccccaagtgcaacgcggcctttggtgcccacgacttccatcgtatctacatcagctgaacctgaaactcaggggactctggaacaccatggaccctgggggctgtgcccccatctcctccccaccccaggtctagtggccccaccctccattccggaccccatgggcccagcccctgcccatctagttggtttggggaccctggtgcatgctagtgggcatgggatcagccaagcttcgttccatcttttcctaaaggtcagagctgcagcctagggggcactgccctacagaaaaggtctgcctgagaggcctgaggagcccagagcacttgactgagcttcccggaaactggccctaacctgtctgtctccgtggatgcatcctaaccctaaggaaaattccccaggctgtgatctaccctagagaaggctcgctccctgcctactggctcacaaatgaggaccagtgagccatgtccttgttccttgtttgagactgggctgcaggccccaggaagactttccttcacccaccatccccctaacctcggcagggcttctgtcctgtggagttccctggacaccttggtctggctcttgtgccaagggctgaaggaggtaccctcttggcagatgggggcatcacttgcttcctttgggaagctctaaggttgctgcagtcaccttcctcatcttgcaggtgctgaaccaacatcatcagtttctattctaatcaggccccttcccaatctccatttctctgccaagcccatttacccccacctcatgcatcccaaggctctactgggtccctggacctaaccctgctttcatcctggtggccttaactacagtggaggtggaacttcccaggaggggaagggacagaccagccccagccgctgggccaacttccaatcattccagctagaagagcttccccctgacaccctgtgactgagcctgtgtcctgtctgcctgcccagccatgctccatcggctgtgagggcagtgcccggagaggccagagggttggagctgcagggacccgtttggacccacagcctctgttctagagatgcttgtataggctgttaattgtgatgaataaacgttcaaccctcggcctgcagccagagtagccaggccgcgcacccc

SEQ ID NO: 17087 - protein, 901 aa, Homo sapiens [sequence omitted]

SEQ ID NO: 17088 - DNA, 3309 bp, Homo sapiens
  CDS (57)..(2315)
acatcagctttgaaagccaacacatcctcctgagaggggacaagacaagcagggatatgtgggccactggatctttgccagacttcccggctgcagccaagttcttagggttccgtcagcgctgcatccccaggagcctctgcctcagtgagtgtcctctggagcccccaagcctcacccgcctctgtgccactctgaaggactgcccgggacccctggaactgcaattgtcctgtgagttcctgagtgaccagagcctggagactctactggactgcttacctcaactccctcagctgagcctgctgcagctgagccagacgggactgtccccgaaaagccccttcctgctggccaacaccttaagcctgtgtccacgggttaaaaaggtggatctcaggtccctgcaccatgcaactttgcacttcagatccaacgaggaggaggaaggcgtgtgctgtggtctctcagcaaacctgctgggcgacagcggactcagatgccttctggaatgtctgccgcaggtgcccatctccggtttgcttgatctgagtcacaacagcatttctcaggaaagtgccctgtacctgctggagacactgccctcctgcccacgtgtccgggaggcctcagtgaacctgggctctgagcagagcttccggattcacttctccagagaggaccaggctgggaagacactcaggctaagtgagtgcagcttccggccagagcacgtgtccaggctggccaccggcttgagcaagtccctgcagctgacggagctcacgctgacccagtgctgcctgggccagaagcagctggccatcctcctgagcttggtggggcgacccgcagggctgttcagtctcagggtgcaggagccgtgggcggacagagccagggttctctccctgttagaagtctgcgcccaggcctcaggcagtgtcgctgaaatcagcatctccgagacccagcagcagctctgtgtccagctggaatttcctcgccaggaagagaatccagaagctgtggcactcaggttggctcactgtgaccttggagcccaccacagccttcttgtcgggcagctgatggagacatgtgccaggctgcagcagctcagcttgtctcaggttaacctctgtgaggacgatgatgccagttccctgctgctgcagagcctcctgctgtccctctctgagctgaagacatttcggctgacctccagctgtgtgagcaccgagggcctcgcccacctggcatctggtctgggccactgccaccacttggaggagctggacttgtctaacaatcaatttgatgaggagggcaccaaggcgctgatgagggcccttgaggggaaatggatgctaaagaggctggacctcagtcaccttctgctgaacagctccaccttggccttgcttactcacagactaagccagatgacctgcctgcagagcctcagactgaacaggaacagtatcggtgatgtcggttgctgccacctttctgaggctctcagggctgccaccagcctagaggagctggacttgagccacaaccagattggagacgctggtgtccagcacttagctaccatcctgcctgggctgccagagctcaggaagatagacctctcagggaatagcatcagctcagccgggggagtgcagttggcagagtctctcgttctttgcaggcgcctggaggagttgatgcttggctgcaatgccctgggggatcccacagccctggggctggctcaggagctgccccagcacctgagggtcctacacctaccattcagccatctgggcccaggtggggccctgagcctggcccaggccctggatggattcccccatttggaagagatcagcttggcggaaaacaacctggctggaggggtcctgcgtttctgtatggagctcccgctgctcagacagatagacctggtttcctgtaagattgacaaccagactgccaagctcctcacctccagcttcacgagctgccctgccctggaagtaatcttgctgtcctggaatctcctcggggatgaggcagctgccgagctggcccaggtgctgccgcagatgggccggctgaagagagtggacccggagaagaatcagatcacagctttgggggcctggctcctggctgaaggactggcccaggggtctagcatccaagtcatccgcctctggaataaccccattccctgcgacatggcccagcacctgaagagccaggagcccaggctggactttgccttctttgacaaccagccccaggccccttggggtacttgatggccccctcaagacctttggaatccagccaagtgatgcacccaaatgatccacctttcgcccactgggataaatgactcaggaaagaagagcctcggcagggcgctctgcactccacccaggaggaaggatacgtgtgtcctgctgcagtcctcagggagaacttttttgggaaccaggagctgggtctggacaaaggagtaccctgcattacgtgggatatgtgtgatcaattggggacatgcgacacacaatgagggtgtcatgacaatgcatgacacgtacggttatatgtggcagtgtgaccccttgacatgtggcgttacatgaaagtcagtgtggcacgtgttctgtggcatgggtgctggcatcccaagtggcaggatacatgattgttggtctatatatgacacatgacaaatgtccatgtcacaggactcatggctggccagatgacctcaggctggcccaagatctaatttattaatttttaaagcaaatacatatttatagattgtgtgtatggagcagctaagtcaggaaaagtcttccgcccgagctgggaggggagagtgtccatgcactgaccagtccaggggctcaagggccagggctctggaacaagccagggactcagccattaagtcccctcctgcctcaatcctcagcctacccatctataaacttgatgactcctcccttacttacatactagcttccaaggacaggtggaggtagggccagcctggcgggagtggagaagcccagtctgtcctatgtaagggacaaagccaggtctaatggtactgggtagggggcactgccaagacaataagctaggctactgggtccagctactactttggtgggattcaggtgagtctccatgcacttcacatgttacccagtgttcttgttacttccaaggagaaccaagaatggctctgtcacactcgaagccaggtttgatcaataaacacaatggtattcc

SEQ ID NO: 17089 - protein, 753 aa, Homo sapiens
MWATGSLPDFPAAAKFLGFRQRCIPRSLCLSECPLEPPSLTRLCATLKDCPGPLELQLSCEFLSDQSLETLLDCLPQLPQLSLLQLSQTGLSPKSPFLLANTLSLCPRVKKVDLRSLHHATLHFRSNEEEEGVCCGLSANLLGDSGLRCLLECLPQVPISGLLDLSHNSISQESALYLLETLPSCPRVREASVNLGSEQSFRIHFSREDQAGKTLRLSECSFRPEHVSRLATGLSKSLQLTELTLTQCCLGQKQLAILLSLVGRPAGLFSLRVQEPWADRARVLSLLEVCAQASGSVAEISISETQQQLCVQLEFPRQEENPEAVALRLAHCDLGAHHSLLVGQLMETCARLQQLSLSQVNLCEDDDASSLLLQSLLLSLSELKTFRLTSSCVSTEGLAHLASGLGHCHHLEELDLSNNQFDEEGTKALMRALEGKWMLKRLDLSHLLLNSSTLALLTHRLSQMTCLQSLRLNRNSIGDVGCCHLSEALRAATSLEELDLSHNQIGDAGVQHLATILPGLPELRKIDLSGNSISSAGGVQLAESLVLCRRLEELMLGCNALGDPTALGLAQELPQHLRVLHLPFSHLGPGGALSLAQALDGFPHLEEISLAENNLAGGVLRFCMELPLLRQIDLVSCKIDNQTAKLLTSSFTSCPALEVILLSWNLLGDEAAAELAQVLPQMGRLKRVDPEKNQITALGAWLLAEGLAQGSSIQVIRLWNNPIPCDMAQHLKSQEPRLDFAFFDNQPQAPWGT

SEQ ID NO: 17090 - DNA, 1613 bp, Homo sapiens
  CDS (40)..(1119)
gaccagtggagtgaggccaccacttccctgcccccaggcatgcagcaccctgccagtggcccagctgaggtactcagttccagccccaagctggatcctcccccatctccccactccaaccggaagaagcaccggaggaaaaagagcaccgggaccccccgaccagacggccccagcagtgctactgaagaggcagaggagtcgtttgaatttgtggtggtgtccctcactgggcagacgtggcacttcgaggcttcaacggcggaggagcgggagctgtgggttcagagtgtgcaggcccagatccttgccagcctgcaaggctgccgcagtgccaaggacaagactcgactggggaaccagaacgcagctctggctgtgcaggccgtccgcaccgtccgcggcaacagcttttgtatcgactgcgatgcacccaatccagactgggccagcctgaacctgggtgccctgatgtgcattgagtgctcaggcatccaccgacacctgggggctcacctgtcccgggtgcgctcccttgacctcgatgactggccgcctgagctgctggctgtcatgactgccatgggcaatgccctcgccaacagcgtctgggagggggccttgggtggctactccaagccagggcctgatgcctgcagagaggagaaggaacgctggatacgggccaagtatgaacagaagctcttcctggccccactgccaagctcagatgtgccactggggcagcagctgctccgggccgtggtggaagatgacctgcggctgttggtgatgctcctggcacatggctccaaagaggaggtgaatgagacctatggggacggggacgggcggacggctctacatctctccagtgccatggccaacgttgtcttcacgcagctgctcatctggtacggggtggacgtgaggagccgggacgcccggggcctgactccactggcatatgctcgccgggccggcagccaggagtgtgcagacatcttgatccagcatggctgccctggggagggctgtggcttagcgcctacccccaacagagagcctgccaatggcaccaacccctctgctgagctgcaccgtagtcctagcctcctataaggcccaggaagagggcagaggggccagaaggactccatggcccaaagaccctcctccctgcaggcactgtgggaacagacacagagatggagaagcagggacatgctgagaggacgaagccaaggaaattagggaggagagtcaaagggatcaaggagagttggggatttgagctgcagcagagagggatgagggatttagccctctgccctaaggtgccattgaaaagggacaggacccttcggaggtgcctgtgaggagaggggagcaggacctctccctcctccagatccctgcctcctagtgccagcccctcacacgccttcatcctgaaacaggaagaggacggcaccaagttgggggtgctggatggaagagacgaggggtgatctgtgagtcccatgtaaactttgtacattggaatatttatgtttgtgtacatatttgatgtgtgtgtgtatgatgagccaataaaccagactgtgtgcgtg

SEQ ID NO: 17091 - protein, 360 aa, Homo sapiens
MQHPASGPAEVLSSSPKLDPPPSPHSNRKKHRRKKSTGTPRPDGPSSATEEAEESFEFVVVSLTGQTWHFEASTAEERELWVQSVQAQILASLQGCRSAKDKTRLGNQNAALAVQAVRTVRGNSFCIDCDAPNPDWASLNLGALMCIECSGIHRHLGAHLSRVRSLDLDDWPPELLAVMTAMGNALANSVWEGALGGYSKPGPDACREEKERWIRAKYEQKLFLAPLPSSDVPLGQQLLRAVVEDDLRLLVMLLAHGSKEEVNETYGDGDGRTALHLSSAMANVVFTQLLIWYGVDVRSRDARGLTPLAYARRAGSQECADILIQHGCPGEGCGLAPTPNREPANGTNPSAELHRSPSLL

SEQ ID NO: 17092 - DNA, 3192 bp, Homo sapiens
  CDS (96)..(2870)
gtccaagatggcggcgtgcggttccgctgtgtgaaacgagcgcggggcggcgggttactcagctccgcggagacgacctccgacgacccgcaacaatgaagggaaaagagcgctcgccagtgaaggccaaacgctcccgtggtggtgaggactcgacttcccgcggtgagcggagcaagaagttagggggctctggtggcagcaatgggagcagcagcggaaagaccgatagcggcggtgggtcgcggcggagtctcctcctggacaagtccagcagtcgaggtggcagccgcgagtatgataccggtgggggcagctccagtagccgcttgcatagttatagctccccgagcaccaaaaattcttcgggcgggggcgagtcgcgcagcagctcccggggtggaggcggggagtcacgttcctctggggccgcctcctcagctcccggcggcggggacggcgcggaatacaagactctgaagataagcgagttggggtcccagcttagtgacgaagcggtggaggacggcctgtttcatgagttcaaacgcttcggtgatgtaagtgtgaaaatcagtcatctgtcgggttctggcagcggggatgagcgggtagcctttgtgaacttccggcggccagaggacgcgcgggcggccaagcatgccagaggccgcctggtgctctatgaccggcctctgaagatagaagctgtgtatgtgagccggcgccgcagccgctcccctttagacaaagatacttatcctccatcagccagtgtggtcggggcctctgtaggtggtcaccggcacccccctggaggtggtggaggccagagatcactttcccctggtggcgctgctttgggatacagagactaccggctgcagcagttggctcttggccgcctgccccctccacctccgccaccattgcctcgagacctggagagagaaagagactacccgttctatgagagagtgcgccctgcatacagtcttgagccaagggtgggagctggagcaggtgctgctcctttcagagaagtggatgagatttcacccgaggatgatcagcgagctaaccggacgctcttcttgggcaacctagacatcactgtaacggagagtgatttaagaagggcgtttgatcgctttggagtcatcacagaagtagatatcaagaggccttctcgcggccagactagtacttacggctttctcaaatttgagaacttagatatgtctcaccgggccaaattagcaatgtctggcaaaattataattcggaatcctatcaaaattggttatggtaaagctacacccaccacccgcctctgggtgggaggcctgggaccttgggttcctcttgctgccctggcacgagaatttgatcgatttggcaccatacgcaccatagactaccgaaaaggtgatagttgggcatatatccagtatgaaagcctggatgcagcgcatgctgcctggacccatatgcggggcttcccacttggtggcccagatcgacgccttagagtagactttgccgacaccgaacatcgttaccagcagcagtatctgcagcctctgcccttgactcattatgagctggtgacagatgcttttggacatcgggcaccagaccctttgaggggtgctcgggataggacaccacccttactatacagagatcgtgatagggacctttatcctgactctgattgggtgccacccccacccccagtccgagaacgcagcactcggactgcagctacttctgtgcctgcttatgagccactggatagcctagatcgcaggcgggatggttggtccttggaccgggacagaggtgatcgagatctgcccagcagcagagaccagcctaggaagcgaaggctgcctgaggagagtggaggacgtcatctggataggtctcctgagagtgaccgcccacgaaaacgtcactgcgctccttctcctgaccgcagtccagaattgagcagtagccgggatcgttacaacagcgacaatgatcgatcttcccgtcttctcttggaaaggccctctccaatcagagacggacgaggtagtttggagaagagccagggtgacaagcgagaccgtaaaaactctgcatcagctgaacgagataggaagcaccggacaactgctcccactgagggaaaaagccctctgaaaaaagaagaccgctctgatgggagtgcacctagcaccagcactgcttcctccaagctgaagtccccgtcccagaaacaggatggggggacagcccctgtggcatcagcctctcccaaactctgtttggcctggcagggcatgcttctactgaagaacagcaactttccttccaacatgcatctgttgcagggtgacctccaagtggctagtagtcttcttgtggagggttcaactggaggcaaagtggcccagctcaagatcactcagcgtctccgtttggaccagcccaagttggatgaagtaactcgacgcatcaaagtagcagggcccaatggttatgccattcttttggctgtgcctggaagttctgacagccggtcctcctcttcctcagctgcatcagacactgccacttctactcagaggccacttaggaaccttgtgtcctatttaaagcaaaagcaggcagccggggtgatcagcctccctgtggggggcaacaaagacaaggaaaacaccggggtccttcatgccttcccaccttgtgagttctcccagcagttcctggattcccctgccaaggcactggccaaatctgaagaagattacctggtcatgatcattgtccgtgcaaaactggttgaacagcggatgaagatatggaattcaaagctctaatggacctttttgaagagaagttgtggcttatgtggagtttacatgggcctctgatggaagaaagctaatctgtttagtatttgtgcattttactaaaatggcagcttaaagttgtgtatctgctattgtgatgccaatgccggtgttttaagtggaaaaaaaatgacctctttgatttgtgctgtgtacacaagatttctggaaaagtaaagaaaaaccctttttatggctcacacagcttaagagtagctgtctctcaaacgtgcgctcacagttgagctgcttttgttttattctaaataaattgtttcttttgagg

SEQ ID NO: 17093 - protein, 925 aa, Homo sapiens
MKGKERSPVKAKRSRGGEDSTSRGERSKKLGGSGGSNGSSSGKTDSGGGSRRSLLLDKSSSRGGSREYDTGGGSSSSRLHSYSSPSTKNSSGGGESRSSSRGGGGESRSSGAASSAPGGGDGAEYKTLKISELGSQLSDEAVEDGLFHEFKRFGDVSVKISHLSGSGSGDERVAFVNFRRPEDARAAKHARGRLVLYDRPLKIEAVYVSRRRSRSPLDKDTYPPSASVVGASVGGHRHPPGGGGGQRSLSPGGAALGYRDYRLQQLALGRLPPPPPPPLPRDLERERDYPFYERVRPAYSLEPRVGAGAGAAPFREVDEISPEDDQRANRTLFLGNLDITVTESDLRRAFDRFGVITEVDIKRPSRGQTSTYGFLKFENLDMSHRAKLAMSGKIIIRNPIKIGYGKATPTTRLWVGGLGPWVPLAALAREFDRFGTIRTIDYRKGDSWAYIQYESLDAAHAAWTHMRGFPLGGPDRRLRVDFADTEHRYQQQYLQPLPLTHYELVTDAFGHRAPDPLRGARDRTPPLLYRDRDRDLYPDSDWVPPPPPVRERSTRTAATSVPAYEPLDSLDRRRDGWSLDRDRGDRDLPSSRDQPRKRRLPEESGGRHLDRSPESDRPRKRHCAPSPDRSPELSSSRDRYNSDNDRSSRLLLERPSPIRDGRGSLEKSQGDKRDRKNSASAERDRKHRTTAPTEGKSPLKKEDRSDGSAPSTSTASSKLKSPSQKQDGGTAPVASASPKLCLAWQGMLLLKNSNFPSNMHLLQGDLQVASSLLVEGSTGGKVAQLKITQRLRLDQPKLDEVTRRIKVAGPNGYAILLAVPGSSDSRSSSSSAASDTATSTQRPLRNLVSYLKQKQAAGVISLPVGGNKDKENTGVLHAFPPCEFSQQFLDSPAKALAKSEEDYLVMIIVRAKLVEQRMKIWNSKL

SEQ ID NO: 17094 - DNA, 1583 bp, Homo sapiens
  CDS (746)..(1045)
atttatgaatgtaatcaagttcaaaagttcatcagccacagttcttcagtttcgccacttcaaagaatttactctggggtcaaaacccacatatttaataaacataggaatgattttgttgattttccattgctgtcacaagaacagaaagcacacattaggagaaaaccttacgaatgtaatgagcagggcaaagtcttcagagtgtcttcaagccttcctaatcatcaagtaatccacactgcagataaacctaacagatgtcatgaatgtggtaaaaccgtcagggacaagtcaggcctcgcagaacattggagaattcgtacaggagagaaaccttacaaatgtaaagagtgtggcaagctcttcaatcgaattgcataccttgcacgacacgagaaagtgcatactggagagagtccttacaaatgtaatgagtgtggcaaggtcttcagtcgaattacataccttgtacgacatcagaaaattcatactagagagaaacctcataaatgtaacaaatgtggcaaggtttatagtagcagttcatacctagcacaacattggagaattcatacaggagagaaactttacaaatgtaataaatgtggcaaagaatttagtgggcattcaagcctcaccacccatctgttaatccacactggagagaaaccttacaaatgtaaagaatgtgacaaagcttttaggcacaagttctccctgacagttcatcagagaaatcataatggagagaaaccttataaatgtcatgaatgtggcaaagtcttcactcaagtttcacatcttgcacgacatcagaaaattcacactggagagaaaccttacaaatgtaatgagtgtggcaaagtcttcactcagaattcacaccttgcaaatcatcagagaatccacactggagagaaaccttacaaatgccatgtgtgtggtaaggtctttaggcacagttcatggtttatacagcatcagagaagtgttcatgagagagtccttacaaactgagtttggcaaactctatcataagttctagcagtaatcaacatccgagagtctatactagaaagaaatcatttaaatgtactatatgtggcacaggctgtatcgagacctaccaaatcactagacatcgaaacattcatctttggtgaaaccacacaaatggattgtgtgtgccaaggccaacaagtcaaaatatgttgaacctaatgatatgatgtgtataaagggtgcaaggacacgtggaaatgatctgtaatattcgggttattaaaaatgtaattggctgggcgcagtggctcacacctgtaatgctagcactttgggaggttgaggcaggtggatcacaaggtcaggagtttgagaccagcctggccaatatggtgaaacaccatatctactataaatacaaaaaaattagccaggcgtggtggcacatgcctgcaatcccagctactcgggaggctgaggcaggagaattgcttgaatccaggaggcagaggttgttgcagtgagctgagatcgcgccactgcactccaacctgggtgacagagcgagactccgtctc

SEQ ID NO: 17095 - protein, 100 aa, Homo sapiens [sequence omitted]

SEQ ID NO: 17096 - DNA, 3472 bp, Homo sapiens
  CDS (35)..(838)
gacaaagaacaagctgcctggcctcatcacatccatggagaccatcggtgccaaagcgctggaggacttcgcagacaacatcaagaatgacccggacaaggagtacaacatgccgaaggacggcaccgtacacgagctcaccagcaatgccatcctcttcctgcagcagcttttggacttccaggagacggcaggcgccatgctggcctcccaagagaccagctcttcggccaccagctacagctctgagttcagcaagcggctgctaagcacctatatctgtaaagtgctgggcaacctgcagttgaacttgctgagcaagtccaaggtgtacgaggacccagctctgagcgccatcttcctgcacaacaactacaattacatcctcaagtccctggagaagtctgaactgatccagctggtggcagtgacacagaagactgctgagcgctcctaccgggagcacattgagcagcagatccagacctaccagcgcagctggttaaaggtgactgattacatcgcagagaagaatctacctgtgttccagccgggagtcaagctccgggacaaggagcggcagattatcaaggagcgttttaagggcttcaatgatggcctcgaagaactgtgcaaaatccagaaggcctgggctattccagacacagagcagagggacaggattcgccaggcccagaagaccattgtcaaggagacctacggggcctttctacagaagtttggcagcgtgcccttcaccaagaacccggagaagtacatcaagtacggggtggagcaggtgggcgacatgatcgatcgccttttcgacacctctgcctgagcctgctgctagccctgcctggttccaccagactggcgtgtcattggacagataaaccagtgttagcttgcctctgggctgggtgagcttgaagtcctctgggacagagacctgtctccacgcctccgggagctgtgtccctgagccccctagtcctggctcctgctttttccccacagcccgtgttcccagccgaaccagcactctcccggaagcctggggtccctccacaccttggcttttatgaccctgatggcttctgaaacaggaaaagagagaaggaagacagaggcctgtgcccactgctgctccatgtgtaccaagagcagcagggcagaagggccctccctccagcctaggtcagaggtggggacagagaactcccctacagcccagagatgtggcagggctcagagaagcagccagagctcctggaggaaaggcagtcgggactgaccccctctcttaaaacacattcccgcccgcccacaggcctgaggtctgggacctttccctcccaggagtcccctaggtggctgggggaggcaggctcactggccattttccctagagtccagcacactgcaggaggcgttcggaggaggagttccgccccaccctctacagcctccctcaggcccctgtctctggtccccagcctcagtgcctcttggcccagggccaggcagtcgtggttgcagaaggagcaattaggctgcctgcctgtgggctgggagacagggacaatggggaaaagttaaggagcaaaatgggggttggaagcaaaaaataggaccccacctatttaggacgagattgaagactgacccttgaggcacacttgcactggagatgggtttatttcacgctctgtgcttgtgtgctagcggagggagagcttagggtggcttaatccagaggccctgtcatggcccgcccccagccatgggaaagcaaacttcatcctaaggtgtgcagcccaggccctgcccctttacagtctaggccgcctgccatggggtgcagcctctccaggggctgcgtcagacttgcacgctgcccacatccagattcctgcaaagacgaattgggtgcacagcaccccaaccacatacacgaggaagaagatgcggtcagcagtctcaggccagcttctctgtgacccctttactcctctggagggctctgtggggagagatacagggaaaggagctgttcttcaaggtcccctcaacatgagcggaagagcgaaccccaggggtcatcagcctgtatcgcttcctttcttagattctcagctgatgaaaatttgggtctggcccatttcaggccatcttcagttgaagaaacaccctcttaggctgtgcaaggcatgggttatcaggggattgaggtcacctgggacttcagggaggctcagcttgctccctgccccagacctgtttcttctaagggaggaggacatggtggagaccagggacaggagagccagcagggtggatgcaaggggcctctacccacacctggacctccgtgccctcaccccagccctaggtgtgcacctaggcctcattccttaccccccagcccctgcccaccttcagcaggatgaggccctgggttgccgtgctctcgctgttcccctctcggggctgggctggggccgctcttggccccaaggttgccccgggccagcagcccagccagcagcacagtctctatggtgctgaggaagagcagcagcagcaggatggtgaagtagtaaactgggggaggcagggcacagggagatgctcaggggccagtccctgtgtctctggtgcccagcgagctgagcaccagtgggtgaccggggagaaacagggcagactgggtaagggagcagggcttactgagcagtgggttgcaggaggaggagctgggcagggcctgcaccagggaggagtggaggacgaggtaactcagcagcaatgtcaccttgtagcctatgcgctcaatggcccggaggggcagcaaccccccgcacacgtcagccaacagcagtgcctctgcaggcaccaagagagcgatgatggacttgagcgccgtgttcttcagcctcagctggaaggggaaaagtcagggccttcccggcgggggggaaggaggtgggcatcgggggcatggggcctggcctctggccgtgcatcctcactcccacccgcctccagcagccctctgtcggcctcctcgcgacttgactcaccgtcacctggaagcagggcaccagctgctggggtgggacttgggtcttcagatcataaactacgtattccctcttgacactcacaatctcgttcaccacgtgggcctggaactctaactccatcgctgaggggtgggaatgagaactatgaaccaggaaggagagatcccagctgccaagtctgggggtagcagactggagcccaggggtgatggagacttttgatggcttttggcagggacagacttggacacaaaaccgatccatagaagggcttcccaaaccttgttttgcaacatcccaaattgtctccagttgaaggaaggcctttatcagattcatagatgagctttcattgtaaaaataaatgtactttgcaccacttc

SEQ ID NO: 17097 - protein, 268 aa, Homo sapiens
METIGAKALEDFADNIKNDPDKEYNMPKDGTVHELTSNAILFLQQLLDFQETAGAMLASQETSSSATSYSSEFSKRLLSTYICKVLGNLQLNLLSKSKVYEDPALSAIFLHNNYNYILKSLEKSELIQLVAVTQKTAERSYREHIEQQIQTYQRSWLKVTDYIAEKNLPVFQPGVKLRDKERQIIKERFKGFNDGLEELCKIQKAWAIPDTEQRDRIRQAQKTIVKETYGAFLQKFGSVPFTKNPEKYIKYGVEQVGDMIDRLFDTSA

SEQ ID NO: 17098 - DNA, 3063 bp, Homo sapiens
  CDS (158)..(1726)
tgacaccaaggcacctccaacccttcaggcagagacggctaccaaaccccaagccacatctgccccgtcccccgcccccaagcaaagcttcctgtttggaacacagaacacctcaccttccagccctgccgcccctgctgcatcttcggcacctcccatgttcaagcccattttcacggctccacccaagagtgagaaggaaggccccacaccgcctggcccttcagtcacagccacagcgccctccagctcctccctccccacgaccaccagcaccacagccccgaccttccagcctgtctttagcagcatggggccacctgcatctgtgcccttgcctgctcccttcttcaagcagacaactactcccgccactgctcccaccacaactgccccgctcttcactggcctggccagcgccacctctgctgtggctcccatcacctctgccagtccatccacagactctgcttcgaagcctgcgtttggctttggcataaacagtgtgagcagcagcagtgtgagtaccacgaccagcaccgccactgccgcctcacagcctttcctcttcggggcgccccaggcctctgctgccagcttcaccccggccatgggctccatattccagtttggcaaacctcctgccttgcccacaaccaccacagtcaccaccttcagccagtcccttcccactgccgtgccaacggccaccagcagcagcgctgccgactttagtggttttggcagcaccctcgccacctccgccccggccaccagcagccagcccactctgacgttcagtaacacgagcacccccacgttcaacattccctttggctcaagcgccaagtccccgctcccatcatatccgggagccaacccccagcccacatttggggccgctgaggggcagccaccgggggccgccaagccggcccttgcccccagctttggcagctctttcacttttggaaactctgcagccccggctgctgcacccacacctgcacctccgtccatgatcaaggtcgtgcctgcgcacgtgcctacgcccatccatcctatctttggcggtgccacgcactcggcgtttgggttgaaagccacggcttcggccttcggcgctcccgccagctcacagcccgcctttggcggctccactgctgtcttcttcggtgcagccaccagctccggctttggagccaccacccagaccgccagcagcgggagcagcagctcggtgtttggcagcacaacaccatcacccttcacgtttgggggttcggcagcccccgctggcagtgggagctttgggatcaatgtggccaccccaggctccagcaccaccaccggagctttcagctttggagcaggacagagtgggagcacagccacctccacccccttcgcagggggcttaggtcagaacgccctgggcaccaccggccagagcacaccgtttgccttcaacgtgagcagcacaactgagagcaaacctgtgtttggaggcaccgccacccccacctttggtctgaacacccctgcgcctggagtgggcacatcaggcagcagcctctcctttggggcatcctcagcacccgcccaaggctttgttggtgttgcacctttcggatcggcggccctttcattttccattggtgcgggatccaagactccgggggctcgacagcgactgcaggcccgaaggcagcacacccgcaaaaagtagcctttgtcccctgtccctgttccccccaccccttccctaaatctggaccttggcacctgctaggaagagccttggacccttccagttgcgtaaagcaaacctaccccggatctctggcttcagccgccagggggcagtggcagccctggggccctttcccttctggaggaagcacaagcctcagggaaggggaagcaggatgcggagggccaaagcccgggacctctacttgaacagttctactggggaggctggagaactaaggaaacacctgtacatagtgtccgctgccctgactcccgcttagcacacccttaggcaggcgccccttccacctttccccgagaccgtcgtcgctggagggggcagggtccagcccgcctggatcggtggtgtgcacctgatgggatttgggaaatgggctatccgtaaagctttatcttgcttggcttagctgtgagaagtggttctcttcctctggtcccttctggggactctgtttccccatttcttgctgctgtgtccctcaccagttccttgcaggattccttcgtttttaaatgcccttgaatctagctttgccttggagaccccagtgggtgctgctcctgccgttttcttcctgccaagcctgaatcaatgtttcatctccaaccctctgccagtttggcccctcagagcttggtggctcaagactgttagcctggcagagccaggggtgaagggagaagctcttggagcaggcaggatgcccaccgctgcttcagctgcctcctcgcccagctaccctttggccccattgggccctcgtctgcctctccaggattgtatgtttcaagccttgtcctgtgttcctttgtctgatgctctgtgtattgctctttgaatcgagtttggaggaagagttgagttgtatgagtggcggcatgttggtagtgccggacttcctgtttcaagttttctggggcctcgctaattgaatgtggaaagtagcaccacttgacggctacaagtgccgactcctgaattttcccatggtgttctgacttcaagggctggcagccagggagaatgggcccaggggaagcaaagacctcttccctctgccgtttctgtcccacttaactgacctcactggaggctacatcacccaaagtagatgttagaaaacctaaattaatgaaccatatttttaaaatcctatttttcccaaacagggccctctgcagcccatcctttccttccgtccttctgaaaccacataccccaggcccaagcgccttgctgccacgcccaacctctttgggagaagtatgaatgcgtgtgtctaaatt

SEQ ID NO: 17099 - protein, 523 aa, Homo sapiens
MFKPIFTAPPKSEKEGPTPPGPSVTATAPSSSSLPTTTSTTAPTFQPVFSSMGPPASVPLPAPFFKQTTTPATAPTTTAPLFTGLASATSAVAPITSASPSTDSASKPAFGFGINSVSSSSVSTTTSTATAASQPFLFGAPQASAASFTPAMGSIFQFGKPPALPTTTTVTTFSQSLPTAVPTATSSSAADFSGFGSTLATSAPATSSQPTLTFSNTSTPTFNIPFGSSAKSPLPSYPGANPQPTFGAAEGQPPGAAKPALAPSFGSSFTFGNSAAPAAAPTPAPPSMIKVVPAHVPTPIHPIFGGATHSAFGLKATASAFGAPASSQPAFGGSTAVFFGAATSSGFGATTQTASSGSSSSVFGSTTPSPFTFGGSAAPAGSGSFGINVATPGSSTTTGAFSFGAGQSGSTATSTPFAGGLGQNALGTTGQSTPFAFNVSSTTESKPVFGGTATPTFGLNTPAPGVGTSGSSLSFGASSAPAQGFVGVAPFGSAALSFSIGAGSKTPGARQRLQARRQHTRKK

SEQ ID NO: 17100 - DNA, 2176 bp, Homo sapiens
  CDS (26)..(709)
cgcggcttctggcgcggaggcgccgatgcagccgggcttccccgagaacctgagcaagctgaagagcctcctgacccagctccgcgccgaggacttgaacatcgccccgcgcaaggccacactgcagccgctgccgcccaacctgccgccagtcacctacatgcacatctacgagacggacggcttcagcctgggcgtgttcctgctcaagagcggcacgtccatcccgctgcacgaccacccgggcatgcacggcatgctcaaggtgctgtacggcaccgtgcgcatcagctgcatggacaagctagacgcgggcggcgggcaacggccgcgggccttgccgcccgagcagcagttcgagccgccgctgcagccccgggagcgagaagccgtgcggccgggcgtgctgcgttcgcgggccgagtacaccgaggccagcggcccctgcatcctcacaccgcaccgggacaacctgcaccagatcgacgccgtggaagggcctgccgccttcctggacatcctggccccgccctacgacccggacgatggccgggactgccactattaccgggtgctggagccggtcaggcccaaggaggcctccagctcggcctgtgacctgcctcgagaggtgtggctcctggagaccccacaggccgatgacttctggtgcgagggagaaccctatccaggtcccaaggtcttcccttgaagccactggcgcccaggagcggtgggccgaagacgtgccctaccctaccacaagggctgtgtctctaccccctagcctgggcgttggatctactggaatgagcagcagccgcttcctcggcagccttgggaagcacgggcgactggacagcagccgccgggcacggttatgggggcggggtgggcggggaggctagattgtttcctggtactgtcactgccactggggctttgatttggaggaatggggcaggggactatctgaagcgcttccatcctaaagccataatgaaaatatcttcctctcttccccattctatacaaaatactaagtggttttcttgctcccactccctaccccttagttaaatagggtttattttccactcatgcccttatgcctttttttcttatagttttttaacttattgactgtgcatgacccagtggtttgaattgtttttagttcaagtcattggtaaaaactaggtttaaggagatgagctactgtttaaagtgagctggcctgcctaattaattccttgtgaaaactaaatgattttttcagtttggggatcattctcacaacataactatgcatgtagaggacaagatttattttctttcctccctttgcccagtagccacatctggtttactcaggcagcatctactaagaaattcagcacctgcatatctctgtgacatggtcacttagagcttatcttccctatgaatctccagatctgtgagtcgagcagatttcatgttgcagattcacctttaatgcaaagactgtattatcctcacatgactttttttcttgtcttactgtaccttaaaaggtgatagagtaattctgtattttctaacgggaagattcaaaggagctgaatgtgttatgcttccaaacaactgaatgtaaaacactcctagccagttgttgcattccctatatttatttacttccaatattttactgtaaaagtagggagaaatattatgttgatagttgtttcatattctctcaggaactttaatgttcccgactcgggtgattccagctgtgttgctggcagtgttgtctcaaccctctccctaaaatgactgagccctgggttcatctaatgtggttttccttaggaagagatagaaggcacagaagatcacagctagagaattgagaattaactatactactagccattttagggcaccaaaacttgggattaaacacttcctacttcccactcccaactcctgaaatgaagtcttgctatctgtgactagttttatttttgtgcttttaatagtccgagcagtcttaccttgtttacacatgtattgacaccatttgcttcaggccatggagcactgtttctccctttttactatttataggattccgttttttcacaagacttttaataaaaagaaattgtagaaataaacacattaaaatttg

SEQ ID NO: 17101 - protein, 228 aa, Homo sapiens
MQPGFPENLSKLKSLLTQLRAEDLNIAPRKATLQPLPPNLPPVTYMHIYETDGFSLGVFLLKSGTSIPLHDHPGMHGMLKVLYGTVRISCMDKLDAGGGQRPRALPPEQQFEPPLQPREREAVRPGVLRSRAEYTEASGPCILTPHRDNLHQIDAVEGPAAFLDILAPPYDPDDGRDCHYYRVLEPVRPKEASSSACDLPREVWLLETPQADDFWCEGEPYPGPKVFP

SEQ ID NO: 17102 - DNA, 2492 bp, Homo sapiens
atcctaccactgcaagctcagcaggaactgacctggttggcaaagatgagggacatcctggtcctgtcactggggtccttggtgatgtggcgaatgagctgcaacatgggtgtgatgcctggaacacagtgagcgagcagccagctttctccctgtctctgaagcccacagtccctgacctgcagcaagcttcataccttcccccagcccaagttatccttttctcacttctgtccccaaaactcaaagcaggaaacagcccttcattttggttttcctttctaatgcaacagtaagtcaggtagtctttctcattttcatatggcaagatggaaagaacactctaagttcttcagtgtcctcattcatcaaacaatgacgggtaaatgtgatcgttttaagaatgcctattacagtgcctggcacattgtatgtctccttcaaagactgctctctttcttcaggcagtcattttcaagggatggggagagtcaggcttgaactggatctaggagcccctgggacagcatgggtgggcctgcccagcttgcccccaagcctgacctgaaaggtccccataaggctcctgagcagccaccatattggttaggggaagcagggtacacagggtcagtttcaagacctgtcactggttcatcgttcccaccttctacagctggaggcgaaatctctcatgttgtcccttcgaggatcaaatgactcccaagtcagaatgggtctcggggctcactctctggatggagcccctagaagcctcttacctgtgcccccagcaatcattcccaggtgatcggccagtgtttttttaggctcactcgtctggtctggtctgattccaagattccctggaaacacagagaatgcttatgacctctgcagttcttgcctaaagagactgcaaaagatcactgacattccttaggactcccaggaggcacgtccagctaagggactgtctgcaccattttaagctggagaagcaggccagggcagtctcctcagctagccctggtgctccagtgcacaaagtgggaatagagcctgggcttggtcggggaatcgccgggccttctgttctgaggaaaaagaggggcaagttgaagttaacacagagactcaaagagcattctcactcacggaggtgaaccagtgagtaaacaatggctatgtgagtaaccaaggagcatggactccctccatccatttttcagtattagcaggcaccatttatgtatcaggcattgtgctggagattttgatacaatgacgaggaaacaccaagtcattcccctaccttacaaaagctgacaacctcatgaagtgggtgtgtgaatgtgtaacaagtgtgatcattatgcattgtgtgtgaatgaatgaagactaagaacaaccccatgtgactcaaatctgaggagtgtacgagaacaatggaaccattgcaggaatcttcctcccagctgggagcccaagtattaacccctccagtacctggcccatggtaaaacaagcgtccccttggccctcgaaaaaagatggtctccccgattttcatgttctccaaatactgagtcatcttcccaccttcaggatattgggggtgtacatttttgaagtagatctgaaaagcaaggcagcactgctttcacattcccagacacaatgccacagccacgtacaactagaaaatgcatttactgctggaagctttgcagagaaagtgttctcctctctgaattgctgtacgcaatccctgaagatgaagctgccacaaggttaactgtagcttcactgctggaaagccctgcctagggcatatgtgccctcagagaaaaagcactgcccctccaccccaccaccctcagtaggcttggaagcacgagctagccagatatggtgggcactatttacctttataattaggtccacaaagcctctgtcatcatcactggagacaggggtgtaagccctgaccaccaattcattatcgatttttgccaagagctggacatagttacctatagaaaaggcatcaagcactgagtcaaagcatatttagcttaaataaggcccaggaataaaggactgagcttcagtgaagggagcaaatactgggggcacaacgttaagaggggtgggaagaagagagcagggaaggagcccaaatatgggatgcccggatcctaggcctgccctgcctccctgtgctaccctaggcaagtcacttcacctctctgggttttggtctcttcatctgtaaaatgggggtgatatgtctgcccacctgtgatcttagtgtaactgctttttggagcaggaaaagatcattaaagttggagagtgagtattaaaaattacagaaaggggtcagacatggtagctcacgcctgtaatcccagcccagaggcgggtggattgcttgagctcaggagttcgagaccagcctgggcaagatggcgaaaccccatctctac

SEQ ID NO: 17103 - DNA, 2463 bp, Homo sapiens
  CDS (89)..(2263)
cagcccagaggaccccaggcgaccagagtccaggctgaggcccgaggtggctcaccagctgttcagatgcttccagtatcaggaggacatggggccacgggcgtccctgagccggctccgggagctctgcggccactggctgcggccggctctgcacaccaagaaacagatcctggagctgctggtgctggagcagttcctgagtgtgctgcctccgcacctcctgggccgcctgcaggggcagccgctcagggatggggaggaggtggtgctgctgctcgagggcatccaccgggagcccagccacgcggggccgctggattttagttgtaatgctggcaagagttgtccccgtgcagacgtcaccttggaggaaaaggggtgtgcttcccaggtccccagccacagccccaagaaggaattgcctgcggaagagccttcagtgctgggcccatcggatgagcctccccgaccccagccaagggctgcccagcctgctgagccgggacagtggaggcttcccccaagttcaaagcagccgctgagcccggggccccagaagacattccaggccctgcaagaaagcagtccccagggcccctcaccatggccagaggagagttcccgagatcaggagctggcggctgtgctggagtgcctgacctttgaggatgtgccagagaataaggcgtggcctgcacaccccctgggattcggaagcagaaccccagacaaggaggaatttaaacaagaagagcccaaaggggctgcctggcccactcccatcttagcagagtcccaggcagatagtcctggggtgccgggagagccttgcgcccagtcgctcggacggggcgctgcggctagcggccctggcgaagatgggtcccttcttggcagcagtgaaattttggaggtcaaagtggctgagggcgtccccgagcccaatccggagttgcagttcatctgcgcggactgcggggtgagcttcccgcagctgtctcgcctgaaggcgcaccagctgcgctcgcacccggctgggcgctccttcctgtgcctttgctgcgggaagagcttcggccgcagctccattctcaagctgcacatgcgcactcacacggacgagcggccgcacgcctgccacctgtgcggccaccgcttccgccagagctcgcacctgagcaagcacctgctgacccactcctccgaacccgccttcctgtgcgcagagtgcggccgcggcttccagcgccgcgccagccttgtgcagcacctgctggcgcacgcccaggaccagaagccgccctgcgctcctgagagtaaggccgaagcgccgccactgaccgatgtcctgtgctcccactgcggccagagcttccagcgccgctccagcctcaagcgccacctgcggatccacgccagggacaaggaccgccggtcctccgaaggctccggcagccgccgccgggactccgaccggaggcccttcgtgtgcagcgactgcggcaaggccttccggcgcagcgagcacctggtggcccaccggagggtgcacacgggcgagcggcccttctcctgccaggcttgcggccgcagcttcacgcagagctcgcagctggtcagccaccaacgggtgcacacgggcgagaagccctacgcctgtccgcagtgcgggaagcgctttgtgcgccgggccagccttgcccgccacctgctgacccacggtggccctcggccccaccactgcacccagtgcgggaagagtttcggccagacccaggatctggcccgccaccagcgcagccacacgggcgagaagccctgccgctgcagcgagtgcggtgagggcttcagccagagcgcccacctggcgcgccaccagcgcatccacacaggggagaagccccacgcctgcgacacctgcggccaccgtttccgcaatagctccaacctggcccgccatcgccgcagccacacgggcgagcggccctacagctgtcagacgtgcggtcgcagcttccggcgcaacgcgcatctgcggcggcacctggctacccatgcggagcccgggcaggagcaggccgagcccccgcaggagtgcgtggagtgcgggaagagcttcagccgcagctgcaatctgctgcgacacctgctggtgcacacgggcgccaggccctactcctgcacgcagtgtggccgcagcttcagccgcaactcccacctgctgcgccacctgcgcacccacgcccgcgagacgctgtactagcttggcccgccttccgccagccgcgccctgcgccacctacccggggtcctccacagcggaggcctgcaggaatgtcccttcccaccacaccccacttccctctccttccactttcacagctgtccttccctggccgaggcattgctttctggcctcagctatgtaattaaaacgcccgaagtaaaatggccttctcc

SEQ ID NO: 17104 - protein, 725 aa, Homo sapiens
MGPRASLSRLRELCGHWLRPALHTKKQILELLVLEQFLSVLPPHLLGRLQGQPLRDGEEVVLLLEGIHREPSHAGPLDFSCNAGKSCPRADVTLEEKGCASQVPSHSPKKELPAEEPSVLGPSDEPPRPQPRAAQPAEPGQWRLPPSSKQPLSPGPQKTFQALQESSPQGPSPWPEESSRDQELAAVLECLTFEDVPENKAWPAHPLGFGSRTPDKEEFKQEEPKGAAWPTPILAESQADSPGVPGEPCAQSLGRGAAASGPGEDGSLLGSSEILEVKVAEGVPEPNPELQFICADCGVSFPQLSRLKAHQLRSHPAGRSFLCLCCGKSFGRSSILKLHMRTHTDERPHACHLCGHRFRQSSHLSKHLLTHSSEPAFLCAECGRGFQRRASLVQHLLAHAQDQKPPCAPESKAEAPPLTDVLCSHCGQSFQRRSSLKRHLRIHARDKDRRSSEGSGSRRRDSDRRPFVCSDCGKAFRRSEHLVAHRRVHTGERPFSCQACGRSFTQSSQLVSHQRVHTGEKPYACPQCGKRFVRRASLARHLLTHGGPRPHHCTQCGKSFGQTQDLARHQRSHTGEKPCRCSECGEGFSQSAHLARHQRIHTGEKPHACDTCGHRFRNSSNLARHRRSHTGERPYSCQTCGRSFRRNAHLRRHLATHAEPGQEQAEPPQECVECGKSFSRSCNLLRHLLVHTGARPYSCTQCGRSFSRNSHLLRHLRTHARETLY

SEQ ID NO: 17105 - DNA, 2701 bp, Homo sapiens
  CDS (351)..(1220)
attcgagaatgggacatggaatgaggcgacggccccagcaagccccagcagccccagccccagccccaggcccagcagcagcagcagcagcccctgctctcccgccgcccggagaggctctgcagccatgaagccaaccgtcccgaggcaccgccggtaagcagggagcctccgcggagctcccgccgccgctcccccttggcgccaaaggcacccggtcccggagcagccacgcgcggcccgtgagcctcgccaccagcgggggctcagaggaggaggacaaagacggcggggtgctgttccacgtcaacaagagcggcttccccatcgacagccacacctgggagcgcatgtggatgcacgtggccaaggtgcaccctaaggggggagaaatggtgggcgccatcaggaacgccgccttcttggcaaagccttcaataccccaggtcccaaactacaggctgtcgatgacgatcccagactggctccaggcgatccagaattacatgaagaccctacaatataatcacacagggacccagttctttgaaattaggaaaatgagaccgctgagtgggttaatggaaacagcaaaagaaatgacccgagagtccttgcctatcaaatgccttgaagctgtcatcctgggcatctacttaaccaatgggcagccttccattgagcggttccccatcagctttaaaacctacttctcaggaaactactttcaccacgttgtgctggggatttactgcaatggccgctatggctcattgggcatgagccgcagggctgagctgatggacaagccattgacttttcggactctgagtgacctcatctttgactttgaggactcttacaagaaatacctgcacacagtcaagaaggtcaagattgggctgtacgtcccccatgagcctcatagcttccagcccattgagtggaagcagctggtcctcaacgtctcaaagatgctgagggctgacataaggaaggagctggagaaatatgccagggacatgagaatgaagatcctgaaacctgcaagtgcccactctccgacccaagtgagaagccggggaaaatccctgtcccccagaaggagacaggcaagccccccgaggaggctcggccggcgagagaagtcgcctgcactgcctgaaaagaaggtggctgatctgagcactctgaatgaagtgggctatcaaatccgaatttagccaagccataccggccagcaagagggtttctgtggtgcttctctctgcactttacccagcatcttcaggaggaactgcaactatttattaagaacttgtgaattttatttttaaggattcacctggaaatagaatctgagtgggtggtaaccattagctttaaaaaattcactaaaaggcaccatgaaaaggctgaagtaataagccccactggggttggactatgtccctcactcaagatcttaaggataaccgtaactgaagttttatatttttccatttacctactttcttttacttgctttgaacattatgcctcaccaatagtaaatgttcatgaaataatctcttgaacttttggtatagtaaggtaactctaacagtattactgtctttttcagcaataacagaaagcaaaaatgggtgggttttttttaagcagttattacctcagcattttgacatcagatatgcaaacttaatggcgttttgtttttttatattctatttgtattctttccccagtatttcccatggggatctccacaagtttggagttttttcctggtgcacacacgtgaggagatttaaggtactatatgcaagtgttttactaaaaagcactgaaattcttctggcaatacaagaaccattttcaggatcttggagttacttccttcttaatctttcttaaagcattcactgatgtttttgttttttcaaaatgaaacaaaaatatcacattgagaagctagtctatgttctgtcactaacatttaaactttgcagactctaacaaaaagcacaagaggtcacgtactattatacaaatttagcggtactggatttacctctgacattaacacactcaggcagagaccaggagtgatcagcaggtcttcagaaccaaaaaacctttctgttcacatttcatctgatttttaaactgaggcaggctttgattcttctgaaggatgccaagaatcaaactaagggaggactcactgttaaagatgtgttctgatgtcttatattaagaccaaatgtgacatgatgtgattatcttccagtactttgcttttaggtaccatttcatgacattttaggaatgagtattggaaaatataaagaattagaaaagcagcactttttttttaatggaaaagtcttcggtccagtgttacaccttatagtgtaattcagtccctaagcacagaatgaatgtctggcctgcatatggtagttacagtgtaacctctggctgcagaccacacaggacaaccctaacagcctagtcttgtatggtgtaaatatcaagagtacagcttcaatttcatttgctttatcttagcaacaatgccaactcaggagagcagacggccgatttcagtgaagtctggtagtcaacagatgttatttcagtctcagtgcatctcctctggctttctttgactgaaggtgtttataggaaggaagtt

SEQ ID NO: 17106 - protein, 290 aa, Homo sapiens
MWMHVAKVHPKGGEMVGAIRNAAFLAKPSIPQVPNYRLSMTIPDWLQAIQNYMKTLQYNHTGTQFFEIRKMRPLSGLMETAKEMTRESLPIKCLEAVILGIYLTNGQPSIERFPISFKTYFSGNYFHHVVLGIYCNGRYGSLGMSRRAELMDKPLTFRTLSDLIFDFEDSYKKYLHTVKKVKIGLYVPHEPHSFQPIEWKQLVLNVSKMLRADIRKELEKYARDMRMKILKPASAHSPTQVRSRGKSLSPRRRQASPPRRLGRREKSPALPEKKVADLSTLNEVGYQIRI

SEQ ID NO: 17107 - DNA, 2786 bp, Homo sapiens
attcacaggaggctacgggctggagaaggacccgcagagatcaggggacttgtatacccaggcagcagaggcagcgatggaagccatgaagggccgactggccaaccagtactaccaaaaggctgaagaggcctgggcccagatggaggagtaaccaggaaaatcactgccggctagtcccaagcaaacgggctaggaggaaagattaaaaaaacaacaacaacaacttatttagtttggggaggggaagcatttttaagtgtgttgtaaaatcaaattttatatttcattttttgactcttgaaaaatgtctttgctccttggcagctaccagcagagactctatagctgtctcttagggcagtattttggggaagtggggcttgaagaagcagcctaatgaaccaacataccgttttgtgtgtggttttttttgtttgtttgtttgtttgttttgagacagagtcttgctctgtcacccaggctggagtgcagtgacatgatcttagctcactgcaacctccgcctcctgggttcaagtgattctcctgcctcagcctcccaagtagctgggattactggtgcacaccaccacactcagctaatttttgcatttttagtagagatggggtttcaccatgttggccaggctggtctcgaactcctaacctcaggtgatccacctgcctcagcctcccaaggtgctgggattacaggtgtgagccaccatgcctgcccattttgtggttctattttcatttttatttctttttttttttgtcacgagatataagaaagtgctttttgccttgaatggacaattttagggctgtgctcactagtcttttcaggctggactgaaatgtcgggcccatggagccctgtgttttgtgcatcggggtgagaaatgaagcacttcacgctggctttcctaagtcacggggcgtgtattgccgtggcttagtgcaaagcattctttctcagagcatttagaggcatgcgtggtattttttcagtgggtgtgagattgcacaatacccaggctcccttctactgtggggaagggcctgcacgttggctgttttttaaacttctagttcaatttccttccataatgctactgattttctggcatacagccgaattccatcttttaagcatgccttctacggtgggcttttcaaaacaggcttgagttttgtatgcacacgtttactacctctaactcctacatcagctagtgtggaagagggtgcacctcaaagcttttacacgtaaggacagcggcttggaatgtgagagccttttctccaagcagacccacactctgcatctcagtggcagctcccacaacgtgactgcaatgtctcttatacagtattccttggtgttttcttagtgtctggatgttcttacgtgaaatctgctccccagccctggtccttggcattttctgcttgaagctgggctgattttcttgtaatttacagcaggacgctttcagcagcagtctcttgggattttatctaagatgtttgaggatgagagggcaagaactataaacactcattaattctagtagtctccccatggccagacaatggcgattgttatttaatgagcttttcctttcaatggaattcagctctcacattagtatgatttcatttgatgtttcaaatagcaaagatgctaggtgcggtggctcccgcctgtaatctcagcactttgaggagggccaaggtgggaggattgcttgagctcaggacttcaagaccagcctgggtaaacatggcgagaccctgtctctaccaaaacaacaaaaaaaagacagactgctttgatcaaccctaaatgcaaaagcagcctatttttctttgtttaaaagtcaaaacataaaaaagcagagtataacatacaaaccattcttaactattcattaaaatgggtccttcaacaccttagtggggtttgttgttgttgcttatgcagagagattattttctttttattattttataatttttgaaatagagatggggtctcactgtgttgcccaggctggtctcgaactcctggacttaagtgagcctcccgcctcagtctcccaaagcgctgggattacaggcaggagccactgagcccagccaagacttcagtgttgactgctttggaggcacaaacccatgcaagcgttagttccaaagttcagtgtgtacccttaaatgaacaatgaagcaggtaaaattacccttgaaaaaaatcccttggaccacccataaatgacagtgactttttcaatatggactcatcatagccagttttccttttgaagttggaactgatcacccttttgtcatctgtaccagatcagtagttggcttgtgttacattttgtgtgtgtgtgtgcgtgttttaaaccagtgcatataaattgtatgttaaatgtaagtaactttaagttgacttatctcttcacagtaatcaagcctcacgtaattcatgctttttaaattcagccagccccccctctctgaaattttattatgtaaataatttgcgttccctgatcactcgtttaagttcttagttgcatgtcatctcttctctagcaggaattggcaaacttttttgtaaaggggtagaaagtgaagattttaggctttgcaggccatatagcctctgctgcaaatgctcagccctgctgttgtaatgtaaaagctgccacagacactacatgaacacgaatgagtgtggctggtgttccaataaaactttatttacac

SEQ ID NO: 17108 - DNA, 3366 bp, Homo sapiens
  CDS (16)..(1872)
aaaaaaaacaccatcatgctgtctgctggcagcttttcctccccctatgagcacctcagccagccagagacaaagcgcatggtagagcactacaccgcctatctcagcgacaacacccgcctcattgctaacccgggcctcaaattctctgtcagaaatgaagtaatggctaccagccacgtcacagatgaatggatgacacaaatggaaatgagtagcctgaacacttacattgtccgccgttacatagcaacacccaatggcgtcctcagaatttatcctggttccctcatggacaaagcatttgatcccactaggagacaatggtatctccatgcagtagctaatccagggttgatttctttgactggtccttacttagatgttggaggagctggttatgttgtgacaatcagtcacacaattcattcatccagtacacagctgtcttctgggcacactgtggctgtgatgggcattgacttcacactcagatacttctacaaagttctgatggacctattacctgtctgtaaccaagatggtggcaacaaaataaggtgcttcataatggaggacaggggttatctggtggcgcacccgactctcatcgaccccaaaggacatgcacctgtggagcagcagcacatcacccacaaggagcccctggtagcaaatgatatcctcaaccaccccaactttgtaaagaaaaacctgtgcaacagcttcagtgacagaacggtccagaggttttataaattcaacaccagccttgcgggggatttgacgaaccttgtgcatggcagccactgttccaaatacagattagcaaggatcccaggaaccaacgcgtttgttggcattgtcaacgaaacctgcgactctcttgccttctgtgcctgcagcatggtggaccgactctgtctcaactgtcaccgaatggaacaaaatgaatgtgaatgtccttgtgagtgccctctagaggtcaatgagtgcactggcaacctcaccaatgcagagaaccgaaaccccagctgcgaggtccaccaggagccggtgacatacacagctattgaccctggcctgcaagatgctcttcaccagtgtgtcaacagcaggtgcagtcagaggctggaaagtggggactgttttggggtgctggattgtgaatggtgcatggtggacagtgatggaaagactcacctggacaaaccctactgtgccccccagaaagaatgcttcggggggattgtgggagccaaaagtccctacgttgatgacatgggagcaataggtgatgaggtgatcacattaaacatgattaaaagcgcccctgtgggtcctgtggctggagggatcatgggatgcatcatggtcttggtcctggcggtgtatgcctaccgccaccagattcatcgccggagccatcagcatatgtctcctcttgctgcccaagaaatgtcagtgcgtatgtccaacctggagaatgacagagatgaaagggacgacgacagccacgaagacagaggcatcatcagcaacactcggtttatagctgcggtcatcgaacgacatgcacacagtccagaaagaaggcgccgctactggggtcgatcaggaacagaaagtgatcatggttacagcaccatgagcccacaggaggacagtgaaaatcctccatgcaacaatgaccccttgtcagccggggtcgatgtgggaaaccatgatgaggacttagacctggataccccccctcagactgctgccctactaagtcacaagttccaccactaccggtcacaccaccctacacttcatcatagccaccacttacaggcggccgtcacggtacacactgtcgatgcagaatgctaacaatctcctcacctccacgccaagatgagatctgggagctacagaatgttctggaaagaaaaagaaccggcttaaaacccacagcaagagacctcccttgtgtttgtgctttgtgcagagttgtttgagtcatttcctgcctgtcgacatggttaaaaacgagagaaacaacaacacagtcacatttgtgaagatgtgaggctggttctgaaatggaggggaaataagcctgatgaacagacctgccataacactaatggaaggtaacagaaggcgaacctccaaacacagagacggaacctgcaagtgaagctgagccagaggaatgttccaaagagccagaagcattcagctctccttaactggaagagggaaaaatctgctcacccagagactggaatgtggcacatgcagatacaaatgtgtgcattgaagatttcgctttgtttcttagcggtacctggataccacagttgctgtatggaactcatgttatgctctaaacgatgcatctcagaatttctaagtaaaggattatttttctactatttattgaactttcaaacattctcaaactttggggaaaaggaaaggaaacacaggagaagttttcagcagttgccccgagctgttttgtgtgtaatgaagtggttctttgattaaggagctctatttcttatttaactgatatcccactgccccactccacaaaataggaaaatgaagaaatctttctctctgacttgtttacatcatttcacggaaacacatctttgtttgtaatgcagtattctttctctgtgtttgacagagatgggggggggcagaggaatttaagaggttttaaaagaaatgttatgtttcttatgacttgtttccactcctcgtacaatgctattcttaggtttctacgaaacctaatgttagaaccgcatcctttcagctaagggagggttggatttattttccttgttttagagactacaaatttttaaatatcccattttgactgagaatattgacatataagggaagaagttttctaaattgtgaaagtctggttcttaattaaagaattttttttttaatatcacggttaaaagctgctgccagttagccaagacattatccaccaaattgctttgtgatttatacagggattaatcaaatctggctactataacatggggcattgtaactttaaagtagtgttttaattacagtgatgtattttagactcacattttgtgattcaaatatgttataaaggcattcttgcaccatggtaaagaatgtgtgtggtaaatctccgtttatatgtagttggaaaaaattcactgaataatgttttaatgatagggtattatgatacaatgtaaaaaacaattggttcttcagcagtacagaaagtaaactatatatgtgctatcaggaaaccccttcatactgtgtataaaattgcaatctagtgaaataaaccgtatgcaatgg

SEQ ID NO: 17109 - protein, 619 aa, Homo sapiens
MLSAGSFSSPYEHLSQPETKRMVEHYTAYLSDNTRLIANPGLKFSVRNEVMATSHVTDEWMTQMEMSSLNTYIVRRYIATPNGVLRIYPGSLMDKAFDPTRRQWYLHAVANPGLISLTGPYLDVGGAGYVVTISHTIHSSSTQLSSGHTVAVMGIDFTLRYFYKVLMDLLPVCNQDGGNKIRCFIMEDRGYLVAHPTLIDPKGHAPVEQQHITHKEPLVANDILNHPNFVKKNLCNSFSDRTVQRFYKFNTSLAGDLTNLVHGSHCSKYRLARIPGTNAFVGIVNETCDSLAFCACSMVDRLCLNCHRMEQNECECPCECPLEVNECTGNLTNAENRNPSCEVHQEPVTYTAIDPGLQDALHQCVNSRCSQRLESGDCFGVLDCEWCMVDSDGKTHLDKPYCAPQKECFGGIVGAKSPYVDDMGAIGDEVITLNMIKSAPVGPVAGGIMGCIMVLVLAVYAYRHQIHRRSHQHMSPLAAQEMSVRMSNLENDRDERDDDSHEDRGIISNTRFIAAVIERHAHSPERRRRYWGRSGTESDHGYSTMSPQEDSENPPCNNDPLSAGVDVGNHDEDLDLDTPPQTAALLSHKFHHYRSHHPTLHHSHHLQAAVTVHTVDAEC

SEQ ID NO: 17110 - DNA, 2892 bp, Homo sapiens
  CDS (125)..(2575)
ccggaccccggtgttcatcttcgagaggctctgcagcatcatttatcctgaggagaatgaagtcactgagttctttgtgaccctggagaaggatccccaacaagaagacttcttacagggcaggatgcctgggaacccgtatagcagcaatgagccaggcatcgggccgctgatgagggatataaagaacaagatttgccaggactgtgacttagtggccctcctggaagatgacagtggcatggagcttctagtgaacaataaaatcattagtttggaccttcctgtggctgaagtttacaagaaagtctggtgtaccacgaatgagggagagcccatgaggattgtttatcgtatgcgggggctgctgggcgatgccacagaggagttcattgagtccctggactctactacagatgaagaagaagatgaagaagaagtgtataaaatggctggtgtgatggcccagtgtgggggcctggaatgcatgcttaacagactcgcagggatcagagatttcaagcagggacgccaccttctaacagtgctactgaaattgttcagttactgcgtgaaggtgaaagtcaaccggcagcaactggtcaaactggaaatgaacaccttgaacgtcatgctggggaccctaaacctggcccttgtagctgaacaagaaagcaaggacagtgggggtgcagctgtggctgagcaggtgcttagcatcatggagatcattctagatgagtccaatgctgagcccctgagtgaggacaagggcaacctcctcctgacaggtgacaaggatcaactggtgatgctcttggaccagatcaacagcacctttgttcgctccaaccccagtgtgctccagggcctgcttcgcatcatcccgtacctttcctttggagaggtggagaaaatgcagatcttggtggagcgattcaaaccatactgcaactttgataaatatgatgaagatcacagtggtgatgataaagtcttcctggactgcttctgtaaaatagctgctggcatcaagaacaacagcaatgggcaccagctgaaggatctgattctccagaaggggatcacccagaatgcacttgactacatgaaaaagcacatccctagcgccaagaatttggatgccgacatctggaaaaagtttttgtctcgcccagccttgccatttatcctaaggctgcttcggggcctggccatccagcaccctggcacccaggttctgattggaactgattccatcccgaacctgcataagctggagcaggtgtccagtgatgagggcattgggaccttggcagagaacctgctggaagccctgcgggaacaccctgacgtaaacaagaagattgacgcagcccgcagggagacccgggcagagaagaaacgcatggccatggcaatgaggcagaaggccctgggcaccctgggcatgacgacaaatgaaaagggccaggtcgtgaccaagacagcactcctgaagcagatggaagagctgatcgaggagcctggcctcacgtgctgcatctgcagggagggatacaagttccagcccacaaaggtcctgggcatttataccttcacgaagcgggtagccttggaggagttggagaataagccccggaaacagcagggctacagcaccgtgtcccacttcaacattgtgcactacgactgccatctggctgccgtcaggttggctcgaggccgggaagagtgggagagtgccgccctgcagaatgccaacaccaagtgcaacgggctccttccggtctggggacctcatgtccctgaatcagcttttgccacttgcttggcaagacacaacacttacctccaggaatgtacaggccagcgggagcccacgtatcagctcaacatccacgacatcaaactgctcttcctgcgcttcgccatggagcagtcgttcagcgcagacactggcgggggcggccgggagagcaacatccacctgatcccgtacatcattcacactgtgctttacgtcctgaacacaacccgagcaacttcccgagaagagaagaacctccaaggctttctggaacagcccaaggagaagtgggtggagagtgcctttgaagtggacgggccctactatttcacagtcttggcccttcacatcctgccccctgagcagtggagagccacacgtgtggaaatcttgcggaggctgttggtgacctcgcaggctcgggcagtggctccaggtggagccaccaggctgacagataaggcagtgaaggactattccgcttaccgttcttcccttctcttttgggccctcgtcgatctcatttacaacatgtttaagaaggtgcctaccagtaacacagagggaggctggtcctgctctctcgctgagtacatccgccacaacgacatgcccatctacgaagctgccgacaaagccctgaaaaccttccaggaggagttcatgccagtggagaccttctcagagttcctcgatgtggccggtcttttatcagaaatcaccgatccagagagcttcctgaaggacctgttgaactcagtcccctgaccaccacacagcagctgcggcggcgaagacgaagctggcttgccttccaccttctgttctccctccttgtgcattaagttccctccgcgggatgctgcattgttaccccgccctcccctctctcatttttcttggtgtggcttggggtttttaggcttcctgttttatctcgtgtgtgtggtgcaccagctatgaggttgtctgtaacccaagccatcaaagggcctgtacatacctaggagccatgagttgtcccggccagcttcatacttgagtgtgcacatcttgagaaataaacaagtgacttaacacac

SEQ ID NO: 17111 - protein, 817 aa, Homo sapiens
MPGNPYSSNEPGIGPLMRDIKNKICQDCDLVALLEDDSGMELLVNNKIISLDLPVAEVYKKVWCTTNEGEPMRIVYRMRGLLGDATEEFIESLDSTTDEEEDEEEVYKMAGVMAQCGGLECMLNRLAGIRDFKQGRHLLTVLLKLFSYCVKVKVNRQQLVKLEMNTLNVMLGTLNLALVAEQESKDSGGAAVAEQVLSIMEIILDESNAEPLSEDKGNLLLTGDKDQLVMLLDQINSTFVRSNPSVLQGLLRIIPYLSFGEVEKMQILVERFKPYCNFDKYDEDHSGDDKVFLDCFCKIAAGIKNNSNGHQLKDLILQKGITQNALDYMKKHIPSAKNLDADIWKKFLSRPALPFILRLLRGLAIQHPGTQVLIGTDSIPNLHKLEQVSSDEGIGTLAENLLEALREHPDVNKKIDAARRETRAEKKRMAMAMRQKALGTLGMTTNEKGQVVTKTALLKQMEELIEEPGLTCCICREGYKFQPTKVLGIYTFTKRVALEELENKPRKQQGYSTVSHFNIVHYDCHLAAVRLARGREEWESAALQNANTKCNGLLPVWGPHVPESAFATCLARHNTYLQECTGQREPTYQLNIHDIKLLFLRFAMEQSFSADTGGGGRESNIHLIPYIIHTVLYVLNTTRATSREEKNLQGFLEQPKEKWVESAFEVDGPYYFTVLALHILPPEQWRATRVEILRRLLVTSQARAVAPGGATRLTDKAVKDYSAYRSSLLFWALVDLIYNMFKKVPTSNTEGGWSCSLAEYIRHNDMPIYEAADKALKTFQEEFMPVETFSEFLDVAGLLSEITDPESFLKDLLNSVP

SEQ ID NO: 17112 - DNA, 2383 bp, Homo sapiens
  CDS (439)..(2340)
cttcctagggttctttctagagtacggcagcaagttgtcagattccctagttgaatttgctttggacatcagtgtgaagcagaactgatatgccacttgaattaataaaggaagtcaatggggtgcctgaagttcagccgctgagtaaattacataaagtagatttcggatccctacagccaggttacaattatagcaagaaatatattcagggaaaactttcacttatctcttctttaacttatcgtggaaataaaacagctgttttgcagattggactacaaggacaccattgcagtggctagatttattgtttttttagcttcttcatctacaagcagagatggtaaaccttgcatatttttgaaagcatttgaagacctcaaatcaactgtttatgtttatgtcaaatctttaagagatttttctacagaatcaatgtctttggttccagcaacaaattatatatatacacccctgaatcaacttaagggtggtacaattgtcaatgtctatggtgttgtgaagttctttaagcccccatatctaagcaaaggaactgattattgctcagttgtaactattgtggaccagacaaatgtaaaactaacttgcctgctctttagtggaaactatgaagcccttccaataatttataaaaatggagatattgttcgctttcacaggctgaagattcaagtatataaaaaggagactcagggtatcaccagctctggctttgcatctttgacgtttgagggaactttgggagcccctatcatacctcgcacttcaagcaagtattttaacttcactactgaggaccacaaaatggtagaagccttacgtgtttgggcatctactcatatgtcaccgtcttggacattactaaaattgtgtgatgttcagccaatgcagtattttgacctgacttgtcagctcttgggcaaagcagaagtggacggagcatcatttcttctaaaggtatgggatggcaccaggacaccatttccatcttggagagtcttaatacaagaccttgttcttgaaggtgatttaagtcacatccatcggctacaaaatctgacaatagacattttagtctacgataaccatgttcatgtggcaagatctctgaaggttggaagctttcttagaatctatagccttcataccaaacttcaatcaatgaattcagagaatcagacaatgttaagtttagagtttcatcttcatggaggtaccagttacggtcggggaatcagggtcttgccagaaagtaactctgatgtggatcaactgaaaaaggatttagaatctgcaaatttgacagccaatcagcattcagatgttatctgtcaatcagaacctgacgacagctttccaagctctggatcagtatcattatacgaggtagaaagatgtcaacagctatctgctacaatacttacagatcatcagtatttggagaggacaccactatgtgccattttgaaacaaaaagctcctcaacaataccgcatccgagcaaaattgaggtcatataagcccagaagactatttcagtctgttaaacttcattgccctaaatgtcatttgctgcaagaagttccacatgagggcgatttggatataatttttcaggatggtgcaactaaaaccccagatgtcaagctacaaaatacatcattatatgattcaaaaatctggaccactaaaaatcaaaaaggacgaaaagtagcagttcattttgtgaaaaataatggtattctcccgctttcaaatgaatgtctacttttgatagaaggaggtacactcagtgaaatttgcaaactctcgaacaagtttaatagtgtaattcctgtgagatctggccacgaagacctggaacttttggacctttcagcaccatttcttatacaaggaacaatacatcactatggatgtaaacagtgttctagtttgagatccatacaaaatctaaattccctggttgataaaacatcgtggattccttcttctgtggcagaagcactgggtattgtacccctccaatatgtgtttgttatgacctttacacttgatgatggaacaggagtactagaagcctatctcatggattctgacaaattcttccagattccagcatcagaagttctgatggatgatgaccttcagaaaagtgtggatatgatcatggatatgttttgtcctccaggaataaaaattgatgcatatccgtggttggaatgcttcatcaagtcatacaatgtcacaaatggaacagataatcaaatttgctatcagatttttgacaccacagttgcagaagatgtaatctaatattgccatccaatttagcatacataaaatgttgccactc

SEQ ID NO: 17113 - protein, 634 aa, Homo sapiens; identical to SEQ ID NO: 12761

SEQ ID NO: 17114 - DNA, 2062 bp, Homo sapiens
  CDS (136)..(1776)
actgtttcttgtcaagaaaaggatcttttggcactggaacaagatgctgtctttggcctggaatccctactggtactttgtagtcaagatgatagtccaggtgctcaggccactttaaagattgctctaaactgtatggtgaagttggccaagggcaggccccatcttagccagtcagtagttgagaccttgttgactcaattgcacagtgctcaagacgctgcccggattttgatgtgccattgcctggcagccattgccatgcaactgccggtgctgggtgatgggatgcttggtgacctcatggagctgtacaaggtgattggacgatcagccacagacaagcaacaagaacttctggtgagtttggctactgtgatttttgttgcaagtcagaaggcattgtctgtggaaagtaaggcagtaattaagcagcagcttgaaagtgtctccaatggatggactgtataccgtattgccagacaggcttccagaatgggtaatcatgacatggccaaagagctttatcagagtttgctgactcaggttgcctcagaacatttctacttctggctaaatagtttgaaggagttttcacatgcagaacagtgtctcactgggttgcaagaggaaaattatagttcagcactttcttgcattgctgaatctttaaaattctatcacaaagggattgcttccttaacagcagctagtacaccactgaatcctttaagctttcagtgtgaatttgtaaaactcaggattgaccttttacaagccttctctcaacttatctgtacttgtaatagcctgaagacaagcccaccacctgcaattgccacaacaattgccatgaccttaggaaatgacctccagaggtgtggtcgcatctccaatcagatgaaacagtccatggaagaatttcgaagccttgcttctcgatatggagatctttaccaggcatcttttgatgctgactcagcaactttgaggaatgttgaactacagcagcagagctgtttactgatatctcatgcaatagaagccctgattttggatccagaatcagcaagtttccaggaatatggatctactggaacagcccatgctgatagtgaatatgaaagaagaatgatgtctgtatataatcatgtcttggaggaggtagaatcactcaatcggaaatatacccctgtttcttatatgcacacagcatgcctctgcaatgccatcattgctttgctgaaagttcccctttctttccagagatattttttccagaaactacagtctaccagcatcacgcttgctctgtcaccatcgccccggaatcctgcagagcccattgctgtccagaataaccagcagctggcgctaaaggtagagggagtggttcagcacggatctaaaccaggactcttccgcaaaattcagtctgtctgtctgaatgtttcttccacactgcagagtaaatctggacaagactacaagatacccattgacaacatgaccaatgagatggagcaaagggttgaacctcataatgattacttcagtactcaatttctgttgaactttgctatccttggaacacacaacattacagtggaatcttctgtgaaagatgccaatggtatagtatggaagactggtcccagaactaccatatttgtaaaatccctggaagacccttattcccagcaaattcgcttacaacagcagcaagcccagcagccattacagcagcagcagcaacgcaatgcctacacacggttttaaccatggaatgaatgcactgcagactctcaagagatcaatcaaattgccagaaacagtttggtttttcatatggaataagtattaaagttacagtgtagttcatttattcattgatttttgtaatgtaatattctggaaaaaattttgttttcttaaaaattttgtctgacagctgggcgtggttgctcacgcctgtaatcccagcactttgggaggctgaggtgggcggctcacgaggagatcaagaccatcctggctaacacagtgaaaccccgtctccact

SEQ ID NO: 17115 - protein, 547 aa, Homo sapiens [sequence omitted]

SEQ ID NO: 17116 - DNA, 1931 bp, Homo sapiens
  CDS (26)..(925)
agttgcacgctgagccgcggacaccatgcagtcggatgatgttatctgggatacactaggaaacaagcaattttgttccttcaaaataagaaccaagactcagagcttctgccgaaatgaatatagcctgactggactgtgtaatcggtcatcctgtcccctggcaaatagtcagtatgccactattaaagaagagaaaggacagtgctacttgtatatgaaggttatagaacgagcggcttttcctcggcgtctctgggaacgggtccggcttagtaaaaactatgagaaagcactggagcaaatagatgaaaatctgatttactggccccgtttcattcgacacaaatgtaagcagagattcaccaagatcacccaatacctaattcgaattagaaaacttacactaaagcgacagaggaaacttgttcctttgagtaagaaggtggagcgtagggagaaaagaagagaggaaaaggcattaatagctgctcagctggacaatgccattgagaaggaattactggagagactgaaacaagatacgtatggcgacatctacaacttccccattcatgccttcgacaaagccctggaacaacaggaggcagagagtgactctttagatactgaggaaaaagatgatgatgatgatgatgaggaagatgtggggaaaagagaatttgtcgaagatggtgaggtagatgagagtgacataagtgattttgaggatatggataaactggatgccagcagtgatgaagatcaggatggtaaatcctccagtgaggaggaggaagaaaaggcccttagtgcgaaacacaaaggcaaaatgcccttgagaggaccactgcagagaaaacgagcctatgtggaaatagaatacgagcaggagacagagcccgtggccaaagccaaaaccacgtgatttccctttcagcatttatacccaggactgaacatgcagaactgtttttttttttttttttatcttaaacacatacacacctccagtttttgctcttttgtgttgtactgaacacaatatttgtgtttttattatttatgccacgtcagtggggcaagaaatctggagtgagtgaagaaagctaagttgtgaacaagagtgtttttatagcatatgtgttgaagtaacagcttgtgcccgagaaacttaacagatgagttcttgaatctgggatgagatgacggatgtaaatatttctaaattttaaatgctacattacttggtgtttttttttctcccaaactttatttagaaatggaaggagttcaattttttcttgttctactttccctattcttatggaggtaaaaggaaagaaggaaggaaaaagcagctttcacttacaaagtttcgtgtaaaaatatctttttttcttaaataactccattcatacaaattgggatgggaagaaaatcctttcctcttgggaaagtaatacaagtcttaagttccattgtagggtgcgccttcagaaacctgctgcacttttctgatatagttcaccacttttctgtcttcacagctttggggaattttggccaggagaccctgaaacatgaaaccaaacaggctttgatatatatttttttttaattactttccccttttgcttgattcttcttccttggtatcatattcaaaggaggaaagaatgtatgacacttagggacaggtcactaagcagaataggtattagttggttttttattatttttaaatttatatagctctcatgtattgaaggtgctactttaaaaactgtgttaatgtacttgcaaatctcctgctggctcatgaaacagcagaattccagccaaggcaaattcagttggatctagggcttgaaaactgcccaagattaaagagctaagatgaaatagtttgaataaactggtaaaataac

SEQ ID NO: 17117 - protein, 300 aa, Homo sapiens [sequence omitted]

SEQ ID NO: 17118 - DNA, 2140 bp, Homo sapiens
catggtcttgcaggtggaacagatgtgcccttttcagaggttgtgaagttagctccaaatcccagactagctgctaccccaagcccgggagcttctcaggtctacgaggcccttctcccccagtatgccaaactcgagcagagaatcttgtctcagacccgggggcctccggagtgaacaggcatccctgttgcccctgcctgcccagatttactgaccccatttgtcgacatggccccagacaggagggatccacttctctgttctgaacagctcttcctgcccctactgactccttggagtgtccaggaccatcttaaagccgccctcagcacatctgcatgaagataggtaggcactcctgtccctgtgcccgtgtgccccagggcaggaaagcatctctcttttcctgtcttttatcccaggaggcaggacaacactgagactgggatatgtccaataaaaactatgacttttccccttgcagaggcagaattaaagctaatctagggactcaaatcagcagaatgggggagacaaagcccggtctcaccccctaacctcatcctatctctttctccaaccctgactgcccactcctccacaaaccgtgacccatagccgcccccaccccataccttgatctaccatccatcctcttccccaatccaaaccccacagtctcttctctcccacaccctgccctccttgtttcagctgtctgaggtgcctcgcagggcctctcttacttgccccatgctcaccctttccatgctgtccccattctctcctttcaccatctctcctctccccctccttcatctctcctccctccccaaactcacttggcataattcacaacctcccacccaaacaatgggcctggtggacgtgcttcctgtgccctccctttagctatgcccacagatcactgagagagaccatctcccaagtggtgcagtttagaacttctctccctttttctccctcattccctctctcttcttgcagtccacttgctgaagaagttgtgtcatttctctggaagaatttccaaaattctggatttcttttttattttggagtatttcatcagctgaaaagtgattctcactttgagttttcttcctatatttgtatagtgagttcctttttccttcctctttatccctcctgttttactttatacctctctattccttgctcaaattattgcaaaagcctctatagaaagtcctctgtgatctgactcctgcagactcttccagatttttctgcccaaggcctttactgagctcaggactccagctaaatcaaaatacgcatgttctcacccagagtgacaaaatcctgcagataggtttaagacctagtggctcagagcagtagctactgggaagttaaaaggaaggggcttagaaaatgaatgggaccaaaggcatcacttctgatggagatgaagccatcttgaaagtgagtggtgtcctttggaggcatggtggatgaaaggcgcaaaggaagcaagaggttaaagataatggcccattagatacaacagcaagcccaagattccgaagaagacagacaactccccctagtaccacctagacattactttttaaagacattttacattattgtccagcagaaaaaggctgtcttggaccatgaaacagtaaactgtaactaaacacttcaacatgaatttgaaaataaataattgtggatataaaagaacaccagagatcagaaattcaaaaactcagaataaaaatgaaaaagctacaagcatatatgagaagagaactgactgaacttgggaaataatttgaacaaaaagataaatcttcacagatatgaatactaaattatatcttaatgaaaatagatatggtcacaagtacattaaggcacgtagaaggtaggagtaagaaaagctaagagaagcaaaacaaacaaagcaatattaaaggaagagccaaaaagacccagaaataaaatgacagataaagaagattgtcaaagaaaagatgatacaggtaagattggaactcatgaagacaaaagataagacagtggcatagagttaatatttaaaattcaaatattaaaactcaaataaaccccaaagaacttttgg

SEQ ID NO: 17119 - DNA, 2035 bp, Homo sapiens
  CDS (9)..(1856)
tctctttaatgatggagggaagcaggcagacgcgagtgtctcggccatacaagatcagcgaatcatcaaaggtataccgctgggccgaccactcaagcacggtgctgcagcggctgaacgagcagcgtctccgcgggctcttctgcgacgtcgtcctggtggccgatgagcagcgtgtgccagcccatcgcaacctgctggccgtgtgcagcgactacttcaactccatgttcaccatcggcatgcgggaagctttccagaaggaggtggagctgatcggcgcctcctacattgggctcaaggccgtggtggacttcctgtacggcggggagctggtgctggatggcggcaacattgactacgtcctggagacggctcacctgctgcagatctggacggtggtagacttctgctgtgagtacctggagcaggaggtgagcgaggacaactacctgtacctgcaggagctggcctccatctacagcctcaagcggcttgatgccttcatcgatggcttcatcctgaaccacttcggcacgctgtcctttacgcccgacttcctgcagaacgtctccatgcagaagctgtgtgtctacctgagcagcagcgaggtgcagcgggagtgtgagcacgacctcctgcaggccgccctgcagtggctgacgcagcagcccgagcgcgaggcccacgcccgccaggtgctggagaacatccacttcccgctcatccccaagaacgacctgctgcaccgcgtcaagccggccgtgtgctcgctgctgcccaaggaggccaactgcgagggcttcatcgaggaggccgtgcgctaccacaacaacctggcggcccagcccgtcatgcagaccaagcgcacggcgctgcgcaccaaccaggagcgcctgctgtttgtgggcggcgaggtctccgagcggtgtctggagctcagtgacgacacctgctacctggacgccaagagcgagcagtgggtcaaagagacgccgctgcccgcccggcggagccaccactgtgtcgcggtgctggggggcttcatcttcatcgccggcggcagcttctcacgggacaacggaggggatgcggcctccaatcttctttataggtatgacccccgctgtaaacagtggatcaaggtggcctccatgaaccagcgccgtgtggatttctaccttgcctccatcgaagacatgctggtggccatcggcggccggaatgagaacggagcgctctcttcagtagagacgtacagtcccaagactgactcctggtcctatgtggccggcttgccaaggttcacgtacggccacgcgggcaccatctacaaagacttcgtgtacatctcggggggccacgactaccaaattggcccctaccgcaagaacctgctatgctacgaccaccggacagacgtgtgggaggagcggcggcccatgaccacggcgcgcggctggcacagcatgtgcagcctgggtgacggtatctactccatcgggggcagcgatgataacatcgagtccatggagcgcttcgacgtgctgggcgtggaggcctacagcccgcagtgcaaccagtggacccgcgtggcgccgctgctgcacgccaacagcgagtcgggcgtggcagtgtgggagggccgcatctacatcctgggcggctacagctgggagaacactgccttctccaagaccgtgcaggtgtacgaccgcgaggccgacaagtggagcaggggcgtcgacctgcccaaggccatcgctggcgggtccgcctgtgtctgcgccctggagccacggccagaggacaagaagaagaaaggcaaaggcaagaggcaccaggaccggggccagtgaccctagctgcgcctcttgggaccatcctcaccgtcacctcccagggctctgtagaccagcagcaacttcttagtattccggaaacattatgtacaacttagcagctttttttacttttatgattcttggtatttctatgatatcacagtaaccaattaaatactatctgtaacttt

SEQ ID NO: 17120 - protein, 616 aa, Homo sapiens
MMEGSRQTRVSRPYKISESSKVYRWADHSSTVLQRLNEQRLRGLFCDVVLVADEQRVPAHRNLLAVCSDYFNSMFTIGMREAFQKEVELIGASYIGLKAVVDFLYGGELVLDGGNIDYVLETAHLLQIWTVVDFCCEYLEQEVSEDNYLYLQELASIYSLKRLDAFIDGFILNHFGTLSFTPDFLQNVSMQKLCVYLSSSEVQRECEHDLLQAALQWLTQQPEREAHARQVLENIHFPLIPKNDLLHRVKPAVCSLLPKEANCEGFIEEAVRYHNNLAAQPVMQTKRTALRTNQERLLFVGGEVSERCLELSDDTCYLDAKSEQWVKETPLPARRSHHCVAVLGGFIFIAGGSFSRDNGGDAASNLLYRYDPRCKQWIKVASMNQRRVDFYLASIEDMLVAIGGRNENGALSSVETYSPKTDSWSYVAGLPRFTYGHAGTIYKDFVYISGGHDYQIGPYRKNLLCYDHRTDVWEERRPMTTARGWHSMCSLGDGIYSIGGSDDNIESMERFDVLGVEAYSPQCNQWTRVAPLLHANSESGVAVWEGRIYILGGYSWENTAFSKTVQVYDREADKWSRGVDLPKAIAGGSACVCALEPRPEDKKKKGKGKRHQDRGQ

SEQ ID NO: 17121 - DNA, 2358 bp, Homo sapiens
  CDS (105)..(1025)
atgcatgtgtgcctgtgtgtgtgtgcctgtgtgtgtgggtgcacatttgtgtgtgtgtgtgtgcctgtgtgtgtgtgtgcacgtatgtatgtgtgcacacttgtatgcatgtgtgcctgtgtgtgtgggtgcacatttgtgtgtgtgtgcctgtgtgtgtgggtgcacatttgtgtgtgtgggtgcacatttgtgtgtgtgtgcgcctgtgtgggtgcacatttgtgtgtgtgtgtgcctgtgtgtgtgcctgtgtgtgtgggtgcctgtgtgtgtggggcacatttgtgtgtgtgtgtgcctgtgtgtgggtgcacatttgtgtgtgtgcctctgtgtgtgtgcctgtgtgtgggggtgcacatttgtgtgtgcgcctgtgtgtgggggtgcacatttgtgtgtgcgcctgtgtgtgtgggtgcacatttgtgtgtgtgtgcgcctgtgtgtgtgggtgcctgtgtgtgtgtggggcacatttgtgtgtgtgtgtgtgcctgtgtgtgggtgcacatttgtgtgtgtgcctgtgtgtgtgtgcctgtgtgtgggggtgcacatttgtgtgtgtgtgtgcctgtgtgtgggggtgcacatttgtgtgtgtgtgtgcctgtgtgtgtgggtgcacatttgtgtgtgtgtgtgcctgtgtgtgtgggtgcacatttgtgtgtgtgtgcctgtgtgtgtgggtgcacatttgtgtgtgtgtgtgcctgtgtgtgtgggtgcacatttgtgtgtgtgcctgtgtgtgggtgcacatttgtgtgtgtgtgcctgtgtgtgtgtgcctgtgtgtgtgggtgcacatttgtgtgtgtgtgtgcctgtgtgtgtgggtgcacatttgtgtgtgtgtgtgtgcctgtgtgtgtgttgcaggccctggatgccagacactgaataaacgcaggaagacgtctgtcttcattctcctcgtgggtcgctggtccagaaacaccttgatggaaagtgctctgcaggaacggtgcctctgcctgtggcggggaccctggtgagcggatgggccagccccacgtgtcttccggccactcagcatgcagtgtttccaggggcactaagagaccaaaatcgagatatgattagctgtaggatgtcatctaatcacagatcatcccgaggctaatttatctcccccatgaccataacacatcaaaaagttgactttttgcagctcggctgtgcctcatcttcccacgaagccccgacaggcacatccagtgaggaaccacagtgggagtcctgtggcagggtcaccccacttccgatgccctccagctgcatcttggcacgaaaaaggctgcccagttctcatgccctttcaagtcccgggctggggggtagcagtggaggctggggttaaccgccgtccgtctcaaaggcctcattgtggagctgcaaacacgaacgtccttgaaatgtgaggggacagtgctctggggcaggggctgctcactggttcatggccagaggtgagcgggctctgggtctgggtctgtgaggtgctgtggacgtcgggggtgctcctggggcagggacacagccacggccctcacaccagtggagccgtcttccttcccgaggcagaggcttggccttctcacaccttgggacccttctctcccctgtgctcatgctggaagcacagcgtgagggggcaaaggtcatgggaggcaaaaggctgggctgaggccgaggctctgtggctgtggccggataccaggtcctgtggtggtgtgggcagggcgcgctctctcctctgagcagcctggggctgcgtgtgtgaacagaaacaggcctgccgatttgaagatggtttgaccaagtctcccaaagctgaagagaggtccctgcccatgtcccccgggtggcaatccacagacgcacctgtgtccatcagacggtatcgttgatagggagtctgaagccacccagacgtggtctgttcacgccgtggacaccacggtctgaggcagacggttacagccaccggcataggcgaatctcagccagagagagtgaactgggacaccattcacgtgatgggccagatgggctggcagcggctcgctggagccgtccgggtgggaacgctgtgtctgttggtctggtgctgcttatgtggctggttcaggtctgtcatccgtcaacctgcatatttatcactggtgcattttcatgtatgttgtacctcaattaaaacattttagggccgggcgcggtggctcacgcctgtaatcccagcactgtgggaggcggaggcgggaggatcatgaggtcaggagatcgagaccgtcctggccgacatggtgaaaccccatctctact

SEQ ID NO: 17122 - protein, 307 aa, Homo sapiens
MHVCLCVWVHICVCVPVCVGAHLCVWVHICVCVRLCGCTFVCVCACVCACVCGCLCVWGTFVCVCACVWVHICVCASVCVPVCGGAHLCVRLCVGVHICVCACVCGCTFVCVCACVCGCLCVCGAHLCVCVCLCVGAHLCVCLCVCACVWGCTFVCVCACVWGCTFVCVCACVCGCTFVCVCACVCGCTFVCVCLCVWVHICVCVCLCVWVHICVCACVWVHICVCVPVCVCLCVWVHICVCVCLCVWVHICVCVCACVCVAGPGCQTLNKRRKTSVFILLVGRWSRNTLMESALQERCLCLWRGPW

SEQ ID NO: 17123 - DNA, 1977 bp, Homo sapiens
  CDS (474)..(1871)
ctatcgagaatcactgcagtatccagcagcaaaggaagattgctcagtacctgaaaggaatattcggagacaaactggacctgtcatctgttgatacaggggagtgcaagcagcttccaagccctcaaagtttgaaaggcaaaattctagtgaagggtaagaagttgccttatcaccttggggatgatgcagaggaaggggaagtttccgatgaggacagtgcagatgaaattgaagacgagtgcaaattcaagctccattatagtaatgggaccactgagcatcaggtggaatctttcataaggaaaaaactggagtcactgttaaaagaatctcaaattcgagataaagaagatcctgatagtttcacagtgcgggcactactgaaggccacgcatgaaggcttaaatgcacacctgaagcagagtccagatgtaaaggaaagtggaaagaaatcacatggacgatccctcatgaccaactttggaaaacataagaaaactacaaaatcacggtctaaatcttacagtactgatgatgaggaagacacacagcagagtactggcaaggagggtggccagctgtacagattgggtcgccgaaggaaaaccatgaagctctgccgagaactctctgatttggttgtgtacacaaactccgtggccgctcaggacattgtggatgacggaaccacaggaaatgtgttatcattcagtgaaacaagagcacatcaggttgttcagcaaaaatcagagcagttcatgatttataatcaaaagcaactcacgaggatttacccctctgcctaccgcattgattccagtaacttcaaccctctcccctactggaacgcaggctgccagctagtggcactgaattatcaatctgaaggacgaatgatgcagttaaaccgagccaaattcaaggcaaatggcaattgtggctatgtcctcaaaccccagcaaatgtgcaaaggtactttcaaccctttctctggtgaccctcttcctgccaaccccaaaaagcagctcatcctgaaagttatcagtggacagcaactccccaaacctccagactccatgtttggagatcgaggcgagatcattgacccttttgttgaagttgaaattattggattgccagtagattgttgtaaagatcaaacccgtgtggtagatgacaatggatttaaccctgtgtgggaagaaacactgacatttacagtacacatgccagaaatagctttggttcggttccttgtgtgggatcacgatcccattggacgagactttgttggacaaagaactgtgaccttcagcagcttagtgcctggctaccggcatgtctatttggaaggactgacagaagcatccatatttgtacacataaccatcaatgaaatctatggaaagaacagacaactccagggtctgaagggactgttcaataagaatcctaggcacagttcttcagaaaacaattcccattatgtacggaagcgatccattggagatagaattctgcgacgcacagctagcgccccagccaaaggcaggaaaaagagcaaaatgggcttccaagaaatggtggagataaaggattctgtgtccgaggccacaagagatcaagatggcgtgctgaggaggaccacacgcagtttgcaagcacgccctgtctctatgcctgttgacagaaaccttctgggagctttgtcgctgcctgtatctgaaacagcaaaagacattgaaggaaaagaaaactctctagactctagcttttgcaggccgactgagcaggctaaagcagaaatgtgcaaagtgcctttccccagacagttagaatgtgtaatgaagatggaaatttccgagacctgaatccccaaacccagactgatctctcttctcttcttgaatataaaagtaagctggcaagatttaaaaaactgaacccaaataaatattcatcatttttttcttc

SEQ ID NO: 17124 - protein, 466 aa, Homo sapiens
MTNFGKHKKTTKSRSKSYSTDDEEDTQQSTGKEGGQLYRLGRRRKTMKLCRELSDLVVYTNSVAAQDIVDDGTTGNVLSFSETRAHQVVQQKSEQFMIYNQKQLTRIYPSAYRIDSSNFNPLPYWNAGCQLVALNYQSEGRMMQLNRAKFKANGNCGYVLKPQQMCKGTFNPFSGDPLPANPKKQLILKVISGQQLPKPPDSMFGDRGEIIDPFVEVEIIGLPVDCCKDQTRVVDDNGFNPVWEETLTFTVHMPEIALVRFLVWDHDPIGRDFVGQRTVTFSSLVPGYRHVYLEGLTEASIFVHITINEIYGKNRQLQGLKGLFNKNPRHSSSENNSHYVRKRSIGDRILRRTASAPAKGRKKSKMGFQEMVEIKDSVSEATRDQDGVLRRTTRSLQARPVSMPVDRNLLGALSLPVSETAKDIEGKENSLDSSFCRPTEQAKAEMCKVPFPRQLECVMKMEISET

SEQ ID NO: 17125 - DNA, 2021 bp, Homo sapiens
taactaatacatgtacaaccaatcagacttgccatggtatgggatctatataatcttccaagcccccttaagtgggcgataatgaaaactttatcattaggaggaggtttagagagttgtttttattgacatcttgtcttgattcctcttctgtgtgacccactggattcagaggtccccatgagcaccctcaggttcaatgattcatgagtagaactcagaggtagggaaaactgttatatgcacatttagcatttattacaacaaaaggatgcagatgaaaagcagcaaatgtgaaaggcacctctagagagagtccaagagagcccaggcacaagcttccagtggggttgcacagtcagcatctaatcctcccagaaataatgtttaacaacacgtggagtattgtcagccaggaaagctcatccaagttttggtgtccaggggatgtttgggggtatggagtaggtatggagtgccttcatggcctgcatggctaaacttagttattcagtctccagtccctctagaggtcaagctgatactgcacgacctaaggccccaccataaatcacattgttaacataaactatctgtcatggcacgaagccccaggtacaagagacactcatcaggcaggatattccaaggatttacaggggattccccaggagctggtcaaggaccagatgttcctctgaaaggtacaggatttgagctcatctgtggagtacgtctgtggagtcaactttcttctgcatccccacatactgatttgccaccttcattgtatcagattcctttttcactatattcaggtttgcggttgctccagtatccctatctatgctgagtctccacgtagagcatgtgtgccctctccagtggctctgcacggaccccttatttctcattaccagggacagcttttctcctgatgtgcctggtgctccttctccactctcttgccttaggactctgctgggccatgagtatttttcttacccttttgtgacctagggctgcccttgggtgaggaaagtcactttctgttcatcatctaagtagaaaacagtttctgccattggaagacccctgagttccctggcactcctgtgaatcacaaggtgcctggggaggtagaacttggacattggagagaggagcagccagacatttctctttctaatcatatgcagaaagatttctttttattctccagaacacttgaaagactctccaagttatgcaaatgttaagctcataaatgtatattatcatgacttttgcaaagatgaagaggatacagcaaattttctgggaggcaaagggacttctacctggataggaaccaagcaaactcattaagcatggattaatttgattcaacccttgcgtggatattaattaaggacctttgacaggagagggtcctcaaggttcctcaaagagtaacttatcatcaaggaaggtgaagaatggatggatggcttgggcccaagactggggctattcacttgtggggaaacccatgtgaacccagttaccccatactttgggaataatgactgagcatgactataatctttaagaagctcaaatgcggaatacctctgaggcttatgcaaggatctggcctagcatcaaggacaaaggctcagaggactccttggggccagttttctacagtcataccatcagccacaacagcagcaaaggcagaaggaaaacagggcccaggagtggctgacgactgcctggagtccaactggtctcctggagttcataagaggtttgaccccttctgagctgaatgtgtcctgatttaggggatagctagggcaataagaaagcctcagggggtgctactgatctggaactcctactaattagtgtgtatgtatgtggccaccagtggttagcagatgaggtgaaagagatgggacagtgactgtatctgttctgatgaaggagattgtgcagttacatgcgtaacgtcattaaacttcattcttccaggt

SEQ ID NO: 17126 - DNA, 2857 bp, Homo sapiens
  CDS (623)..(1243)
atttcaagggatccgtagactgaaagaattaattctaagctccaacaaaattacttatctgcacaataaaacatttcacccagttcccaatctccgcaatctggacctctcctacaataagcttcagacattgcaatctgaacaatttaaaggccttcggaaactcatcattttgcacttgagatctaactcactaaagactgtgcccataagagtttttcaagactgtcggaatcttgattttttggatttgggttacaatcgtcttcgaagcttgtcccgaaatgcatttgctggcctcttgaagttaaaggagctccacctggagcacaaccagttttccaagatcaactttgctcattttccacgtctcttcaacctccgctcaatttacttacaatggaacaggattcgctccattagccaaggtttgacatggacttggagttccttacacaacttggatttatcagggaatgacatccaaggaattgagccgggcacatttaaatgcctccccaatttacaaaaattgaatttggattccaacaagctcaccaatatctcacaggaaactgtcaatgcgtggatatcattaatatccatcacattgtctggaaatatgtgggaatgcagtcggagcatttgtcctttattttattggcttaagaatttcaaaggaaataaggaaagcaccatgatatgtgcgggacctaagcacatccagggtgaaaaggttagtgatgcagtggaaacatataatatctgttctgaagtccaggtggtcaacacagaaagatcacacctggtgccccaaactccccagaaacctctgattatccctagacctaccatcttcaaacctgacgtcacccaatccacctttgaaacaccaagcccttccccagggtttcagattcctggcgcagagcaagagtatgagcatgtttcatttcacaaaattattgccgggagtgtggctctctttctctcagtggccatgatcctcttggtgatctatgtgtcttggaaacgctacccagccagcatgaaacaactccagcaacactctcttatgaagaggcggcggaaaaaggccagagagtctgaaagacaaatgaattcccctttacaggagtattatgtggactacaagcctacaaactctgagaccatggatatatcggttaatggatctgggccctgcacatataccatctctggctccagggaatgtgaggtatgaaccatgatcctcctaaaagcatttctactgcggggaaggagaggtaaatgtttgaagccctagaggtgtctctaatcactagaaagattaatgacccttttgcttttgggttttgctcagtgtgaaaggttacttaattaaattacaaccaccaggaaattgactgctttttttttttttaaatggttgaaacttgaaggaagttcattcaaggataagttggaataaagcactatgttaaaacatctgctttttaacaatttgtatacaggggttggacttaaaaacacacatacaaacaaaactcttttcattctgaaatttctgtctggttcttggtgtttgactgttgtaatggagtaaagaagagggccagcttaatttaaaaataaagtgagtttaccaaaattccagaaggtaatgaagatttaaaccaaagagcaattttcccaagggttgattttgttgtaaatttttagttttaatgaaagcatgcaacagggatctcacacccatgttacttgccatttagttattataccagcatagagaatgtcagaggcctactgtgtaattgtatcaggctcctaaggcttctttcttttttttttttgtttccttctttcctactttctttcactccttcctttccttcctttctcttccttctttttttgtttgtttgtttgttttttaattactgggatatagatccgatttcaaaggtttttatgcactggctatttgtgtttaatcagaatgaaacttcaattccatgctttggctttgtccctggtaactaaaatcaggtcacaattttgtggatgatctagcaataataaaatggcagtcataacagggactgtttgtcagtattgctgtcatccccaaaagaaatgatatgtattcttgttaaacttattaaaaaataagtgatacaaatatttataaataaaaggagagaggtttgagttctgggtatcctccctttctgtaacagcctcaaataaaggtgtaccttccatgttatattatttttgtttttataagaataaatttggacccggtttctgattatttaatttaaaagatcacttacaggatcatgttagtgagcagacaaatagtcacaaatttcaaacttgtcaataagtaatgctggatgtaaattgttcttttcttggtaatgttgatcattatgtgcaaagactgactactaaggccttgttgctggaagaaactagtgaagagaggttaaattctggcaatataatgttttagtatctgattttagatgatcactctttcaaaagacagttttaatgagtaattaaagatgttgccctttctaatgctagttaacagttggaaaatataattgctctttgatagcatatactccaatttttccatagtcctaactacaaatgctaatgaaaatgttttctgacaaagcactgaatttgaaataatctctaactcagtacaatttggactattgaactgttcttcaaagaattcattttcttcttttttgtgtatcattgaaaataagagaagtaatcccagataataaattcctaaaaggaaactgtataagcaattgccctt

SEQ ID NO: 17127 - protein, 207 aa, Homo sapiens
MWECSRSICPLFYWLKNFKGNKESTMICAGPKHIQGEKVSDAVETYNICSEVQVVNTERSHLVPQTPQKPLIIPRPTIFKPDVTQSTFETPSPSPGFQIPGAEQEYEHVSFHKIIAGSVALFLSVAMILLVIYVSWKRYPASMKQLQQHSLMKRRRKKARESERQMNSPLQEYYVDYKPTNSETMDISVNGSGPCTYTISGSRECEV

SEQ ID NO: 17128 - DNA, 2488 bp, Homo sapiens
  CDS (350)..(796)
agaaattgaagcacggatcagattatcatttgcacaggtgtatcaaggtcagaagaagtcaaaagaagctttgtcccactatcaagcagctttggaatatgttgagatcagtaaaggtgaaacaagtcgtgagtgtgtacccatattgagagaattagcaggtgtagagcaagccctgggactccacgatgtatccatcaaccacttcctccaggcacatctcatcatcctgagtagaagcccctctcaagtggaggcagcagactcggcacacatcgtcgcccatgctgctgtcgcttcagggagacacgagcaccatgatgtagctgagcagtattttcaagagagcatggctcatcttaaggattctgaagggatgggaagaaccaaatttctttcaattcaagatgaattttgccattttctacaaatgactggacaaaaagagagagcaacctcgatcctgagagagtccctggaagccaaagtggaagcatttggcgatttcagtcccgaggtggcagagacataccggctcctgggaggagcagacctggcgcaggggaaccacagtggggcccgcaagaaactgaagaagtgtctccagatccagaccctcttatatggaccgcaggacaaaaggactctggccacccagcaggccatgggcatgctgtccacggcccccaaggttgcttcgaagccaaggcaggcatcaaaagccaaagtggccttctgcaccagcatccctcaggacaccctgctggggaaggcccggcccggcacaacagcagactgaggcccccaccctgaaaaagcctaggacattcctgggcactgtcatttagggtgctgtacaaatcacctccgcctagaaaatggaattcaacagtcaggatacagatttccaaggccaactgttggccccaacatgcaacagtgaggccataagcctcccgtgggccacattttgacagtggatgcccttcagggtgatatatgctataaagcagttttctatcacctaagtggtttttcttgccaacaagaatttttacccatcagcactactgtggctgaaaaacttctcttcaacagttcagtgcgccctgtgcaggagtcagcccggcatctgcttgtacacacagctccttgcataggtgtggagttagatctggacagtgaacttcaggaagtcctttcttataggaggctaatagggattgagaataacatgagaagaaaacgctaataaagggaaacctgaacacgctgctgtcagcatgtgttttcaaagtgcagcctgcctcagagttcttcggagcctgaaaaggggtttgagaaagagcccagtaggaggggcaggaggccgacacacctgacttggcctggggcccaggaggcaggtgtaagggagtgaaaagaaaggctagccggaggctgcggggggaagaccgcagactccctgctgcttcgcatccctcctgtggcctccactgcaggcaggacaaacctggatgccacctggagctgcttcctgagttggcacactatcgtgtacacagcagtcttcagccccctggaaggaggccatagtcgtgtgaggatggcaaagtcgaacaggaagctttgagtgccttcctccacgatgtcaacgaggagatccagtgccagatcgaggtggatggaacacccaggggtaggggtgcaggtgtgggcagtgatgtcccttcccctccctcccctggtcccacagactgtggccatgaggctgcaggctggtgctatgacagcagattgcagcacagggccctcccctccagcccccagtgggacatcaaaaccaccctggggccatttgtgcagggcaccacctccagtattgatggggaaaataaactcagtagagccacgacagggtggagagaagcagggaccattgtcttcctcaggagcgtgacagctgaccccacagaccatgcttgctggtacacactggtcccagacccaggcctgtcggacatcagcagtgtgctaaaaacgtgtaagatgtggtcactactcaccgtgtgtcctatctagttgacatgggtggagtcagctaaggggtgaatgttcatatgctcccaattcacgttgaagccctaatccccaaagggatggtattgggggtggggtcttggagaggtgattaggttatgagggtggagccctgatgaatgggattagtgctttataaggagagacaccagagagatgatctctctctccaccatgtgaggacacagtgagaagacagccgtctgcaggcccggaagagagccctcaccaggaaatgaaactgttggcaccttgagacttcccagcttccagaactgtaagaaataaatgtttgttgtttaagcctttcaggctacggctttctgttacagcagcctgaactgagagtccatgccgagtttttgaaataaatgtgaattctgatgtt

SEQ ID NO: 17129 - protein, 149 aa, Homo sapiens
MAHLKDSEGMGRTKFLSIQDEFCHFLQMTGQKERATSILRESLEAKVEAFGDFSPEVAETYRLLGGADLAQGNHSGARKKLKKCLQIQTLLYGPQDKRTLATQQAMGMLSTAPKVASKPRQASKAKVAFCTSIPQDTLLGKARPGTTAD

SEQ ID NO: 17130 - DNA, 2378 bp, Homo sapiens
  CDS (474)..(2180)
attttagccagagctcagcccatatagtacatcagaaaacacaagctggagataaatttggtgaacataatgaatgtacagatgccctctaccagaaattagactttacagcacatcagagaattcacacagaagataaattctacctttctgatgaacatgggaaatgcagaaaatccttttaccggaaagcacacctcattcagcatcagaggccccactcaggagagaaaacttaccaatatgaggaatgtgcaaaatccttttgctcaagttcacatcctattcagcatcctggaacttatgtgggattcaaactttatgaatgtaatgaatgtgggaaagctttctgtcagaattcaaacctcagtaaacatctgagaattcacacaaaagagaaaccttgtgataacaatggctgtgggagatcttacaagtcacccctcataggacaccagaaaacagatgcagagatggaactctgtggtggcagtgaatatgggaagacatcacatctcaaaggacatcagagaattctcatgggggagaaaccctatgaatgtattgaatgtgggaaaactttctccaagacatcacatctcagagcacatcagagaattcacacaggtgaaaaaccctatgaatgtgttgaatgtgagaaaactttctctcacaagacacacctcagtgtacatcagagagttcacacaggggagaaaccctatgaatgtaatgactgtgggaaatcttttacctataactcagccctgagagcacatcaaagaattcacacaggtgagaagccctatgaatgcagtgactgtgagaaaacttttgcccataattcagccctcagagcacatcatagaattcacacgggggagaaaccttatgaatgtaatgaatgtggaaggtcttttgcccatatttctgttctcaaggcacatcaaagaattcacacaggggagaaaccctatgaatgtaatgaatgtgggagatctttcacctacaattcagccctgagagcacatcagagaattcacacaggtagaaaaccctatgaatgtagtgactgtgagaaaacttttgcccataattcggccctcaaaatacatcagagaattcacacgggggagaaaccctatgaatgtaatgaatgtgagaaaacatttgcccataattcagcccttagagcacatcagaatatccacacaggggagaaactctatgaatgtagtgaatgtggaaaaacttttttccagaagacacgcctcagtacacatcggagaattcacacaggggagaaaccctatgaatgtagcaagtgtgggaaaactttctcccagaaatcatacctcagtggacatgagagaattcacacaggggaaaaaccgtatgaatgtaacgtatgtgggaaaacttttgtctataaggcagccctcatagtgcatcaaagaattcacacaggggagaaaccctatgaatgtaaccaatgtgggaaaactttctcccaaagaacacacctctgtgcacatcagagaattcatactggggagaaaccctatgagtgtaatgaatgtgggaaaacgtttgctgataattcagccctcagggcacatcacagaattcacacaggggagaaaccctatgaatgtaatgactgtgggaagactttctccaagacatcacatctcagagcacatcttagaactcgctcaggggagaaaccctatgaatgcagtgaatgtgggaaaaccttctctgagaagtcatatgttagtgcacatcagagagttcatacgggggagaaaccctacgaatgtaatgtatgtgggaagccatttgcccataattcaaccctcagagtacatcaaagaattcacacaggggagaaatcctatgaatgtaatgattgtgggaaaacgttctcccagaaatcacaccttagtgcacaccagagaattcacacaggggagaaaccctatgagtgtaatgaatgcggaaaagcttttgcccaaaattcaactctcagagtacaccagagaattcacacaggggagaaaccctatgaatgtgatgaatgtgggaaaacttttgtccgtaaggcagctcttagggtacatcacaccagaatgcataccagagagaaaaccctagcatgtaatggatttgggaagtcctgagggaatgcataccttaccacataacacatagtgcagaaactcatgtgacataggctgggaacttgtttcccttatccatttcctttttcattaggctcatagtttgtggaaaaatcccaatatgccgtttattcaggtggggctgaccatgggatgtggtgctaatgataaatattacatttacccttggccctt

SEQ ID NO: 17131 - protein, 569 aa, Homo sapiens
MELCGGSEYGKTSHLKGHQRILMGEKPYECIECGKTFSKTSHLRAHQRIHTGEKPYECVECEKTFSHKTHLSVHQRVHTGEKPYECNDCGKSFTYNSALRAHQRIHTGEKPYECSDCEKTFAHNSALRAHHRIHTGEKPYECNECGRSFAHISVLKAHQRIHTGEKPYECNECGRSFTYNSALRAHQRIHTGRKPYECSDCEKTFAHNSALKIHQRIHTGEKPYECNECEKTFAHNSALRAHQNIHTGEKLYECSECGKTFFQKTRLSTHRRIHTGEKPYECSKCGKTFSQKSYLSGHERIHTGEKPYECNVCGKTFVYKAALIVHQRIHTGEKPYECNQCGKTFSQRTHLCAHQRIHTGEKPYECNECGKTFADNSALRAHHRIHTGEKPYECNDCGKTFSKTSHLRAHLRTRSGEKPYECSECGKTFSEKSYVSAHQRVHTGEKPYECNVCGKPFAHNSTLRVHQRIHTGEKSYECNDCGKTFSQKSHLSAHQRIHTGEKPYECNECGKAFAQNSTLRVHQRIHTGEKPYECDECGKTFVRKAALRVHHTRMHTREKTLACNGFGKS

SEQ ID NO: 17132 - DNA, 2753 bp, Homo sapiens
  CDS (9)..(1571)
gagagaaaatggcggcggagccgaacaagaccgaaatccagactctttttaagaggcttcgcgcagttccaaccaacaaggcctgtttcgactgcggcgccaagaatccgagttgggccagcatcatgtacggtgttttcttgtgcattgactgttccggggtgcaccgctccctgggcgtccatctgagcttcatcaggtccacagagttggattccaactggaactggttccagctgaggtgtatgcaggtcggcgggaatgccaatgcgacggctttttttcgccaacatggatgcacagccaatgatgccaacaccaaatatagtagccgagctgcccagatgtaccgggagaagatccggcagctggggagtgcggccctggctaggcatggcactgatctttggatagacaacatgagtagtgccgttcctaatcactccccagagaagaaggactctgatttcttcacagaacacactcaaccccctgcctgggatgcgccagccactgagccttcagggacccagcagccagccccgtctacagagagcagtggcctggcacagccggagcatggccccaacacagacctgcttggcacctcacccaaagcctcactggaactgaaaagctccatcattggcaagaagaagccagcagcagctaagaaagggctgggtgccaagaaaggcctaggggcccagaaggtgagcagccagagcttcagtgagattgagcggcaggctcaggtggcagagaagctccgtgagcagcaggcagccgatgccaagaagcaggcggaggagtccatggtcgcctccatgcgtctggcctaccaggagctccagattgatcgtaagaaagaggaaaagaagctacagaatctggaagggaagaagcgagagcaggcagaaaggttgggcatgggcttggtatcccgaagctctgtctcccactccgtgctgtctgagatgcaggtgattgagcaggaaaccccagtgagtgcaaaatcctctcgctcgcagctggacttgtttgacgatgttggtactttcgcctctggacccccaaagtacaaggacaatcccttttccttaggggaaagctttggctcccgctgggatacagatgctgcctggggtatggacagggtagaggagaaggagccagaagtgaccatctcaagcatccggcctatttcagaaagagccacaaaccggagggaagtggagagccggagctcaggcctcgagtctagtgaggcgcgtcagaaattcgcaggagccaaagccatctcatctgacatgttctttgggcgggaggtggatgcggagtatgaggccaggtctcggctgcagcagctctcaggcagcagtgccatcagctcttcagacctctttggggacatggatggagctcacggagcaggaagtgtatctctggggaacgtgctgcctacagcggacattgcccagtttaagcagggtgtcaagtctgtggctgggaaaatggctgtgctggccaatggtgtgatgaattccttgcaggatcgctacggttcctactgatccgagctctgtgactcaggcttacgatggtgacggcaacaagaactccacagttcccaggctggggatgctttgccttgtggaagctggggaggatttgttacttcgtatgtgtggtgtgtgtgtggggtggcctttgaggcgctcactcctgtgaggggaatggtcagtaccagcccttgtcctctgcctgtggactgagccctttattccctctcacaccaccctccgtgtgttagactcttgtccttctgtcctgcccccacagctgctgctcacttatcctgccatactgggaaagggggttcccccacgatggcttattctgggtccagactttccccaggtagggaaagcggaaggtagaaggctttttttgctggctctagggttcttctagttcgaggccttgggtccccatcctctggaaccaaggggaggcctggaaggagttcactgtagacccgtcccatggggaaagaggctgcggacttgctgctgctgctgctgccagtggcctcttctgggtgccaggagaggtgaaggacctttgtctcggcgttaccaagggctggaaactttacctggtacctaaaggtttcatttgggatcagaccggagacccttgggttctcccgtctcaccacccctttctacagtaagcacttggaagattgtttcagggtgtctcagggtccctctgtaccatctgctgtggaatgcaggaccctctgtgacattctttatcccttcttccccgggttggtggccatggagggtcttgtctgctgtgattcgactctggatgctgtgagcttgatgctggccagggaagcagaggatgtgagaggcagaggcaggctcctggggctgagctccttcctctgcatcattctgggcttggcctggatagcacccgccagtgagagctgtgggcctcaccctctggcagctgagccaagcactgtcattcttggtgccatcttcccctgccgcaccggcagtctcagcccagcccccacctttgggttgtaggttgggctcccaagcaacacagaccactcttccccttgcccctcccccagagggacttgactttctttctggactgtttgtattgaaacaaagtggtgtcaaaataaagcccctgcagggcctggctccctgttggtctgagtg

SEQ ID NO: 17133 - protein, 521 aa, Homo sapiens
MAAEPNKTEIQTLFKRLRAVPTNKACFDCGAKNPSWASIMYGVFLCIDCSGVHRSLGVHLSFIRSTELDSNWNWFQLRCMQVGGNANATAFFRQHGCTANDANTKYSSRAAQMYREKIRQLGSAALARHGTDLWIDNMSSAVPNHSPEKKDSDFFTEHTQPPAWDAPATEPSGTQQPAPSTESSGLAQPEHGPNTDLLGTSPKASLELKSSIIGKKKPAAAKKGLGAKKGLGAQKVSSQSFSEIERQAQVAEKLREQQAADAKKQAEESMVASMRLAYQELQIDRKKEEKKLQNLEGKKREQAERLGMGLVSRSSVSHSVLSEMQVIEQETPVSAKSSRSQLDLFDDVGTFASGPPKYKDNPFSLGESFGSRWDTDAAWGMDRVEEKEPEVTISSIRPISERATNRREVESRSSGLESSEARQKFAGAKAISSDMFFGREVDAEYEARSRLQQLSGSSAISSSDLFGDMDGAHGAGSVSLGNVLPTADIAQFKQGVKSVAGKMAVLANGVMNSLQDRYGSY

SEQ ID NO: 17134 - DNA, 2409 bp, Homo sapiens
  CDS (154)..(1908)
aaaaaaggacagcgagcggggagccccgaggacccccttttccctgcccagggattgagctccagagcctgttagggagctacccagacaggctttagttcctaaagtgctgaggaaacgcacggggcggtaaaggggaggctcgtcggtgagatggcgccggatctcgcttctcagaggcattcagagagcttccccagcgtgaactctcggccgaatgtaattttgccaggccgcgagggacgcagagaggggctgccaccaggcgggggcacgcgcggtagtcttgtccctacccgcccggtgccgccgtccccggctcccctcgggacgagtccgtacagctggagccgttccggacccggaaggggcggtggcgcagggtcctcgcgcgtcccacgtggggtcccgggcccagcagtctgcgcaccgggctcgctgctgcaccacgcgtcacccacgcagaccatggcagccgccgacggttcgctcttcgacaaccccaggacgttctccagacgtcccccagcccaggcgagtcggcaagcaaaggctacgaaaagaaaataccaagcgtccagtgaggctcccccagcgaaacggaggaacgaaacttcatttctcccagccaagaaaactagtgttaaagaaactcagaggacttttaaggggaatgcacaaaaaatgttttctccaaagaagcattcggttagcacaagtgatagaaaccaggaggagagacagtgcattaagacttcatcactgtttaaaaacaaccctgacattccagaactccacagacctgtggtaaagcaggtgcaagaaaaagtgtttacttcagctgcttttcatgagctgggcctccacccacatttaatttccacaataaatacggtcttaaaaatgtctagtatgaccagtgttcagaagcaaagtattcctgtgttgctggaaggcagagatgctctcgtgagatcccagacgggctcaggtaaaactcttgcctattgcatccctgtggtccagtcccttcaagcaatggagtcaaaaatacagcgcagtgatggcccctatgccctggtgctcgtgccaacgagagagctagctctacaaagctttgacactgtccagaaactgcttaagcccttcacctggattgtgcctggagtgttaatgggaggagagaagagaaaatcagaaaaggccagactccgcaaaggaataaatatccttatctcaactcctggacgcctggtggatcatataaaatccacaaagaacattcattttagtcggctgcggtggttggtgtttgatgaagcagacagaatcttggatttgggttttgaaaaggacatcacagtgatacttaatgctgtaaatgctgaatgccaaaaacgacagaatgtcttgctatcagcgacactcacagaaggtgtaacgcggctagctgatatcagtttgcatgatccagtcagtatttctgtcctggacaagagccatgaccagttgaacccaaaggacaaagcggtccaggaggtctgtcctccaccagctggcgacaagctggacagctttgcaataccagagagtctcaagcagcatgtgactgtggttcccagcaaactgaggcttgtctgcctagcggccttcatccttcagaaatgcaagtttgaggaagaccagaagatggttgtctttttctcaagttgcgagctggtggagttccactacagcctcttcctacagaccctgctgagcagctcaggggcgccggcatcagggcagttgccatctgcctccatgcgattaaaattcctacggctgcatggcggcaaggagcaggaggaaagaacagcagtgtttcaggaattttcacattccagaagaggcgtccttctttgcacgtgaagaactcaccctaagccagaggaaaggaaccttgcttttaataccatcattatgttgacgagttgataagaagtaccaccgaatggccggaaaatggagtttctaagccacctgattttaaggctgacattaggttttctgttggtctccggtggctgtccttgattgtccctggatggagtgcagtcacctttttcccagaaaggaaagatacctgcagcccgccctgggcgccaactgtcccttggcatcctccttggctgtccggcgcgtgcatttctttttcagaagatgcacctaaatcacctgtgctgctttcctccaccttctccgtatttttttccgcttgaagcatactgttctgtctgtgcagttcttaatttcctctcctcctggggaatttccaccgtgccaggaggctaggagacaaaggagatacggctgtgaagagtcacaatgtcagttctgtgtcccaaataaatgtagactttcgtgctt

SEQ ID NO: 17135 - protein, 585 aa, Homo sapiens [sequence omitted]

SEQ ID NO: 17136 - DNA, 2683 bp, Homo sapiens
  CDS (1)..(459)
atggacttttctcattggcctcatgtgctgcccttggagccagggggctgcatagactttcagacagagaacagctcccggcactgtcttgtgacctacaggcctgataaaaatcacaccaccatacgaagtgtgctgatggaaatgtcctaccgactggatgacactggaaatccaatctgctcctgccagcctgtacatacattttttggaggacctacttgcaaactattgaccaaaaatgccattttccaaagcccagagaatgatggcaacatcctggtgtgtactggggatgaagcagcaaattctgccctgctgtgggatgctgccagtggctcgttgctccaggacctacggaccgatcagcctgtgttggacatctgcccatttgaggtgaaccgtaacagctacttggctaccttaacagagaagatggtccacatctataagtgggagtgactgtggtctcgaaaccttgaaggcatgctgctggttagatgttgtttgctagcgcctagcagccccaagcaagatccctgtttattgtctgcagtctagaacattgggaatcatggtttgtttgcattagtatgattctaggaccctaggtcactgagacactacagattgtgtatctgttatgtccactaaaagagtaattgatgggtactttatctacattatccatttcttgggtttaaagccttcattaaccattattgtatgttggaaattcttattttctttattttctgtgtgactttctgggccttagagagtgtcctctcatcatctaggatgtgagtgggcatcaagcattttctggggaatatgacatcccatctgagttgtcctgtcacttaagtatccttgaagggactaaccatcgtcttggtactgatttgatgcaacgtagatgtaaaagagtattattcagttgaacacaagagggcactgtagaaccttgtgtccggtttatttctgaccttgaaggctgacaatcttttagtaacttgtctcatctccacacaagtgtgtgatagcacacctgggtgtgctttgtggcaataacacttgtgttccaggtgtgaagtgctgggacattggcaggcccagtgatggaagcagctagtgaacgattccctttgctaatgcctagtgcattaagttcattgctttgcgaaaggtaaggaaagaggccagttgtttgagcggtggggaagattttgttttttctagccagcttaggatctcaggattggttttatccaagctagtgctttgaagaacactatctcttgccaggaaaagatgagtgataggtcaaagcttttacttgagtctcccctagtgtcagagatcaggagaaaagacataagagaatttacaaaagctattcagactgctattgaaaacatgagaagaacttgtctcccattttgagagttcctatctaaataaagccaattcctcagactgaggggctgttcttaagtgttctttatacattccagttatccagttaaagccttccccatgtgaagctgatgtttgattccagtttcctttgatttgcctccctaaccttttctagggctcagtttgtatttctttgccttgcctcagactactttgccaacccacttccacaacagaatatgcttcaagatgtgggcaggtcagtgtcctgttcatgggagaaaatggcttaacagtctgattttctcaaatgattattgaagagttgttatcgtttttattataaaacacttctgacctgtcaattcaagagctgtttctaggatctttctctccggcaaggggttgttgcactagatttccccagagttccaagttctagttgtgccttttaatgaccctttaatattttaggacataattttttccttttttaaatttttttgtagaaatagatgtttcactacgttgtccaggctggtcttggactcctggcctcaagcaatcctcccacctcagcctcctaaagtgccaaaattataggcgtgagccactgcacccggcccctatttgaagacgtcttttgtaaaagctagcttctagaacctgagaaaagctcttttctcagaggagatactccttttgatatgttaatgattaagagtggttgcccaggcctagtttcagtggcagaataggattggaattaaaaagcagaactcatctggcttcagcagattgccaccaagaggatacaggtggtcaggtcctggctggctttgtctttgggcctgggcaggcttaggatttgactttctttgaagtacctgatgctgattgattccactaatagtaggaagcaagagacttaactatgagggacgttatgtgaatcttaagtcttaccagtccttgcattagtacattaaatttggatgttttggaagcaaattcatacgatcgtgagtgatttctccaaagaaaaaaagccttgtccagcctgaccaacatggtgaaaccccatctctactaaaaatacaaaaattaactgggtgcagtggtgcgcatgcctgtagtcccagctacttgggaggctgaggcaggagaattgcttgaaccctgggaggcagaggttgcagtgagtcgagatcgcgccactgcactccagcctcggtgacagagcaagactccatctcaaaac

SEQ ID NO: 17137 - protein, 153 aa, Homo sapiens [sequence omitted]

SEQ ID NO: 17138 - DNA, 2064 bp, Homo sapiens
ttccagaaagtggcagcctctgatcgtacaggactttcggattatgggaggcgggatccagagggaaacctggataagcagctgagctttaagtgcaatgtttcaaatacattttcgagtctggcactaaagaatactattgtggaggcttctattcagcttcctccttcccttttctcaccaaagcaaaaaagagaactcagaccaactgatgactctctttacaagcttcaactcattgcattccgcaatggaaagctttttccagccactggaaattcaacaaatttggctgatggtggaaaacgacgtactgtggttacccctgtgattctcaccaaaatagatggtgtgaatgtagatacccaccacatccctgttaatgtgacactgcgtcgaattgcacatggagcagatgctgttgcagcccggtgggatttcgatttgctgaacggacaaggaggctggaagtcagatgggtgccatatactctattcagatgaaaatatcactacgattcagtgctactcccttagtaactatgcagttttaatggatttgacgggatctgaactatacacccaggcggccagcctcctgcatcctgtggtttatactaccgctatcattctcctcttatgtctcttagccgtcattgtcagttacatataccatcacagtttgattagaatcagcctcaagagctggcacatgcttgtgaacttgtgctttcatattttcctaacctgtgtggtctttgtgggaggaataacccagactaggaatgccagcatctgccaagcagttgggataattcttcactattccacccttgccacagtactatgggtaggagtgacagctcgaaatatctacaaacaagtcactaaaaaagctaaaagatgccaggatcctgatgaaccaccacctccaccaagaccaatgctcagattttacctgattggtggtggtatccccatcattgtttgcggcataactgcagcagcgaacattaagaattacggcagtcggccaaacgcaccctattgctggatggcatgggaaccctccttgggagccttctatgggccagccagcttcatcacttttgtaaactgcatgtactttctgagcatatttattcagttgaaaagacaccctgagcgcaaatatgagcttaaggagcccacggaggagcaacagagattggcagccaatgaaaatggcgaaataaatcatcaggattcaatgtctttgtctctgatttctacatcagccttggaaaatgagcacacttttcattctcagctcttgggggccagccttactttgctcttatatgttgcactgtggatgtttggggctttggctgtttctttgtattaccctttggacttggtttttagcttcgtttttggagccacaagtttaagcttcagtgcgttcttcgtggtccaccattgtgttaatagggaggatgttagacttgcgtggatcatgacttgctgcccaggacggagctcgtattcagtgcaagtcaacgtccagccccccaactctaatgggacgaatggagaggcacccaaatgccccaatagcagtgcggagtcttcatgcacaaacaaaagtgcttcaagcttcaaaaattcctcccagggctgcaaattaacaaacttgcaggcggctgcagctcagtgccatgccaattctttacctttgaactccacccctcagcttgataatagtctgacagaacattcaatggacaatgatattaaaatgcacgtggcgcctttagaagttcagtttcgaacaaatgtgcactcaagccgccaccataaaaacagaagtaaaggacaccgggcaagccgactcacagtcctgagagaatatgcctacgatgtcccaacgagcgtggaaggaagcgtgcagaacggcttacctaaaagccggctgggcaataacgaaggacactcgaggagccgaagagcttatttagcctacagagagagacagtacaacccaccccagcaagacagcagcgatgcttgtagcacacttccc

SEQ ID NO: 17139 - DNA, 2558 bp, Homo sapiens
  CDS (13)..(456)
atttttggaagcatgttgcgaggctccgcttcttctacaagtatggagaaggcaaaaggcaaggagtggacctccacagagaagtcgagggaagaggatcagcaggcttctaatcaaccaaattcaattgctttgccaggaacatcagcaaagagaaccaaagaaaaaatgtctgtcaaaggcagtaaagtgctctgccctaagaaaaaggcagagcacactgacaaccccagacctcagaagaagataccaatccctccattaccttctaaactgccacctgttaatctgattcaccgggacattctgcgggcctggtgccaacaattgaagctgagctccaaaggccagaaattggatgcatataagcgcctgtgtgcctttgcctacccaaatcaaaaggattttcctagcacagcaaaagaggccaaaatccggaaatcattgcaaaaaaattaaaggtggaaaagggggaaacgtccctgcaaagttctgagacacatcctcctgaagtggctcttcctcctgtgggggagccgcctgccctggaaaattccactgctctccttgagggagttaatacagttgtggtgacaacttctgccccagaggctttgctggcctcctgggcgagaatttcagccagggcgaggacaccagaggcagtggaatctccacaagaggcctctggtgtcaggtggtgtgtggtccatgggaaaagtctccctgcagacacagatggttgggttcacctgcagtttcatgctggtcaagcctgggttccagaaaagcaagaagggagagtgagtgcactcttcttgcttcctgcctccaattttccacccccgcaccttgaagacaatatgttgtgccccaaatgtgttcacaggaacaaggtcttaataaaaagcctccaatgggaatagaatatcaggaaaaaggccacatctatggtaattaatggcagaaaagctggagagttggattctgcggtgctgctgacaggtgaactctggtcctctgcacctgtttatgggccatgcagactggtggggtggcagatgttagcctaagacccctagcagtgcctgttgctttgtgagtggagatagagactcttacatttaaaaatggaaaaacatttcacaaattaccataaattgtagttaatatgtagaaaaactcattcatactacttttctaaaatagacatgacttcagcagcagcttttttttgttgtattttgagacagtgtctcactgttgcccaggctggagtgcagtggtgcaatctcagttcagtgcaatctccgcctcctgggttcaaatgattctcctgcctcagcctcttgagtagctaggtacaggcacctgccaccacacccagctaattttttgtatttttagtagagatggggtttcaccatgttggccaggttggtctcaaactcctggactcaagtgatcaccctcctcagcctcccaaaatgctgggactatgggcatgagcccctgcgcctgaccttcaacagctcttttaagtgagttcttcagctaagcattgtgatggacttgagtaaaatggtagttggctcttgtgctcaattttctcttcctctgaacactgactactttaggagctgcttcattccaattgcaatttcataaaacgtaaagtattttaaggcaaagaaaggctgttaattccctccctcccccaaacacatgatttttaatattctaaacaatatttttcaaagttctcttaataacctgagatttctatggtttgactccaggatcaaaacacaagggactttgtattatttcacttataattgttttgtatatttctggagtttaaaatgtttaaggttgcttcccgctcataaatacataatatattgaatttaaaatgtgtttattaaccgattctccataaataaaaataagatgtgtatgtaaaataattcatctgttgtatttagagaaccatattcattgcatgcaaattttattgttagtgttcttaactcaagtaggagtaaaccaaaaagtgtgatttttcttttgtatgactcgtttgttctttattagttggtggtatgggttggatcatttgtttttaaaactacttaggtatgattcacatacaaaaagctgcacatatttaatgtatcctattgtgtaattaatttttaatttttttgtgtacttcctaaacttatagtcctgcgagtctgggaacagatctgtttttcacttatcctgatttaatgacagtttccaacattgttttgttattacaagtaggggatctttttttttgcccgtttaatgaagatactaaaaataatgcactggaaggagtggaagagttggaaaatttgtaaccatcataatacaggtgtaataggtttgggaaagaatcctcaaaaatgttaaagcaagggaggaaagtttgttgagaagcaagatgttcttctctcctgcccgcccccgccgttggttgttggtggtcagaattattgtgtaataaataatagacattttttctt

SEQ ID NO: 17140 - protein, 148 aa, Homo sapiens [sequence omitted]

SEQ ID NO: 17141 - DNA, 2234 bp, Homo sapiens
  CDS (163)..(1062)
ttactagacattgatccattaattttaatacatttgttggaccttaaggaccggagcagtatagaaaatttgtggggcttacagcctcgcccacctgcttcacttctgcagcccacagcatcatattctcgaaaagataaagaccaaaggaagcaacaggcaatgtggcgagtgccctctgatttaaagatgctaaaaagactcaaaactcaaatggccgaagttcgatgtatgaaaactgatgtaaagaatacactttcagaaataaaaagcagcagtgctgcttctggagacatgcagacaagccttttttctgctgaccaggcagctctggctgcatgtggaactgaaaactctggcagattgcaggatttgggaatggaactcctggcaaagtcatcagttgccaattgttacatacgaaactccacaaataagaagagtaattcgcccaagccagctcgatccagtgtagcaggtagtctatcacttcgaagagcagtggaccctggagaaaatagtcgttcaaagggagactgtcagactctgtctgaaggctccccaggaagctctcagtctgggagcaggcacagttctccccgagccttgatacatggcagtatcggtgatattctgccaaaaactgaagaccggcagtgtaaagctttggattcagatgctgttgtggttgcagttttcagtggcttgcctgcggttgagaaaaggaggaaaatggtcaccttgggggctaatgctaaaggaggtcatctggaaggactgcagatgactgatttggaaaataattctgaaactggagagttacagcctgtactacctgaaggagcttcagctgcccctgaagaaggaatgagtagcgacagtgacattgaatgtgacactgagaatgaggagcaggaagagcataccagtgtgggcgggtttcacgactccttcatggtcatgacacagcccccggatgaagatacacattccagttttcctgatggtgaacaaataggccctgaagatctcagcttcaatacagatgaaaatagtggaaggtaattgccaaatcaagagaactgacttgcaagctaccttgaccctgaattttgctgtagttggtgctcaaatttgtcatcagtcagataatcagatttggtcttatttcttcattatctcgacctgaaatagtaatttggaaactgttggaaggtggcacagtttagtctaagacagcagtagtacatgggaaaaacagtatgggaagagttctttgtaatgtaaggaaataacaatgtagttctctattaatttagcaaatttgtacattcacaaaaggcagtttgtctactacagcagaaggctggttaactgccagaaaatgtacctccaggccctgcatgccgtcagtaacccgcccggcattggtgctctactgtctttggctagagcttagttgtgtttaaataatcatctttatatttggggttttaattacagttccattagtgcctgtagattagtgaacagaaaattgctttggaagagattctgccctgtagacactatgtgaataactggagtaacactagactgaatctcctttttggagtatgtatcttctctcacttgttcaagtacaggcacactgttcaaccgcatggtatctttctgttgtgtgacttctacaaatgttattttaaatgaaattaagttaacatggattcattacgttcctggccctgtagacacgtgtaagattatttaaaattctttcatttttttctgcctcttactatacgactgtagtgcaacaaatattttaaagcccccttttcttctttattttcattagttgtacattgatttcagtgtcaacacatttaaagattcattcatgttgcacagtggcttacatgaacgtgaaactgtgatatagggttttctttcatactcataattagcccaaaacagttgccaaactttgccattgtgctcctgcatttgtgtttgagctgctatatatttgtggaaattacactgaaagttgactaagagactattgaaaaagcatgaataattaaatatacatgtgagagacatctcatctgctgtattttacttagtgaatattgttcactcttccgtgtctgatgtcttgctgaatgctgtgactcatagtttacttttgttcaaaatagtttgcactttttgttaataaaatcaacttg

SEQ ID NO: 17142 - protein, 300 aa, Homo sapiens
MWRVPSDLKMLKRLKTQMAEVRCMKTDVKNTLSEIKSSSAASGDMQTSLFSADQAALAACGTENSGRLQDLGMELLAKSSVANCYIRNSTNKKSNSPKPARSSVAGSLSLRRAVDPGENSRSKGDCQTLSEGSPGSSQSGSRHSSPRALIHGSIGDILPKTEDRQCKALDSDAVVVAVFSGLPAVEKRRKMVTLGANAKGGHLEGLQMTDLENNSETGELQPVLPEGASAAPEEGMSSDSDIECDTENEEQEEHTSVGGFHDSFMVMTQPPDEDTHSSFPDGEQIGPEDLSFNTDENSGR

SEQ ID NO: 17143 - DNA, 2199 bp, Homo sapiens
  CDS (188)..(757)
tcaagatgcacttagtaagccccatggaactgtgaaagccatatgtatccctgaaggagcaaaatacttaaaaaggaaagacattgaatccattagaaactttgcagctgaccattttaatcaggaaatcttacctgtattccttaacgccaatagaaactggaattctccagttgctaatttcataatggagtcacaaagactggaattaatcagactaatggagacccaagaggaagatgtggtcctactaactgctggagagcacaataaagcatgctctttgttaggaaaattacgactggaatgtgctgaccttctagaaacaagaggagtggtgctccgtgaccccactctgttctctttcctttgggtggtagatttcccactcttcctgcccaaggaggaaaatcccagagagctggaatcggcccaccacccatttactgctccccaccccagtgacatacatctcctgtacactgagcccaaaaaggaggatgtgaaaatgctctcccatctgctccaggctttagattatggggcaccccctcatggaggaattgccttagggttagacagactgatatgccttgtcactggatctccaagcatcagagatgtcatagccttcccaaagtccttccggggacatgacctcatgagcaataccccagattctgtccctcctgaggaactgaagccctatcatatccgagtctccaagccaacagactccaaagcagaaagagctcattgaatcatgcataccatgcagaaagttgagcttttaggttttgtcctctttgcttccccaaggctaaagtcagatctagagttctgccacaggtctaacaatcaagtctttagatggaaggaatccaggcaacattcttcaccacaacgaagaaacagataaaagatacccaattttgacttgatttcattcccttcctcgtgctcggcgttgagctcctgcagccgccgccgctgcagtggtcgtccctgccctccccggccccggggtgcaccccgcaaggctcccgctggtgtccctggagcatgggaggctgctgagcgtgagtggcggtgtctggcaggagctgcgtggcagggagggcgtccatggctgcagccaacaagggcaacaagcccagagtccggagtatccgctttgcggcaggccacgatgcagaaggatcccacggccacgtccactttgatgagaagctgcatgactcggtggtcatggtcacccaggagagtgacagcagctttctggtcaaggttggcttcctgaagatcctgcacaggtatgagattaccttcactctgcccccagtgcacaggctgagcaaggatgtccgcgaggcacctgtccccagcctgcacctcaagcccctcagcgtggtgcccgtccctgaaggttatagtgtcaagtgtgagtactcggcgcacaaagagggcgtcctcaaagaggagatactgctagcctgcgaaggtggcactggcacctgtgtgcgcgtgacggtgcaggcccgcgtcatggaccggcaccacggcacgcccatgctgctggatggtgtcaagtgtgtgggcgccgagctggaatacgactcagagcacagcgactggcacggctttgactgaggcccgaggccccgcctgccccgggcccctcagccttaaaccccgccttgtccccccgacatgctgcgtgatggtgtggcttcctcgcccctttctggggtgggtgtgggggtggagtggccttgcccacgcctctcacctctgccttcatttgtgctgccaccctgcccctccctcgtcctcctctcccacttcctcctctctgtgtgcctcagtctcctgccggaagaaatgggttgagcccgaaaggaggctgtctgaggaagggagagggagggcctggggtgggtcccccactccccaccccaagccacagggactcccaccagggtctgggagaggacggagctggctctgtggcgtcgtggccccattactgctgccttgcttcagccacctctcctgcccctccctagtccccactgctgtccaccatgagtaggagggaggtgcagtccccagccccctcccctcaggtctgtgttacttggtttttaagcgactggttgggatagaaccctaaagaaataaacttccagtggataccgg

SEQ ID NO: 17144 - protein, 190 aa, Homo sapiens
MESQRLELIRLMETQEEDVVLLTAGEHNKACSLLGKLRLECADLLETRGVVLRDPTLFSFLWVVDFPLFLPKEENPRELESAHHPFTAPHPSDIHLLYTEPKKEDVKMLSHLLQALDYGAPPHGGIALGLDRLICLVTGSPSIRDVIAFPKSFRGHDLMSNTPDSVPPEELKPYHIRVSKPTDSKAERAH

SEQ ID NO: 17145 - DNA, 2314 bp, Homo sapiens
  CDS (60)..(2159)
gggaggagaagtctcagctagaacgagcggccctaggttttcggaagggaggatcagggatgtttgcgagcggctggaaccagacggtgccgatagaggaagcgggctccatggctgccctcctgctgctgcccctgctgctgttgctaccgctgctgctgctgaagctacacctctggccgcagttgcgctggcttccggcggacttggcctttgcggtgcgagctctgtgctgcaaaagggctcttcgagctcgcgccctggccgcggctgccgccgacccggaaggtcccgaggggggctgcagcctggcctggcgcctcgcggaactggcccagcagcgcgccgcgcacacctttctcattcacggctcgcggcgctttagctactcagaggcggagcgcgagagtaacagggctgcacgcgccttcctacgtgcgctaggctgggactggggacccgacggcggcgacagcggcgaggggagcgctggagaaggcgagcgggcagcgccgggagccggagatgcagcggccggaagcggcgcggagtttgccggaggggacggtgccgccagaggtggaggagccgccgcccctctgtcacctggagcaactgtggcgctgctcctccccgctggcccagagtttctgtggctctggttcgggctggccaaggccggcctgcgcactgcctttgtgcccaccgccctgcgccggggccccctgctgcactgcctccgcagctgcggcgcgcgcgcgctggtgctggcgccagagtttctggagtccctggagccggacctgcccgccctgagagccatggggctccacctgtgggctgcaggcccaggaacccaccctgctggaattagcgatttgctggctgaagtgtccgctgaagtggatgggccagtgccaggatacctctcttccccccagagtataacagacacgtgcctgtacatcttcacctctggcaccacgggcctccccaaggctgctcggatcagtcatctgaagatcctgcaatgccagggcttctatcagctgtgtggtgtccaccaggaagatgtgatctacctcgccctcccactctaccacatgtccggttccctgctgggcatcgtgggctgcatgggcattggggccacagtggtgctgaaatccaagttctcggctggtcagttctgggaagattgccagcagcacagggtgacggtgttccagtacattggggagctgtgccgataccttgtcaaccagcccccgagcaaggcagaacgtggccataaggtccggctggcagtgggcagcgggctgcgcccagatacctgggagcgttttgtgcggcgcttcgggcccctgcaggtgctggagacatatggactgacagagggcaacgtggccaccatcaactacacaggacagcggggcgctgtggggcgtgcttcctggctttacaagcatatcttccccttctccttgattcgctatgatgtcaccacaggagagccaattcgggacccccaggggcactgtatggccacatctccaggtgagccagggctgctggtggccccggtaagccagcagtccccattcctgggctatgctggcgggccagagctggcccaggggaagttgctaaaggatgtcttccggcctggggatgttttcttcaacactggggacctgctggtctgcgatgaccaaggttttctccgcttccatgatcgtactggagacaccttcaggtggaagggggagaatgtggccacaaccgaggtggcagaggtcttcgaggccctagattttcttcaggaggtgaacgtctatggagtcactgtgccagggcatgaaggcagggctggaatggcagccctagttctgcgtcccccccacgctttggaccttatgcagctctacacccacgtgtctgagaacttgccaccttatgcccggccccgattcctcaggctccaggagtctttggccaccacagagaccttcaaacagcagaaagttcggatggcaaatgagggcttcgaccccagcaccctgtctgacccactgtacgttctggaccaggctgtaggtgcctacctgcccctcacaactgcccggtacagcgccctcctggcaggaaaccttcgaatctgagaacttccacacctgaggcacctgagagaggaactctgtggggtgggggccgttgcaggtgtactgggctgtcagggatcttttctataccagaactgcggtcactattttgtaataaatgtggctggagctgatccagctgtctctgacct

SEQ ID NO: 17146 - protein, 700 aa, Homo sapiens [sequence omitted]

SEQ ID NO: 17147 - DNA, 2544 bp, Homo sapiens
  CDS (128)..(1162)
tgctcaggcagttcttcaagctgtgacagctgtccagacagcaaatactcctcttagtggcaccacagttagcgagagtgcagtgactccagcccagagtccagtacttagaataattattgacaacatgtactaccctgtaacacttgatgttcttcaccaaatattttctaagtttggtgctgtattgaagataatcacatttacaaaaaataaccagtttcaagctttgctccagtatggtgatccagtaaatgctcaacaagcaaaactagccctagatggtcagaatatttataatgcctgctgtaccctaaggattgatttttccaaacttgtgaatttgaatgtaaaatacaacaatgataaaagtagggattatactcgacctgatcttccatctggggatggacaacctgcattggacccagctattgctgcagcatttgccaaggagacatccctcttagctgttccaggagctctgagtcctttggccattccaaatgctgctgcagcagctgctgcagctgctgctggccgagtgggtatgcctggagtctcagctggtggcaatacagtcctgttggttagcaatttaaatgaagagatggttacgccccaaagtctgtttaccctcttcggtgtttatggagatgtgcagcgtgtgaagattttatacaataagaaagacagcgctctaatacagatggctgatggaaaccaatcacaacttgccatgaatcatcttaatggacagaaaatgtatggaaaaattattcgtgttactctgtctaaacatcagactgtacagctacctcgagagggacttgatgatcaagggctaacaaaagattttggtaattccccattgcatcgttttaagaaacctggatccaaaaattttcaaagcatttttcctccttctgccacccttcacctatctaatatccctccatcagtagcagaagaggatctacgaacactgttcgctaacactgggggcactgtgaaagcatttaagttttttcaaagagatcacaaaatggctcttcttcagatggcaacagtggaagaagctattcaggccttgattgatcttcataattataaccttggagaaaaccatcatctgagagtgtctttctccaagtcaacaatttaaaaatgggaagatgaagattgggggtgaatcacattgttcaatgtcatcacctatttgactgttcagaaaagtggggaccagagtttgattttttttgtttttgtttttttggggtttcttttttttttccatgctgttatcattccttggttataaaatgaaatggcatatgtaaaggcagagttgttaactgctatatttcatctgttctatagggaagccattttgtctgtttaaaatttcagtttaattttgctttttttttttttttcctttcaacttagttgacatacgtgccttaaaaaggaaaactagtgttgctattgtgcatttactagaaaaaaggaattggttgtttagggcacactgttatatgggaattaaaatatgtttaggcaggggtgtgtaaaaaggttaagtttttgtttctcctgcttggaacttattttgaattactggcttgtcacctttttttctatttaatcaaataagatacatgatattgaaagaataaaacagcatttttagtttttactaccttaggctttattgctttgaaaacaacattggccttttgtatctcacaattctggtctagattcagttatgaatgtaggcattagttaaaattaacaagatgcagagtattaatttcttaagacaacaaagtgatttctgtaagtttgagccctatgtggaaagcattgtggaatcttaacctttttgtacacactcttgtgggacgtatcatataaatgtcagcactaagtaatgtcttgtttgtggctgaatatttttcgtagatgtttttgaagttgacatgacttacgtgcatttaaatatatattgccatccttagtttgtaattaagatttggaatatggttgtggatttctgagcatgtgcagactggtctagctagttcaggaactggtgcatgtatttttcaaagataaagaaagtgtactgcgaaaatatgcaggaagattaattttgtggcagttttctaaaactgacaaccaggtgggaccaaagtttatgtgcctttagtcttaatttaccttgcattgtaatattcagttttaataaatcttcaaaatattttgtatttaggaatagatctgactttaataaaaacatggctcagaatctacaggtcaaattaatttgaacagttcttgtcaatccgaattgttgattctgtttaaatgaccaatactttttgaaattgatgtacttagtttcaagattcatagattctgttatctatgtagacagaatggtcatgtatattttctattagttgagtttttacatctttagaaatgtaaaattcagtatagtttgaaagcggcacaattaaaaattaattttctaac

SEQ ID NO: 17148 - protein, 345 aa, Homo sapiens
MYYPVTLDVLHQIFSKFGAVLKIITFTKNNQFQALLQYGDPVNAQQAKLALDGQNIYNACCTLRIDFSKLVNLNVKYNNDKSRDYTRPDLPSGDGQPALDPAIAAAFAKETSLLAVPGALSPLAIPNAAAAAAAAAAGRVGMPGVSAGGNTVLLVSNLNEEMVTPQSLFTLFGVYGDVQRVKILYNKKDSALIQMADGNQSQLAMNHLNGQKMYGKIIRVTLSKHQTVQLPREGLDDQGLTKDFGNSPLHRFKKPGSKNFQSIFPPSATLHLSNIPPSVAEEDLRTLFANTGGTVKAFKFFQRDHKMALLQMATVEEAIQALIDLHNYNLGENHHLRVSFSKSTI

SEQ ID NO: 17149 - DNA, 2572 bp, Homo sapiens
  CDS (113)..(2572)
taatcatctaaagcaacaggtacaacagctacaagtcttgttgctacaggcccatggaggtaccctgcctggatctataactgtggaaccatcagagaatctacaatccctgatggagaagaatcagtccctggtagaggagaatgaaaaattaagtcgtggtctgagcgaggcagctggtcagacagcccagatgttggagaggatcatttggacagagcaagcgaatgaaaaaatgaacgccaagctagaagagctcaggcagcatgcggcctgcaaactggatcttcaaaagctagtggagactttggaagaccaggaattgaaagaaaatgtagagataatttgtaacctgcagcaattgattacccagttatcggatgaaactgttgcttgcatggctgcagccattgatactgcggtggagcaagaagcccaagtagaaaccagtccagagacgagcaggtcttctgacgcttttaccactcagcatgctctccgtcaagcgcagatgtctaaggagctggttgagttgaataaagcgcttgcactgaaagaggccctggctaggaagatgactcagaatgacagccaactgcagcctattcagtaccaataccaggataacataaaagagctagaattagaagtcatcaatctgcaaaaggaaaaggaagaattggttcttgaacttcagacagcaaagaaggatgccaaccaagccaagttgagtgagcgccgccgcaaacgtctccaggagctggagggtcaaattgctgatctgaagaagaaactgaatgagcagtccaaacttctgaaactaaaggaatccacagagcgtactgtctccaaactgaaccaggagatacggatgatgaaaaaccagcgggtacagttaatgcgtcaaatgaaagaagatgctgagaagtttagacagtggaagcagaaaaaagacaaagaagtaatacagttaaaagaacgagaccgtaagaggcaatatgagctgctgaaacttgaaagaaacttccagaaacaatccaatgtgctcagacgtaaaacggaggaggcagcagctgccaacaagcgtctcaaggatgctctccagaaacaacgggaggttgcagataagcggaaagagactcagagccgtggaatggaaggcactgcagctcgagtgaagaattggcttggaaacgaaattgaggttatggtcagtactgaggaagccaaacgccatctgaatgacctccttgaagatagaaagatcctggctcaagatgtggctcaactcaaagaaaaaaaggaatctggggagaatccacctcctaaactccggaggcgtacattctcccttactgaagtgcgtggtcaagtttcggagtcagaagattctattacaaagcagattgaaagcctagagactgaaatggaattcaggagtgctcagattgctgacctacagcagaagctgctggatgcagaaagtgaagacagaccaaaacaacgctgggagaatattgccaccattctggaagccaagtgtgccctgaaatatttgattggagagctggtctcctccaaaatacaggtcagcaaacttgaaagcagcctgaaacagagcaagaccagctgtgctgacatgcagaagatgctgtttgaggaacgaaatcattttgccgagatagagacagagttacaagctgagctggtcagaatggagcaacagcaccaagagaaggtgctgtaccttctcagccagctgcagcaaagccaaatggcagagaagcagttagaggaatcagtcagtgaaaaggaacagcagctgctgagtacactgaagtgtcaggatgaagaacttgagaaaatgcgagaagtgtgtgagcaaaatcagcagcttctccgagagaatgaaatcatcaagcagaaactgaccctcctccaggtagccagcagacagaaacatcttcctaaggatacccttctatctccagactcttcttttgaatatgtcccacctaagccaaaaccttctcgtgttaaagaaaagttcctggagcaaagcatggacatcgaggatctaaaatattgttcagagcattctgtgaatgagcatgaggatggtgatggtgatgatgatgagggggatgacgaggaatggaagccaacaaaattagttaaggtgtccaggaagaacattcaagggtgttcctgcaagggctggtgtggaaacaagcagtgtgggtgcaggaagcaaaagtcagactgtggtgtggactgttgctgtgaccccacaaagtgtcggaaccgccagcaaggcaaggatagcttgggcactgttgaacggacccaggattccgaaggctccttcaaactggaggatcctaccgaggtgaccccaggattgagcttctttaatcccgtctgtgccacccccaatagcaagatcctgaaagagatgtgcgatgtggagcaggtgctgtcaaagaagactcccccagctccctccccttttgacctcccagagttgaaacatgtagcaacagaataccaagaaaacaaggctccagggaag

SEQ ID NO: 17150 - protein, 820 aa, Homo sapiens
MEKNQSLVEENEKLSRGLSEAAGQTAQMLERIIWTEQANEKMNAKLEELRQHAACKLDLQKLVETLEDQELKENVEIICNLQQLITQLSDETVACMAAAIDTAVEQEAQVETSPETSRSSDAFTTQHALRQAQMSKELVELNKALALKEALARKMTQNDSQLQPIQYQYQDNIKELELEVINLQKEKEELVLELQTAKKDANQAKLSERRRKRLQELEGQIADLKKKLNEQSKLLKLKESTERTVSKLNQEIRMMKNQRVQLMRQMKEDAEKFRQWKQKKDKEVIQLKERDRKRQYELLKLERNFQKQSNVLRRKTEEAAAANKRLKDALQKQREVADKRKETQSRGMEGTAARVKNWLGNEIEVMVSTEEAKRHLNDLLEDRKILAQDVAQLKEKKESGENPPPKLRRRTFSLTEVRGQVSESEDSITKQIESLETEMEFRSAQIADLQQKLLDAESEDRPKQRWENIATILEAKCALKYLIGELVSSKIQVSKLESSLKQSKTSCADMQKMLFEERNHFAEIETELQAELVRMEQQHQEKVLYLLSQLQQSQMAEKQLEESVSEKEQQLLSTLKCQDEELEKMREVCEQNQQLLRENEIIKQKLTLLQVASRQKHLPKDTLLSPDSSFEYVPPKPKPSRVKEKFLEQSMDIEDLKYCSEHSVNEHEDGDGDDDEGDDEEWKPTKLVKVSRKNIQGCSCKGWCGNKQCGCRKQKSDCGVDCCCDPTKCRNRQQGKDSLGTVERTQDSEGSFKLEDPTEVTPGLSFFNPVCATPNSKILKEMCDVEQVLSKKTPPAPSPFDLPELKHVATEYQENKAPGK

SEQ ID NO: 17151 - DNA, 2579 bp, Homo sapiens
  CDS (53)..(496)
ggcgccgggggacacgttggctgcgttttcggcgggcctcccgggtacaaaaatggctgtggctagcgatttctacctgcgctactacgtagggcacaagggcaagtttgggcacgagtttctggagttcgaatttcggccggacggaaagcttagatatgccaacaacagcaattacaaaaatgatgtgatgatcagaaaagaggcttatgtgcacaagagtgtaatggaagaactgaagagaattattgatgacagtgaaattacaaaagaagatgatgctttgtggcctccccctgatagggttggccgacaggagcttgaaattgtaattggagatgagcacatatcttttaccacatcaaaaataggttctcttattgatgtaaatcagtcaaaggatcctgaaggccttcgagtattttactatttggtacaagacttgaaatgtttagttttcagtcttattggattacacttcaagattaaaccaatttaaattgtatgttttcaggctgtttgtatatttaattaagggatgggaggggttatttgtcatttacagtattggggtttttatgaatgtgaagcaaacaaaaaaaatttgtatgtaaactgaaaataagaaaatacattagcaagcttaatggttatccttacttgagtccacatgggttggacagtccccacacacattaaattctgtaaatgaaagccaccttttgttaaaaatttgctctaataaaacataccaaatcctggttgcagagtagttttttgttttttccaggaggctatgtctctaattcactttagagataataagaaattgttctggtagatacatcctgtgacagaagatactttaggtggaactatgtagccagattcccatccatgaaaggcaagtgtagattgtcccttatttccttcatacatgattggatttaattttggggggcttatacaaggtctagtttttttttacagttatgacaaacccctcagggattattcacatttaaatattttcagttacaagcagtgaggtcctaaagtgttacaagagtacagtctaccccatgttaggcatatctttgattatgtctttattccttatttcacaatgtatttggtgtgtaggggaggggggagaactaaatgagttttcagctttataaattgttaaacatttagacaaacatatatgtatgtatgaatgtacataaatatttttaactcctattgaccacgagtctcacttcagtttcccagttcctttcaacctctttctgatagatttcctctttcattacttttagtaaccatgttccttgtttccttttattcttccatctgaagccccactcttaaaaagttgcactgttccagtagttataatccacttgccctaggaacaagttagcactgaattttgggtggaataattagtttctgaaggcttgccaggacccctgagcaggtaggctctagagtcgggcagtccaataacttttttgcaataatggaaacgtcctatgtgcagtccaatagggtagcaactggccaaatgaggcctactgattacttgaggtgtgccttgtataactgaatttatggtgctatttaaacaatttttttctaacgtgaaaaggataaaacataaaaaactcttgagaactataaagtgaacacctatatgcctacccctacctagattctatacttaacatcttttttactgtaatatctctattataataaatcttggtttttcacttaactggtgtaattggtgccaataaactactttttttgtagtgctatttaattttgattaaatttagatagccacgtgtctagcggctaccgtttggacagtatagctctagagcatggcttggtaacctgtttgccatggagcactagatggtccttttcactcctcaaaatgcatgcccattgccttcaggtttgccatggaaagtcaaatgatttccacttcattatgcaagtacgctatcatcttcaggtcttttgtatgtaaaatgtttctgttccagttgtagaccttgatgattgtgcagtatgaaatcgtattgtaattttcttgcatttagatgtcaacctcagaaacaggaacaatcgtcttttgaacttccagtaggcccacagttgttggttgttcctcaaaacaggttgtggctcctgttgaataagatgatccattaaaaactgaacaaggttgaggagaaatagtgcttacgttgaaaaatctttaagtctttgtccccgttctctaacttccttacgttttcgtttatttagctccatccccactatctactagaatttctcatatttaaaccaagatgggagactaggtcattaggaaaatattaccgtctacaattttcttatactttgatctgtcttttatttgattgtaagttgctgatggacagtgatcattagaaactgaattttgtataatactagttttatatgaaactagatatttattgcgctcaggttatgttccttttacctccttccttaataaagagaccacttgaaat

SEQ ID NO: 17152 - protein, 148 aa, Homo sapiens; identical to SEQ ID NO: 11013

SEQ ID NO: 17153 - DNA, 3041 bp, Homo sapiens
  CDS (85)..(2181)
cgtatcaacgggcatgatgttgtcctggcaacgttttctacaccttataacagcatccctgggtctgcagtctgtgcctatgacatgcttgacattgccagtgtttttactgggagattcaaggaacagaagtctcctgattccacctggacaccagttcctgatgaacgagttcctaagcccaggccaggttgctgtgctggctcatcctccttagaaagatatgcaacctccaatgagttccctgatgataccctgaacttcatcaagacgcacccgctcatggatgaggcagtgccctccatcttcaacaggccatggttcctgagaacaatggtcagataccgccttaccaaaattgcagtggacacagctgctgggccatatcagaatcacactgtggtttttctgggatcagagaagggaatcatcttgaagtttttggccagaataggaaatagtggttttctaaatgacagccttttcctggaggagatgagtgtttacaactctgaaaaatgcagctatgatggagtcgaagacaaaaggatcatgggcatgcagctggacagagcaagcagctctctgtatgttgcgttctctacctgtgtgataaaggttccccttggccggtgtgaacgacatgggaagtgtaaaaaaacctgtattgcctccagagacccatattgtggatggataaaggaaggtggtgcctgcagccatttatcacccaacagcagactgacttttgagcaggacatagagcgtggcaatacagatggtctgggggactgtcacaattcctttgtggcactgaatgggcattccagttccctcttgcccagcacaaccacatcagattcgacggctcaagaggggtatgagtctaggggaggaatgctggactggaagcatctgcttgactcacctgacagcacagaccctttgggggcagtgtcttcccataatcaccaagacaagaagggagtgattcgggaaagttacctcaaaggccacgaccagctggttcccgtcaccctcttggccattgcagtcatcctggctttcgtcatgggggccgtcttctcgggcatcaccgtctactgcgtctgtgatcatcggcgcaaagacgtggctgtggtgcagcgcaaggagaaggagctcacccactcgcgccggggctccatgagcagcgtcaccaagctcagcggcctctttggggacactcaatccaaagacccaaagccggaggccatcctcacgccactcatgcacaacggcaagctcgccactcccggcaacacggccaagatgctcattaaagcagaccagcaccacctggacctgacggccctccccaccccagagtcaaccccaacgctgcagcagaagcggaagcccagccgcggcagccgcgagtgggagaggaaccagaacctcatcaatgcctgcacaaaggacatgccccccatgggctcccctgtgattcccacggacctgcccctgcgggcctcccccagccacatccccagcgtggtggtcctgcccatcacgcagcagggctaccagcatgagtacgtggaccagcccaaaatgagcgaggtggcccagatggcgctggaggaccaggccgccacactggagtataagaccatcaaggaacatctcagcagcaagagtcccaaccatggggtgaaccttgtggagaacctggacagcctgccccccaaagttccacagcgggaggcctccctgggtcccccgggagcctccctgtctcagaccggtctaagcaagcggctggaaatgcaccactcctcttcctacggggttgactataagaggagctaccccacgaactcgctcacgagaagccaccaggccaccactctcaaaagaaacaacactaactcctccaattcctctcacctctccagaaaccagagctttggcaggggagacaacccgccgcccgccccgcagagggtggactccatccaggtgcacagctcccagccatctggccaggccgtgactgtctcgaggcagcccagcctcaacgcctacaactcactgacaaggtcggggctgaagcgtacgccctcgctaaagccggacgtaccccccaaaccatcctttgctcccctttccacatccatgaagcccaatgatgcgtgtacataatcccagggggagggggtcaggtgtcgaaccagcaggcaaggcgaggtgcccgctcagctcagcaaggttctcaactgcctcgagtacccaccagaccaagaaggcctgcggcagagccgaggacgctgggtcctcctctctgggacacaggggtactcacgaaaactgggccgcgtggtttggtgaaggtttgcaacggcggggactcaccttcattctcttccttcactttcccccacaccctacaacaggtcggacccacaaaagacttcagttatcatcacaaacatgagccaaaagcacatacctaccccatcccccacccccccacacacacacacatgcacacaacacatacacacacacgcacagaggtgaacagaaactgaaacattttgtccacaacttcacgggacgtggccagactgggtttgcgttccaacctgcaaaacacaaatacattttttaaaatcaagaaaatttaaaaagacaaaaaaaaaagaattcattgataattctaactcagactttaacaatggcagaagtttactatgcgcaaatactgtgaaatgcccgccagtgttacagctttctgttgcagcagataaatgccatgttgggcaactatgtcatagatttctgctcctcctctcttttaatgaaataacgtgaccgttaacgcaagtaactctttatttattgttcaccctttttttccttaaggaaaggactcttccaaatatcatcctatgaacagctcttcagaaagcccattgaaagttaaactatttaacgtgaaatccattaactggaataattgagtttctttatttttacaataaattcactgagtaaat

SEQ ID NO: 17154 - protein, 699 aa, Homo sapiens
MLDIASVFTGRFKEQKSPDSTWTPVPDERVPKPRPGCCAGSSSLERYATSNEFPDDTLNFIKTHPLMDEAVPSIFNRPWFLRTMVRYRLTKIAVDTAAGPYQNHTVVFLGSEKGIILKFLARIGNSGFLNDSLFLEEMSVYNSEKCSYDGVEDKRIMGMQLDRASSSLYVAFSTCVIKVPLGRCERHGKCKKTCIASRDPYCGWIKEGGACSHLSPNSRLTFEQDIERGNTDGLGDCHNSFVALNGHSSSLLPSTTTSDSTAQEGYESRGGMLDWKHLLDSPDSTDPLGAVSSHNHQDKKGVIRESYLKGHDQLVPVTLLAIAVILAFVMGAVFSGITVYCVCDHRRKDVAVVQRKEKELTHSRRGSMSSVTKLSGLFGDTQSKDPKPEAILTPLMHNGKLATPGNTAKMLIKADQHHLDLTALPTPESTPTLQQKRKPSRGSREWERNQNLINACTKDMPPMGSPVIPTDLPLRASPSHIPSVVVLPITQQGYQHEYVDQPKMSEVAQMALEDQAATLEYKTIKEHLSSKSPNHGVNLVENLDSLPPKVPQREASLGPPGASLSQTGLSKRLEMHHSSSYGVDYKRSYPTNSLTRSHQATTLKRNNTNSSNSSHLSRNQSFGRGDNPPPAPQRVDSIQVHSSQPSGQAVTVSRQPSLNAYNSLTRSGLKRTPSLKPDVPPKPSFAPLSTSMKPNDACT

SEQ ID NO: 17155 - DNA, 2160 bp, Homo sapiens
  CDS (115)..(1146)
gtcgcgagaggttgttcgcgccttgagagttaagcgaagtgtggtggcttccaaggaatacaaacataaaggccttcgaccgttgcaaatagactaaagtgaaaacaaatctgaatgaagatgaagttatttcagaccatttgcaggcagctcaggagttcaaagttttctgtggaatcagctgcccttgtggctttctctacttcctcttactcatgtggccggaagaaaaaagtgaacccatatgaagaagtggaccaagaaaaatactctaatttagttcagtctgtcttgtcatccagaggcgtcgcccagaccccgggatcggtggaggaagatgctttgctctgtggacccgtgagcaagcataagctgccaaaccaaggtgaggacagacgagtgccacaaaactggtttcctatcttcaatccagagagaagtgataaaccaaatgcaagtgatccttcagttcctttgaaaatccccttgcaaaggaatgtgataccaagtgtgacccgagtccttcagcagaccatgacaaaacaacaggttttcttgttggagaggtggaaacagcggatgattctggaactgggagaagatggctttaaagaatacacttcaaacgtctttttacaagggaaacggttccacgaagccttggaaagcatactttcaccccaggaaaccttaaaagagagagatgaaaatctcctcaagtctggttacattgaaagtgtccagcatattctgaaagatgtcagtggagtgcgagctcttgaaagtgctgttcaacatgaaaccttaaactatataggtctgctggactgtgtggctgagtatcagggcaagctctgtgtgattgattggaagacatcagagaaaccaaagccttttattcaaagtacatttgacaacccactgcaagttgtggcatacatgggtgccatgaaccatgataccaactacagctttcaggttcaatgtggcttaattgtggtggcctacaaagatggatcacctgcccacccacatctcatggatgcagagctctgttcccagtactggaccaagtggcttcttcgactagaagaatatacggaaaagaaaaagaaccagaatattcagaaaccagaatattcagaatagggagcaagttgctatttgggaacattcagcaccttctcacagtttggtaacatatattgctgtttactccagtgtaaaaatgaggtgccactggatctgagtgctacacgaacacaagtagaagtattaatttgttgaaatgtgttgttaccaaaaagactgaaaagccccaaagtctagatataaagacctagacttcggcacgcgaaatcccagctatgctacctcttatttacctgaaaggaggacacgcaggatgggcagtcatgctggtgactcttgtactcccttgagggacattgggggggggggggcgtggtcccaggcaggatgcccagtctttgagctgagattggaaggcagtgaggctgagggtgccaagatttccccagggttcacccagaggggaaggggctacatgcccccagctgtgtgcagggaggacacatcagcccactaccgctgccaacaccaatgcctaaaacttgtttcatacattggggttttctatatatttcagctgggaaaagcttacatttaaccttttgaaaaaataaatacgtgattagcctcaactaaacattgctgactataaagacagtatattcaccatgtcgctggcaatatgtcgttgcgtaacaccaaataaccccccagaagtagccagaggccagtttgaacatcacaattctaagtgttttagtaactatttctggcgtgagtcaacagatcatgtagatagagtcaattattgtttgtggagtttttcagctataggggaggggaactattaaaatccatttgtttctattcaataggtaataaaaattagttgtccctgggtttgggaaacttaaatgcccattacagccctggggaagggttttctgtcttatggagtgagtcttagcatttaagttatacagttgctgccttaaaatagtagcctgctacaatgacttctttgggtagccattttcataagaaataaaatacaagatatgagtaatg

SEQ ID NO: 17156 - protein, 344 aa, Homo sapiens [sequence omitted]

SEQ ID NO: 17157 - DNA, 1887 bp, Homo sapiens
  CDS (9)..(1847)
tcttgtcaatgatggcggtcacagcaggtgccgacttctgctatgccatcgaggttttcaagcctatggctgatgctgctgtgaagattgtggagaaaaatggctttagtgataagattaaggttatcaacaagcattccaccgaggtgactgtaggtccagagggtgacatgccatgccgtgccaacatcctggtcacagagttgtttgacacagagctgatcggggagggggcgctgccctcctatgagcacgcacacaggcatctcgtggaggaaaattgtgaggccgtgccccacagagccaccgtctatgcacagctggtggagtccgggaggatgtggtcgtggaacaagctatttcccatccacgtgcagaccagcctcggagagcaggtcatcgtccctcccgttgacgtggagagctgccctggcgcaccctctgtctgtgacattcagctgaaccaggtgtcaccagccgactttacagtcctcagcgatgtgctgcccatgttcagcatagacttcagcaagcaagtcagtagctcagcagcctgccatagcaggcggtttgaacctctgacatctggccgagctcaggtggttctctcgtggtgggacattgaaatggaccctgaggggaagatcaagtgcaccatggcccccttctgggcacactcagacccagaggagatgcagtggcgggaccactggatgcagtgtgtgtacttcctgccacaagaggagcctgtggtgcagggctcagcgctctatctggtagcccaccacgatgactactgcgtatggtacagcctgcagaggaccagccctgaaaagaatgagagagtccgccagatgcgccccgtgtgtgactgccaggctcacctgctctggaaccggcctcggtttggagagatcaatgaccaggacagaactgatcgatacgtccaggctctgaggaccgtgctgaagccagacagcgtgtgcctgtgtgtcagcgatggcagcctgctctccgtgctggcccatcacctgggggtggagcaggtgtttacagtcgagagttcagcagcttctcacaaactgttgagaaaaatcttcaaggctaaccacttggaagataaaattaacatcatagagaaacggccggaattattaacaaatgaggacctacagggcagaaaggtctctctcctcctgggcgagccgttcttcactaccagcctgctgccgtggcacaacctctacttctggtacgtgcggaccgctgtggaccagcacctggggccaggtgccatggtgatgccccaggcagcctcgctgcacgctgtggttgtggagttcagggacctgtggcggatccggagcccctgtggtgactgcgaaggcttcgacgtgcacatcatggacgacatgattaagcgtgccctggacttcagggagagcagggaagctgagccccacccgctgtgggagtacccatgccgcagcctctccgagccctggcagatcctgacctttgacttccagcagccggtgcccctgcagcccctgtgtgccgagggcaccgtggagctcagaaggcccgggcagagccacgcagcggtgctatggatggagtaccacctgaccccggagtgcacgctcagcactggcctcctggagccttcagaccccgaggggggctgctgctggaacccccactgcaagcaggccgtctacttcttcagccctgccccagatcccagagcactgctgggtggcccacggactgtcagctatgcagtggagtttcaccccgacacaggcgacatcatcatggagttcaggcatgcagataccccagactgaccactcttgagcaataaagtggcctgagggctggggt

SEQ ID NO: 17158 - protein, 613 aa, Homo sapiens [sequence omitted]

SEQ ID NO: 17159 - DNA, 2000 bp, Homo sapiens
tgactatacatttgcaggccttacacgccatactgacaggtgccacttacgtgactcatcagatgatgtcaccattgctgccaattatgggaaataactaatgcctattccagggatgagcccaaaccacacataaatgggttctaaatctcaccctcctaacctgcagtgagtccccccgttccaccctcttgaggctgcaaatctactgagaaggaatgggaaggattctacaacccaacttttgatactttttggccatctctcagtctctcccagcccctacccccacaccacctccctgctcccaggcagagaccgggttgcactttgttagggccagcaggtcaactgtaatggccaagagtgagttaaggctggaatgagaaatatgccccaagcttggaggggtaagcaggaataacacaaagcaaggaaagagattctttttgccctagtgaggaaaggaagcttcagaatgagggctggaggatagcaacttaggactgcagaagggggcagcttatgaagatgggagaaagtgggactgaagttgtaggggagcaggagggtagtgattttccgcttttctttctttctttctttttctttctttctctttctttctctctctctctctctctttctttttctttcttctttctttctctttttctttcctctttttctttctttctttttctttctctttcttccttctttctttcattcttctttgttctttcttctttctttctttttttttttttttaagatggagttttgctcttgttgctcaggctggagtgcaatggcacaatctcggctcactgcagcctccacctcccaggttcaaggggttcttctgcctcagcctcccaagtagctgggattacaggtgcctgccacgacacccagctaatttttgtatgtttagtagagacggggtttcaccatgttggccaggctggtctcaaattcctgacctcaggtgattctcccgcctcggcctcccaaagtgctgggattatgagcacgagccacggcgtccagccgattttccgctccctttcaagtgttaactcaccccctgacaggtgaagagggaagggttccttttacgcacaaccaaggttagcaaatgcccatgcaggatatggggtccctgcctctctggttgcttcatttcagcacttctatattagctgcttatggggaccctaaaatgaactggtcacccctccaccagctaagaaacaagggtgggattgctgtgccataagtcactgaacgacttgcttctggcaagcatgctcctgtgtgtcaggaccttaccaaggcaaagaaatgccaggctcaagaggagcaggacgtgagacattggcctggcttctaacctggtctgagtggaagagacacagcttagggatttcagttttgctcttaggctactagatactgttatttcaccccctgagggagggacaggaagagcacggatttattttctctccgtcttcagtacttattttagcatctagtcataccccagggagagatgcgagacggtgtcactggctcagctgaagcagatgagcccgtctctagcagagatgtgcctgtttcttaggcatccgttcagcactagtcttggccatcagatttttaaaaaagaaatagctcatgaggcatttgcaacttctcctctctagacttctttctagttttcctctgttgtgtcactgcgatgtgtccagggacaaagccataagtagagcatacatacttaagactatgctgtacatataagacaagacctgtctgggttaaagcacgaccttatgcccaagcatttactctggtgctgaataacgcgaactactggaatcagcctcccccaactctgcgcgccccctgcccccctgctcctatcccattcttgctctcaaatggaccacaccattctcaactcgtttataaataaagggatgcagaattgc

SEQ ID NO: 17160 - DNA, 2511 bp, Homo sapiens
  CDS (90)..(1958)
ctattttggtgacagaagaagaacttagtagatgcattgaggatgtgtttaaggtgtacgtggttgggaatgaacctttaacagttttgatggattccctgcttccagtcctgggagtgctttttcttctctactgttttactaagcagagtgtgtctcacataaggtcactttgccaagaaatcttattatggattctggggaagctggaaaggaagaaggcaattgccagcctgaaaggatttgcagggttggacaaagctgtgccctctctccattctctgtgtcagtttagagttgccactcaaggtggcattatgattaccatcaaagaggccattagtgatgaagatgaagatgaagccctgtaccagaaggtatcctctgagcagggccgggtggagcatctcggggacttgctgtcccactgccaggaatgcggtttggcaggagacttcttcatcttctgtttgaaagagttgactcatgtggcctcggaaaatgaaacagagttaaaaactgagcccttctccagcaagagcctcttggaattagagcaacatcagactcttcttgtggaaggccaagagcggaagctgcttgtcctgcagctgatggctgttctgtgcgagagaatgtctgagcagatattcacaaacgtcactcaggtggtggactttgtagcagcaacattgcagagagcctgtgcaagcctggcccatcaggcagagagcaccgtggaatcacagacgctgagcatgtccatggggctggtggctgtcatgctaggaggagctgttcagttgaagtcaagtgattttgctgttctgaagcagttgttgcctctgttggagaaggtatccaacacataccctgatccggtcatccaagaactcgctgttgatctccgcatcaccatctctacccatggagcctttgccactgaggccgtcagcatggctgcccaaagtacactgaacagaaaagatctggaagggaaaatagaagagcagcaacaaaccagtcatgaaagacccactgatgtagctcatagccaccttgaacaacagcagagccatgagacagccccccagacaggcctgcagtcaaatgctccaatcattcctcaaggagtcaatgagcccagcactactacaagtcagaaatctggaagcgtaaccacagaacagctccaagaggttcttttgtcagcttatgaccctcaaattccaacacgggctgctgccctgcgtactctttcccactggatagagcagagagaagcaaaagcccttgagatgcaagagaagcttctcaagatattcttggaaaacttggaacatgaagacacttttgtatatctatctgcaattcagggggttgccctgctgtcagacgtctatcctgagaaaatcttgccggacttgttggctcaatatgacagcagcaaagacaagcacacaccagagaccagaatgaaagtcggggaagtccttatgcgaatcgtcagggcattaggagacatggtctcaaagtaccgagaacctttgatccataccttcctgaggggagtgagagatcctgatggtgctcacagggccagcagcttggccaaccttggggagctgtgccagaggctggactttctgctgggctccgtggtccatgaggtaacagcttgcctgattgctgtggccaaaacagatggtgaagttcaagtacgcagagctgccatacatgtggttgtgctgctgcttcggggactcagccagaaagctactgaggtgctgagcgccgtcctcaaggatctctaccacctgctgaagcacgtagtgtgtctggagcccgatgacgtggccaagctccatgcccagttggccctagaagagctggatgacatcatgaaaaacttcctgttccctccacagaagctggagaagaagatcatggtcctgccgtagacctggctccaaggacgtggaggaggcaggcagggccaggcacccagagccgtgcccaggtcttccagcaggtggccctgctgcctcttgagtgctggcagcatggctgaccctcggggtggttttatggtgcaggtcacttgggtcttcagggtcccttccgagggcatgtgttcagcactcccgcgttcagcctgaggggtgtacagttaagagaagacagttacagatctcattaatctacatttttcactgtcctctagcattgaaagaaggatgtctacctggtgaaagtatattttaacatgactgatggaatttcactaattgcccactctcttggaacttgaggagaagcggttggccacccatatgtcacctagctctatattctttcaggctgagattcttcttcaggaaaatgaggagcagaactggccacccttggctgctcaagaggcatttcagagtaggagatgcagttggaggtggggaggggaaggaaatagttatcaaataatgcaaaatggaataaagttatcttggatgg

SEQ ID NO: 17161 - protein, 623 aa, Homo sapiens
MDSLLPVLGVLFLLYCFTKQSVSHIRSLCQEILLWILGKLERKKAIASLKGFAGLDKAVPSLHSLCQFRVATQGGIMITIKEAISDEDEDEALYQKVSSEQGRVEHLGDLLSHCQECGLAGDFFIFCLKELTHVASENETELKTEPFSSKSLLELEQHQTLLVEGQERKLLVLQLMAVLCERMSEQIFTNVTQVVDFVAATLQRACASLAHQAESTVESQTLSMSMGLVAVMLGGAVQLKSSDFAVLKQLLPLLEKVSNTYPDPVIQELAVDLRITISTHGAFATEAVSMAAQSTLNRKDLEGKIEEQQQTSHERPTDVAHSHLEQQQSHETAPQTGLQSNAPIIPQGVNEPSTTTSQKSGSVTTEQLQEVLLSAYDPQIPTRAAALRTLSHWIEQREAKALEMQEKLLKIFLENLEHEDTFVYLSAIQGVALLSDVYPEKILPDLLAQYDSSKDKHTPETRMKVGEVLMRIVRALGDMVSKYREPLIHTFLRGVRDPDGAHRASSLANLGELCQRLDFLLGSVVHEVTACLIAVAKTDGEVQVRRAAIHVVVLLLRGLSQKATEVLSAVLKDLYHLLKHVVCLEPDDVAKLHAQLALEELDDIMKNFLFPPQKLEKKIMVLP

SEQ ID NO: 17162 - DNA, 2963 bp, Homo sapiens
  CDS (10)..(1725)
tacttggatatgaaaaatactcgtacggcctctgaaccatcagctcaactaagctatgccagcactggacgagagtttgcagccttttttgccaagaagaaacctcaaaggccaaaaaattctcttttcaagttcgaatcgtcctcccatgccatcagtatgagcgcctatctgcgagaacagagaagggagctctatagtcggagtggagaactgcaagggggtcctgatgacaacttaattgaaggtggaggaacaaaatttgtctgcaaacctggagccagaaacattaccgtcatattccacccattactaagatttattcaggagattgagcatgctctgggtcttggcccagccaaacagtgtcctcttcgagagtttctcaccgtgtacatcaaaaacatctttctcaatcaagtcttggctgagatcaacaaggagattgaaggagtcactaaaacatctgaccctttgaagattctggccaacgcagacaccatgaaggtgctgggagtgcagcggcctctcctacagagcacaatcattgtggagaagacagttcaagacctcctgaacctgatgcatgacttgagtgcatattcagatcaattcctcaacatggtgtgcgtgaagctccaggagtacaaggacacctgcactgcagcttacaggggtattgtccagtcagaagaaaaacttgtcatcagtgcatcctgggcaaaagatgatgatatcagcagactcttgaaatctctaccaaactggatgaatatggctcaacccaaacagctgaggccaaaaagagaggaggaagaagatttcataagggcagcttttggcaaggagtctgaagttcttattgggaacctgggtgataaattaatccctccacaagacatccttcgtgacgtcagtgacctcaaagccttggccaacatgcatgaaagcctggaatggttggcaagtcgaacaaagtcagctttctccaatctttctacatcccagatgctttctcctgctcaagacagccacacgaacacggatctccccccagtgtcagagcagatcatgcagactctcagtgaacttgccaaatcgttccaggatatggctgaccgctgcttgcttgtcttacatctggaagtgagggttcactgtttccactatcttatccctcttgcaaaggaggggaactatgccattgtggctaatgtggaaagtatggattatgaccccctggtggtcaagctcaacaaagatatcagcgccattgaagaggccatgagcgccagccttcagcagcacaagttccagtatatcttcgaaggcctgggccacctgatctcctgcatcctcattaatggtgcccagtacttcaggcgcatcagtgagtctggcatcaagaaaatgtgtaggaacatttttgttcttcagcagaatttgaccaacatcaccatgtcgcgggaggcagacctggactttgcaaggcagtactacgagatgctttacaacacagctgacgagctcctgaacctggtggtggaccagggtgtgaagtacacggagctggagtacatccacgctctgaccctgctgcaccgcagccaaactggggtgggggaactgaccacccagaacacgaggctgcagaggctcaaagagatcatctgcgagcaggctgccatcaagcaagccaccaaggacaagaagataactaccgtttagcagggcgtactgcggttggtgacggtggtcccctcagtcacactcacttttttccttggtatgttattgagtatattctgagcttagttttctctacagtgatactttagtggagaggaggtgtaaggattctttctctctggttttggcttttcatataaatgctaaaggaaggcgacagtacagagtgttttggttgaacaactactttaatgcagtcaaatctaacgggactagggtgggatagggaggaaggtggtatcaaattgttggactctgaaaaacaagtggatggattactaatatttgatttattactcaatatatatataattccagccttggaaagtaggaaagtaggctgctacctaacttttagtcccttccaaaaccatttagtagggttctattacataaacagtagggtttttcctctcctgaccttatccgtttacagttcaatgaaataagtgtatgtgcattgctgtctgtctctattgccaaaatcaaataaatggcttctcagctgctgtttacaacaaacttccctaaccaaaacagaacctctaatttagggctaggaatagaagtcttttgatcccagtccgtgggacagttttgtatgctgtatcttgtacacaggttgtaggttggtttattgccattttgttttatttctgctatataaaaaccaagagccagacaattagacaactatggaggaatgaaaggcaattcaaacatctgcttgattcccgccccgccacccctaatttctgagagaataatggttagagaacattgcatctcacttgaaacatcctttgggggtaaatgattcttaggtgctcacttggtctgagctcagctgaatgcagggaagatgggacagagtgacatttctcctctgtgcggcctccagctgagcctgtctctaaaaagaattgttccctcccccgcaatgtgggcacttaccatgttcctggcacactggacctcaccatgtcccccggtcaccagtcctcttgctgcccatggttcataggtcatagaaggcagcaatgcactgactgggccacatcttgaaaactcgtggaaagggaaaggggaggagatgggactttgaccacacacagtgatgcctcacaccctgaaggtgggggattttgtacctgtttgtacaactttggtcttgatgggaaaaatggagaattaaaaagtgttttgagaagctt

SEQ ID NO: 17163 - protein, 572 aa, Homo sapiens
MKNTRTASEPSAQLSYASTGREFAAFFAKKKPQRPKNSLFKFESSSHAISMSAYLREQRRELYSRSGELQGGPDDNLIEGGGTKFVCKPGARNITVIFHPLLRFIQEIEHALGLGPAKQCPLREFLTVYIKNIFLNQVLAEINKEIEGVTKTSDPLKILANADTMKVLGVQRPLLQSTIIVEKTVQDLLNLMHDLSAYSDQFLNMVCVKLQEYKDTCTAAYRGIVQSEEKLVISASWAKDDDISRLLKSLPNWMNMAQPKQLRPKREEEEDFIRAAFGKESEVLIGNLGDKLIPPQDILRDVSDLKALANMHESLEWLASRTKSAFSNLSTSQMLSPAQDSHTNTDLPPVSEQIMQTLSELAKSFQDMADRCLLVLHLEVRVHCFHYLIPLAKEGNYAIVANVESMDYDPLVVKLNKDISAIEEAMSASLQQHKFQYIFEGLGHLISCILINGAQYFRRISESGIKKMCRNIFVLQQNLTNITMSREADLDFARQYYEMLYNTADELLNLVVDQGVKYTELEYIHALTLLHRSQTGVGELTTQNTRLQRLKEIICEQAAIKQATKDKKITTV

SEQ ID NO: 17164 - DNA, 2168 bp, Homo sapiens
  CDS (62)..(1732)
ctgaccgccggggggtgcccccgggacgtagcgccgcggagaggaagcggcaaaggggaccatgcggcgcctgactcgtcggctggttctgccagtcttcggggtgctctggatcacggtgctgctgttcttctgggtaaccaagaggaagttggaggtgccgacgggacctgaagtgcagacccctaaggtttggtccttgtttttcaaggtggctgggatgagcccttgggcgcctcaggtgcctgtatcacccactcctccctaccaaagagggcatcttcctacaggaggacaccttgctgtatgtcatttcccatgtctcttgcaagaagctcagttccatttgcagactcaggtctttcttcaagtcagatgcacactgctggtgtattgcacggaccttccacccactagcatcatcatcaccttccacaacgaggcccgctccacgctgctcaggaccatccgcagtgtattaaaccgcacccctacgcatctgatccgggaaatcatattagtggatgacttcagcaatgaccctgatgactgtaaacagctcatcaaattgcccaaggtgaaatgcttgcgcaataatgaacggcaaggtctggtccggtcccggattcggggcgctgacatcgcccagggcaccactctgactttcctcgacagccactgtgaggtgaacagggactggctccagcctctgttgcacagggtcaaagaggactacacgcgggtggtgtgccctgtgatcgatatcattaacctggacaccttcacctacatcgagtctgcctcggagctcagaggggggtttgactggagcctccacttccagtgggagcagctctccccagagcagaaggctcggcgcctggaccccacggagcccatcaggactcctatcatagctggagggctcttcgtgatcgacaaagcttggtttgattacctggggaaatatgatatggacatggacatctggggtggggagaactttgaaatctccttccgagtgtggatgtgcgggggcagcctagagatcgtcccctgcagccgagtggggcacgtcttccggaagaagcacccctacgttttccctgatggaaatgccaacacgtatataaagaacaccaagcggacagctgaagtgtggatggatgaatacaagcaatactattacgctgcccggccattcgccctggagaggcccttcgggaatgttgagagcagattggacctgaggaagaatctgcgctgccagagcttcaagtggtacctggagaatatctaccctgaactcagcatccccaaggagtcctccatccagaagggcaatatccgacagagacagaagtgcctggaatctcaaaggcagaacaaccaagaaaccccaaacctaaagttgagcccctgtgccaaggtcaaaggcgaagatgcaaagtcccaggtatgggccttcacatacacccagcagatcctccaggaggagctgtgcctgtcagtcatcaccttgttccctggcgccccagtggttcttgtcctttgcaagaatggagatgaccgacagcaatggaccaaaactggttcccacatcgagcacatagcatcccacctctgcctcgatacagatatgttcggtgatggcaccgagaacggcaaggaaatcgtcgtcaacccatgtgagtcctcactcatgagccagcactgggacatggtgagctcttgaggacccctgccagaagcagcaagggccatggggtggtgcttccctggaccagaacagactggaaactgggcagcaagcagcctgcaaccacctcagacatcctggactgggaggtggaggcagagccccccaggacaggagcaactgtctcagggaggacagaggaaaacatcacaagccaatggggctcaaagacaaatcccacatgttctcaaggccgttaagttccagtcctggccagtcattccctgattggtatctggagacagaaacctaatgggaagtgtttattgttccttttcctacaaaggaagcagtctctggaggccagaaagaaaagccttctttttcactaggccaggactacattgagagatgaagaatggaggttgtttccaaaagaaataaagagaaacttagaagttgtctctgg

SEQ ID NO: 17165 - protein, 557 aa, Homo sapiens
MRRLTRRLVLPVFGVLWITVLLFFWVTKRKLEVPTGPEVQTPKVWSLFFKVAGMSPWAPQVPVSPTPPYQRGHLPTGGHLAVCHFPCLLQEAQFHLQTQVFLQVRCTLLVYCTDLPPTSIIITFHNEARSTLLRTIRSVLNRTPTHLIREIILVDDFSNDPDDCKQLIKLPKVKCLRNNERQGLVRSRIRGADIAQGTTLTFLDSHCEVNRDWLQPLLHRVKEDYTRVVCPVIDIINLDTFTYIESASELRGGFDWSLHFQWEQLSPEQKARRLDPTEPIRTPIIAGGLFVIDKAWFDYLGKYDMDMDIWGGENFEISFRVWMCGGSLEIVPCSRVGHVFRKKHPYVFPDGNANTYIKNTKRTAEVWMDEYKQYYYAARPFALERPFGNVESRLDLRKNLRCQSFKWYLENIYPELSIPKESSIQKGNIRQRQKCLESQRQNNQETPNLKLSPCAKVKGEDAKSQVWAFTYTQQILQEELCLSVITLFPGAPVVLVLCKNGDDRQQWTKTGSHIEHIASHLCLDTDMFGDGTENGKEIVVNPCESSLMSQHWDMVSS

SEQ ID NO: 17166 - DNA, 2057 bp, Homo sapiens
  CDS (2)..(1564)
gatgctgcagccgtccagcagcccgctctgggggaagcttcgtgtggacatcaaggcttacctgggctcggccatacagctggtgtcctgtctgtcggagacgacggtgttggcggccgtgctgcggcacatcagcgtgctggtgccctgcttcctgaccttccccaagcagtgccgcatgctgctcaagagaatggtggtcgtatggagcactggggaggagtctctgcgggtgctggctttcctggtcctcagcagagtctgccggcacaagaaggacactttccttggccccgtcctcaagcaaatgtacatcacgtatgtgaggaactgcaagttcacctcgcctggtgccctccccttcatcagtttcatgcagtggaccttgacggagctgctggccctggagccgggtgtggcctaccagcacgccttcctctacatccgccagctcgccatacacctgcgcaacgccatgaccacccgcaagaaggaaacataccagtctgtgtacaactggcagtatgtgcactgcctcttcctgtggtgccgggtcctgagcactgcgggccccagcgaagccctccagcccttggtctacccccttgcccaagtcatcattggctgtatcaagctcatccccactgcccgcttctacccgctgcgaatgcactgcatccgtgccctgacgctgctctcggggagctcgggggccttcatcccggtgctgcctttcatcctggagatgttccagcaggtcgacttcaacaggaagccagggcgcatgagctccaagcccatcaacttctccgtgatcctgaagctgtccaatgtcaacctgcaggagaaggcgtaccgggacggcctggtggagcagctgtacgacctcaccctggagtacctgcacagccaggcacactgcatcggcttcccggagctggtgctgcctgtggtcctgcagctgaagtcgttcctccgggagtgcaaggtggccaactactgccggcaggtgcagcagctgcttgggaaggttcaggagaactcggcatacatctgcagccgccgccagagggtttccttcggcgtctctgagcagcaggcagtggaagcctgggagaagctgacccgggaagaggggacacccttgaccttgtactacagccactggcgcaagctgcgtgaccgggagatccagctggagatcagtggcaaagagcggctggaagacctgaacttccctgagatcaaacgaaggaagatggctgacaggaaggatgaggacaggaagcaatttaaagacctctttgacctgaacagctctgaagaggacgacaccgagggattctcggagagagggatactgaggcccctgagcactcggcatggggtggaagacgatgaagaggacgaggaggagggcgaggaggacagcagcaactcggagggtgaatggtcttgggatggagacccagacgcagaggcggggctggcccctggggagctgcagcagctggcccaggggccggaggacgagctggaggatctgcagctctcagaggacgactgaggcagcccatctggggggcctgtaggggctgccgggctggtggccagtgtttccacctccctggcagtcaggcctagaggctggcgtctgtgcagttgggggaggcagtagacacgggacaggctttattatttatttttcagcatgaaagaccaaacgtatcgagagctgggctgggctgggctggtgtggctgctgaagccccacagctgtgggctgctgaagtcagctccgcgggggagctgaccctgacgtcagcagaccgagaccagtcccagttccagggggaggcctgcaggcccctggccccttccaccacctctgccctccgtctgcagacctcgtccatctgcaccaggctctgccttcactcccccaagtctttggaaatttgttcttttcctttgaagtcacattttcttttaaaattttttgttttgcatccgaaaccgaaagaaataaagcggtgggaggcagggccattgtgttg

SEQ ID NO: 17167 - protein, 521 aa, Homo sapiens [sequence omitted]

SEQ ID NO: 17168 - DNA, 3660 bp, Homo sapiens
  CDS (68)..(3658)
gtgtgcggcggcggcggcggcggccgagggggatggagcgagcgccgagccgggtcagagttgaacaatgaccatagttgacaaagcttctgaatcttcagacccatcagcctatcagaatcagcctggcagctccgaggcagtctcacctggagacatggatgcaggttctgccagctggggtgctgtgtcttcattgaatgatgtgtcaaatcacacactttctttaggaccagtacctggtgctgtagtttattcgagttcatctgtacctgataaatcaaaaccatcaccacaaaaggatcaagccctaggtgatggcatcgctcctccacagaaagttcttttcccatctgagaagatttgtcttaagtggcaacaaactcatagagttggagctgggctccagaatttgggcaatacctgttttgccaatgcagcactgcagtgtttaacctacacaccacctcttgccaattacatgctatcacatgaacactccaaaacatgtcatgcagaaggcttttgtatgatgtgtacaatgcaagcacatattacccaggcactcagtaatcctggggacgttattaaaccaatgtttgtcatcaatgagatgcggcgtatagctaggcacttccgttttggaaaccaagaagatgcccatgaattccttcaatacactgttgatgctatgcagaaagcatgcttgaatggcagcaataaattagacagacacacccaggccaccactcttgtttgtcagatatttggaggatacctaagatctagagtcaaatgtttaaattgcaagggcgtttcagatacttttgatccatatcttgatataacattggagataaaggctgctcagagtgtcaacaaggcattggagcagtttgtgaagccggaacagcttgatggagaaaactcgtacaagtgcagcaagtgtaaaaagatggttccagcttcaaagaggttcactatccatagatcctctaatgttcttacactttctctgaaacgttttgcaaattttaccggtggaaaaattgctaaggatgtgaaataccctgagtatcttgatattcggccatatatgtctcaacccaacggagagccaattgtctacgtcttgtatgcagtgctggtccacactggttttaattgccatgctggccattacttctgctacataaaagctagcaatggcctctggtatcaaatgaatgactccattgtatctaccagtgatattagatcggtactcagccaacaagcctatgtgctcttttatatcaggtcccatgatgtgaaaaatggaggtgaacttactcatcccacccatagccccggccagtcctctccccgccccgtcatcagtcagcgggttgtcaccaacaaacaggctgcgccaggctttatcggaccacagcttccctctcacatgataaagaatccacctcacttaaatgggactggaccattgaaagacacgccaagcagttccatgtcgagtcctaacgggaattccagtgtcaacagggctagtcctgttaatgcttcagcttctgtccaaaactggtcagttaataggtcctcagtgatcccagaacatcctaagaaacaaaaaattacaatcagtattcacaacaagttgcctgttcgccagtgtcagtctcaacctaaccttcatagtaattctttggagaaccctaccaagcccgttccctcttctaccattaccaattctgcagtacagtctacctcgaacgcatctacgatgtcagtttctagtaaagtaacaaaaccgatcccccgcagtgaatcctgctcccagcccgtgatgaatggcaaatccaagctgaactccagcgtgctggtgccctatggcgccgagtcctctgaggactctgacgaggagtcaaaggggctgggcaaggagaatgggattggtacgattgtgagctcccactctcccggccaagatgccgaagatgaggaggccactccgcacgagcttcaagaacccacgaccctaaacggtgctaatagtgcagacagcgacagtgacccgaaagaaaacggcctagcgcctgatggtgccagctgccaaggccagcctgccctgcactcagaaaatccctttgctaaggcaaacggtcttcctggaaagttgatgcctgctcctttgctgtctctcccagaagacaaaatcttagagaccttcaggcttagcaacaaactgaaaggctcgacggatgaaatgagtgcacctggagcagagaggggccctcccgaggaccgcgacgccgagcctcagcctggcagccccgccgccgaatccctggaggagccagatgcggccgccggcctcagcagcaccaagaaggctccgccgccccgcgatcccggcacccccgctaccaaagaaggcgcctgggaggccatggccgtcgcccccgaggagcctccgcccagcgccggcgaggacatcgtgggggacacagcaccccctgacctgtgtgatcccgggagcttaacaggcgatgcgagcccgttgtcccaggacgcaaaggggatgatcgcggagggcccgcgggactcggcgttggcggaagccccggaagggttgagtccggctccgcctgcgcggtcggaggagccctgcgagcagccactccttgttcaccccagcggggaccacgcccgggacgctcaggacccatcccagagcttgggcgcacccgaggccgcagagcggccgccagctcctgtgctggacatggccccggccggtcacccggaaggggacgctgagcctagccccggcgagagggtcgaggacgccgcggcgccgaaagccccaggcccttccccagcgaaggagaaaatcggcagcctcagaaaggtggaccgaggccactaccgcagccggagagagcgctcgtccagcggggagcccgccagagagagcaggagcaagactgagggccaccgtcaccggcggcgccgcacctgcccccgggagcgcgaccgccaggaccgccacgccccggagcaccaccccggccacggcgacaggctcagccctggcgagcgccgctctctgggcaggtgcagtcaccaccactcccgacaccggagcggggtggagctggactgggtcagacaccactacaccgagggcgagcgtggctggggccgggagaagttctaccccgacaggccgcgctgggacaggtgccggtactaccatgacaggtacgccctgtacgctgcccgggactggaagcccttccacggcggccgcgagcacgagcgggccgggctgcacgagcggccgcacaaggaccacaaccggggccgtaggggctgcgagccggcccgggagagggagcggcaccgccccagcagcccccgcgcaggcgcgccccacgccctcgccccgcaccccgaccgcttctcccacgacagaactgcacttgtagccggagacaactgtaacctctctgatcggtttcacgaacacgaaaatggaaagtcccggaaacggagacacgacagtgtggagaacagtgacagtcatgttgaaaagaaagcccggaggagcgaacagaaggatcctctagaagagcctaaagcaaagaagcacaaaaaatc

SEQ ID NO: 17169 - protein, 1197 aa, Homo sapiens
MTIVDKASESSDPSAYQNQPGSSEAVSPGDMDAGSASWGAVSSLNDVSNHTLSLGPVPGAVVYSSSSVPDKSKPSPQKDQALGDGIAPPQKVLFPSEKICLKWQQTHRVGAGLQNLGNTCFANAALQCLTYTPPLANYMLSHEHSKTCHAEGFCMMCTMQAHITQALSNPGDVIKPMFVINEMRRIARHFRFGNQEDAHEFLQYTVDAMQKACLNGSNKLDRHTQATTLVCQIFGGYLRSRVKCLNCKGVSDTFDPYLDITLEIKAAQSVNKALEQFVKPEQLDGENSYKCSKCKKMVPASKRFTIHRSSNVLTLSLKRFANFTGGKIAKDVKYPEYLDIRPYMSQPNGEPIVYVLYAVLVHTGFNCHAGHYFCYIKASNGLWYQMNDSIVSTSDIRSVLSQQAYVLFYIRSHDVKNGGELTHPTHSPGQSSPRPVISQRVVTNKQAAPGFIGPQLPSHMIKNPPHLNGTGPLKDTPSSSMSSPNGNSSVNRASPVNASASVQNWSVNRSSVIPEHPKKQKITISIHNKLPVRQCQSQPNLHSNSLENPTKPVPSSTITNSAVQSTSNASTMSVSSKVTKPIPRSESCSQPVMNGKSKLNSSVLVPYGAESSEDSDEESKGLGKENGIGTIVSSHSPGQDAEDEEATPHELQEPTTLNGANSADSDSDPKENGLAPDGASCQGQPALHSENPFAKANGLPGKLMPAPLLSLPEDKILETFRLSNKLKGSTDEMSAPGAERGPPEDRDAEPQPGSPAAESLEEPDAAAGLSSTKKAPPPRDPGTPATKEGAWEAMAVAPEEPPPSAGEDIVGDTAPPDLCDPGSLTGDASPLSQDAKGMIAEGPRDSALAEAPEGLSPAPPARSEEPCEQPLLVHPSGDHARDAQDPSQSLGAPEAAERPPAPVLDMAPAGHPEGDAEPSPGERVEDAAAPKAPGPSPAKEKIGSLRKVDRGHYRSRRERSSSGEPARESRSKTEGHRHRRRRTCPRERDRQDRHAPEHHPGHGDRLSPGERRSLGRCSHHHSRHRSGVELDWVRHHYTEGERGWGREKFYPDRPRWDRCRYYHDRYALYAARDWKPFHGGREHERAGLHERPHKDHNRGRRGCEPARERERHRPSSPRAGAPHALAPHPDRFSHDRTALVAGDNCNLSDRFHEHENGKSRKRRHDSVENSDSHVEKKARRSEQKDPLEEPKAKKHKK

SEQ ID NO: 17170 - DNA, 2165 bp, Homo sapiens
  CDS (1)..(504)
atgtatttccagtaccagatcatcatgaccatgatcgtccataagaactgggtggacctggcctgggccgtcagctactacatccggttcttcatcacctacatccctttctacggcatcctgggagccctccttttcctcaacttcatcaggttcctggagagccactggtttgtgtgggtcacacagatgaatcacatcgtcatggagattgaccaggaggcctaccgtgactggttcagtagccagctgacagccacctgcaacgtggagcagtccttcttcaacgactggttcagtggacaccttagcttgcagattgagcaccacctcttccccaccatgccccggcacaacttacacaagatcgccccgctggtgaagtctctatgtgccaagcatggcattgaataccaggagaagccgctactgagggccctgctggacatcatcaggtccctgaagaagtctgggaagctgtggctggacgcctaccttcacaaatgaagccacagcccccgggacactgtggggaaggggtgcaggtggggtgatggccagaggaatgatgggcctttgttctgaggggtgtccgagaggctggtgtatgcactgctcacggaccccatgttggatctttctccctttctcctctcctttttctcttcacatctcccccatagcaccctgccctcatgggacctgccctccctcagccgtcagccatcagccatggccctcccagtgcctcctagccccttcttccaaggagcagagaggtggccaccgggggtggctctgtcctacctccactctctgcccctaaagatgggaggagaccagcggtccatgggtctggcctgtgagtctccccttgcagcctggtcactaggcatcacccccgctttggttcttcagatgctcttggggttcataggggcaggtcctagtcgggcagggcccctgaccctcccggcctggcttcactctccctgacgactgccattggtccaccctttcatagagaggcctgctttgttacaaagctcgggtctccctcctgcagctcggttaagtacccgaggcctctcttaagatgtccagggccccaggcccgcgggcacagccagcccaaaccttgggccctggaagagtcctccaccccatcactagagtgctctgaccctgggctttcacgggccccattccaccgcctccccaacttgagcctgtgaccttgggaccaaagggggagtccctcgtctcttgtgactcagcagaggcagtggccacgttcagggaggggccggctggcctggaggctcagcccaccctccagcttttcctcagggtgtcctgaggtccaagattctggagcaatctgacccttctccaaaggctctgttatcagctgggcagtgccagccaacccctggccatttggccccaggggacgtgggccctgcaggctgcaggagggcactggagctgggaggtctcgtcccagccctccccatctcggggctgctgtgtggacggcgctgcctcaggcactctcctgtctgaacctgcccttactgtgtttaacctgttgctccaggatgcattctgataggagggggcggcagggctgggccttgtgacaatctgcctttcaccacatggccttgcctcggtggccctgactgtcagggagggccagggaggcagagcgggagggagtctcaggaggaggctgccctgaggggctggggagggggtacctcatgaggaccagggtggagctgagaagaggaggaggtgggggctggaggtgctggtagctgaggggacgggcaagtgagaggggagggagggaagtcctgggaggatcctgagctgctgttgcagtctaacccactaatcagttcttagattcaggggaagggcaggcaccaacaactcagaatgggggctttcggggagggcgcctagtccccccagctctaagcagccaggagggacctgcatctaagcatctgggttgccatggcaatggcatgccccccagctactgtatgcccccgacccccgcagaggcagaatgaacccatagggagctgatcgtaatgtttatcatgttacttccccacccctacattttttgaaataaaataaggaatttt

SEQ ID NO: 17171 - protein, 168 aa, Homo sapiens [sequence omitted]

SEQ ID NO: 17172 - DNA, 3725 bp, Homo sapiens
  CDS (718)..(2778)
agacaatgagggagagtctccgccgaccgcctgctgcttattgttccgggactggagactgcagccggctgctgcctagtcctccggggctccgctcctgactagctcctccgtccctctagggacggttcggggtcacctaaccctggtccccggggcgctgggacgctagccccaagccgcagccgctcttcgctgaccgccctctttctgctttgcaggtcggcagcttcactcccgagggtgccgcgagcccaggcggcgaacacccggtacccctggcgcagcgaggtgggatgctgtacggacagcagcgctaagtgcccccccacccccggcgcagggtgcactcgctcctggccgcgggcccagcggcggcggcggcggcggcggcggaggggatgagcccgggacgcgcgaggcgcctgcctcaagctaccgcccggagagggacgccgagtagggctcatcgcagtaccgcgcggacccctgccccctgtggcacgcggctgcggagccttgaagccgtgtctgtgatcaggatgcactgggcgcctcgcagctggtgaggatgccctgctgcgcggccctgcgcccccagccccagtcccaggtgggcaagactgactgggcccggcttcggcccctcgtgccggtggatgaaacgtgccggagtgcttgggtgccatcagctatcaaatctgaattctaagcgccatggacgaaggcactggactgcagcccggggcgggagagcagctggaggcgccggccactgcagaagctgtccaagagaggtgcgagccggagaccctcaggtctaagagtttaccggccctcagcagcgcctcctgccggccaagcctcagtcccactagtggagacgccaacccggcctttggctgtgtggattcttcgggccaccaggagttgaagcaaggcccgaacccgttggcccccagtccctctgccccgtccacttcggcggggctcggggactgtaaccacagggtggacctcagcaaaaccttctcggtgtcctccgccttggccatgctccaggagagaaggtgcctctacgtggtcctcacggattcccgttgcttcctggtgtgcatgtgctttctgaccttcatccaggcgttaatggtctctgggtacctgagcagcgtaattaccaccattgaaaggcgctacagtctgaagagttccgagtcggggctgctggtcagctgctttgacatcgggaacctggtggtggtggtgttcgtcagctacttcggcggccggggtcggcggcccctgtggctggccgtgggtggactcctcatcgccttcggggcagccctcttcgccttacctcacttcatctcgcccccctaccagatccaagagttgaacgcctcggcccccaacgacggcctgtgtcagggtggcaactccaccgccactttggagcctccggcctgtccgaaggactcgggaggaaataatcactgggtctacgtggctttattcatttgcgcgcagattctcattggaatgggctccacacctatttataccctgggaccaacctacttagatgacaatgtcaagaaagaaaactcctccttgtacctagccatcatgtatgtcatgggagcacttggccctgcagtgggatatttattaggtggacttcttattggtttttatgttgatcccagaaatcctgttcaccttgaccagaatgaccctcgtttcattggaaactggtggagtggattcctcctttgtgccattgcaatgtttcttgtgatattcccaatgtttactttcccaaaaaagcttccacctcgacacaagaaaaagaaaaagaaaaaattttctgttgatgctgttagtgatgacgatgttctgaaggagaaatcaaacaacagtgaacaagcggacaaaaaagtttcttcgatgggatttggaaaggatgtcagagacctaccaagagcagctgtcaggatcttaagcaacatgacattcctttttgtgagtttgtcatacacagctgagagtgccattgtaactgctttcattaccttcattcccgagttcatcgagtcacagtttggtatcccagcctccaatgccagcatctacactggggttattatcgtccccagtgctggtgttggtattgtcctcggaggctacattataaaaaaattgaaacttggtgccagagaatctgcaaaactagcaatgatctgcagtggtgtgtctttactatgtttttcaaccctatttattgttggatgtgaaagcattaatctagggggcataaacatcccttatacaacaggaccttctctcaccatgccccataggaatctgacaggaagctgcaacgttaattgtggttgtaaaatacacgagtatgagccagtctgtggatcagatggaattacatactttaacccttgtctggctggctgtgttaatagtggtaatcttagcactgggatacggaattatacagaatgcacctgtgtccaaagtcgccaagtgatcactccacccaccgtgggacagcgaagtcagctccgtgtggttattgtcaagacttatctcaatgagaacggctatgctgtgtctgggaaatgtaaacggacctgcaatactcttatcccattcttagtttttcttttcatagtcaccttcatcacagcatgtgcccaaccatcagctatcatagtaacactcagcatacattcctactccaatctactttggagcagtcattgacaccacctgcatgctctggcaacaggaatgtggtgtgcagggttcttgctgggagtacaacgtgacgtcgtttcgttttgtgtattttggtttggctgccggcctcaaattcgttgggtttatttttatttttctggcctggtactccataaaatacaaggaggatggactgcagaggcggaggcagagagaatttcccctgagcaccgtgagtgagagagtgggacaccccgacaatgcccggactagatcttgcccagctttcagcacccagggagaattccacgaagagactggcctgcaaaaagggatccagtgcgcagcacagacctacccggggcccttcccagaagcaataagttcctctgcggacccggggctggaagagagccccgctgccttggagccgccctcctgaagcttgaaaatggaagaatttagttttgttggttgaattgaaaatggcgacttgagaaacaactgtgccttcttttctttctttcttttttttaacctctacagacacaatcctcaaaccaacaaaactcagtatacacagccgctattcattgagggctggatacctcaacaagactgagagcctttccccgcttctctccaagaaggagacgttcagctagatttgttcccatttccgttgtgttaattcaaagctcatgcccccctacggtacaggctgaggtacacggttagcaaaaccatgggaaggggaatagcggtgcatatcattaactaacactccaaacaaaggtgagcttgcccaggacttggcatttccaaatcaaagtttttagatatgaacacctactgtgagttctgctacaaggcacaaatgaatttgtctcaactatgcaatttgattggaaaaatgtatgtgcagcatgttacatttactttcacggaataaagcagatatgtttctg

SEQ ID NO: 17173 - protein, 687 aa, Homo sapiens [sequence omitted]

SEQ ID NO: 17174 - DNA, 1687 bp, Homo sapiens
  CDS (104)..(1687)
acctgcaggctcttctcccgccgcggcccggcgctctccgagtcgcccctgcggactggtctcgcacagtgcctgggcaccgggcgccagacagacactggccatgacgagcggcgcaaccaggtaccggctgagctgctcgctccggggccacgagctggacgtacggggcctggtgtgctgcgcctatccgccgggagcctttgtgtccgtgtcccgagaccgcaccacccgcctctgggccccagacagtccaaacaggagctttacagaaatgcactgtatgagtggccattccaattttgtatcttgtgtatgcatcataccctcaagtgacatctaccctcatggcctaattgccaccggtggaaatgaccacaatatatgcattttctcactggacagtccaatgccactttatattctaaaaggccacaaaaatactgtttgtagtctatcatctggaaaatttgggacattacttagtggttcatgggacaccactgctaaagtctggctgaatgacaagtgcatgatgaccttgcagggtcatacagctgcagtgtgggcggtaaagatcttacctgaacagggcttaatgttgactggatcagcagacaagactgttaaactgtggaaggctggaagatgtgagaggactttttcagggcatgaagactgtgtaagaggtttggcaattttgagtgaaacagaatttctttcctgtgcaaatgatgctagtattagaaggtggcaaatcactggcgagtgtcttgaagtatattatggacatacaaattatatttatagcatatccgtttttccaaattgtagagactttgtgacaacagcagaggacagatctctgagaatctggaaacatggggaatgtgctcaaactatccgacttccagctcagtctatatggtgctgctgtgtgctcgacaatggtgacattgtggttggtgcgagtgatggcattattagagtgtttacagaatcagaagatcgaacagcaagtgctgaagaaatcaaggcttttgaaaaagaactgtctcacgcaaccattgattctaaaactggcgatttaggggacatcaatgctgagcagcttcctgggagggaacatcttaatgaacctggtactagagaaggacagactcgtctaatcagagatggggagaaagtcgaagcctatcagtggagtgttagtgaagggaggtggataaaaattggtgatgttgttggctcatctggtgctaatcagcaaacatctggaaaagttttatatgaagggaaagaatttgattatgttttctcaattgatgtcaatgaaggtggaccatcatataaattgccatataataccagtgatgacccttggttaactgcatacaacttcttacagaagaatgatttgaatcctatgtttctggatcaagtagctaaatttattattgataacacaaaaggtcaaatgttgggacttgggaatcccagcttttcagatccatttacaggtggtggtcggtatgttccgggctcttcgggatcttctaacacactacccacagcagatccttttacaggtgctggtcgttatgtaccaggttctgcaagtatgggaactaccatgaccggagttgatccatttacagggaatagtgcctaccgatcagctgcatct

SEQ ID NO: 17175 - protein, 528 aa, Homo sapiens
MTSGATRYRLSCSLRGHELDVRGLVCCAYPPGAFVSVSRDRTTRLWAPDSPNRSFTEMHCMSGHSNFVSCVCIIPSSDIYPHGLIATGGNDHNICIFSLDSPMPLYILKGHKNTVCSLSSGKFGTLLSGSWDTTAKVWLNDKCMMTLQGHTAAVWAVKILPEQGLMLTGSADKTVKLWKAGRCERTFSGHEDCVRGLAILSETEFLSCANDASIRRWQITGECLEVYYGHTNYIYSISVFPNCRDFVTTAEDRSLRIWKHGECAQTIRLPAQSIWCCCVLDNGDIVVGASDGIIRVFTESEDRTASAEEIKAFEKELSHATIDSKTGDLGDINAEQLPGREHLNEPGTREGQTRLIRDGEKVEAYQWSVSEGRWIKIGDVVGSSGANQQTSGKVLYEGKEFDYVFSIDVNEGGPSYKLPYNTSDDPWLTAYNFLQKNDLNPMFLDQVAKFIIDNTKGQMLGLGNPSFSDPFTGGGRYVPGSSGSSNTLPTADPFTGAGRYVPGSASMGTTMTGVDPFTGNSAYRSAAS

SEQ ID NO: 17176 - DNA, 1317 bp, Homo sapiens
  CDS (67)..(930)
tttgcaggctgctgggctggggctaagggctgctcagtttccttcagcggggcactgggaagcgccatggcactgcagggcatctcggtcatggagctgtccggcctggccccgggcccgttctgtgctatggtcctggctgacttcggggcgcgtgtggtacgcgtggaccggcccggctcccgctacgacgtgagccgcttgggccggggcaagcgctcgctagtgctggacctgaagcagccgcggggagccgccgtgctgcggcgtctgtgcaagcggtcggatgtgctgctggagcccttccgccgcggtgtcatggagaaactccagctgggcccagagattctgcagcgggaaaatccaaggcttatttatgccaggctgagtggatttgggcagtcaggaagcttctgccggttagctggccacgatatcaactatttggctttgtcaggtgttctctcaaaaattggcagaagtggtgagaatccgtatgccccgctgaatctcctggctgactttgctggtggtggccttatgtgtgcactgggcattataatggctctttttgaccgcacacgcactgacaagggtcaggtcattgatgcaaatatggtggaaggaacagcatatttaagttcttttctgtggaaaactcagaaatcgagtctgtgggaagcacctcgaggacagaacatgttggatggtggagcacctttctatacgacttacaggacagcagatggggaattcatggctgttggagcaatagaaccccagttctacgagctgctgatcaaaggtctgggagaactgatcttgctgaaaatacaacaggaagcagtatcgtgccaggcaaggcaaaccctcgtcagtgtgaagcaatggccatcgttgcagcccaagtcatggggttttgtgtggcagtaaccgttggaggcggcaatggccattttgagttggatgttttcaagccaatgatgattaaaaatttatgttacactcaggctgctgggggatgcttcagtttccttcacagaaaactaaatagtgggaatccggaccaataaagaaaggatcaagaagctaatgaattagtcgctaatgctggtgacagctctcaaccctcatatagggtatgacaaaacagcagaattgctaagacaacaccccaaaatggatcaaccttaaaggaaactgccgttgaacttggctctctcacagcagagcagtttgatgaatgggtaaaacctaaggacatgctgggtccaaagtgacttaaataagttttaatgaaaataaacgtgtaaaatt

SEQ ID NO: 17177 - protein, 288 aa, Homo sapiens [sequence omitted]

SEQ ID NO: 17178 - DNA, 1829 bp, Homo sapiens
  CDS (373)..(1701)
atttttcccgctcagccctggagcgcgtagctctaccaagaatggccactgtgccagatgcccctgaccagcgttgcccatttgaatttcctagcaggccccccaaagtaggtatttcagtaccctgttagagctgaggcgcaggtaaaatgactggcccaggccggtcccaccccgtaaggatttgaacgttggctccacaactcgggagcctgcgcctttcctcctcccaacgtggactcctgcccggcgaagtgcctcacttccttctcccgggagtcatcaagctttggtgtatgtgttggccggttctgaagtcttgaagaagctctgctgaggaagaccaaagcagcactcgttgccaattagggaatggaccgtttgggttcctttagcaatgatccctctgataagccaccttgccgaggctgctcctcctacctcatggagccttatatcaagtgtgctgaatgtgggccacctccttttttcctctgcttgcagtgtttcactcgaggctttgagtacaagaaacatcaaagcgatcatacttatgaaataatgacttcagattttcctgtccttgatcccagctggactgctcaagaagaaatggcccttttagaagctgtgatggactgtggctttggaaattggcaggatgtagccaatcaaatgtgcaccaagaccaaggaggagtgtgagaagcactatgtgaagcatttcatcaataaccctctgtttgcatctaccctgctgaacctgaaacaagcagaggaagcaaaaactgctgacacagccattccatttcactctacagatgaccctccccgacctacctttgactccttgctttctcgggacatggccgggtacatgccagctcgagcagatttcattgaggaatttgacaattatgcagaatgggacttgagagacattgattttgttgaagatgactcggacattttacatgctctgaagatggctgtggtagatatctatcattccaggttaaaggagagacaaagacgaaaaaaaattataagagaccatggattaatcaaccttagaaagtttcaattaatggaacggcggtatcccaaggaggtccaggacctgtatgaaacaatgaggcgatttgcaagaattgtggggccagtggaacatgacaaattcattgaaagccatgcattggaatttgaactccgaagggaaatcaagaggctccaagaatacaggacagcaggcattaccaatttttgtagtgccagaacctacgatcacctcaagaagacacgggaggaagagcgccttaaacgcactatgctctcagaagttctccagtatatccaggacagtagtgcttgccagcagtggctccgccggcaagctgacattgattccggcctgagtccttccattccaatggcttcgaattcaggtagacggagtgcaccacccttgaacctcactggcctccctggcacagagaagctgaatgaaaaagaaaaggagctctgtcagatggtgaggttggtccctggagcctatttagaatacaaatctgctctattgaacgaatgtaacaagcaaggaggcttaagactggcgcaggcaagagcactcatcaagatagatgtgaacaaaacccggaaaatctatgatttcctcatcagagaaggatacatcactaaaggctaaggctccaagagcttgggctcagaagtcagaagtttggaatgtggtgggtcaaaggacaatatgggtgggcattctggagagttgtttttcagctgaattctcatggtgaaaacaggggaaaggac

SEQ ID NO: 17179 - protein, 443 aa, Homo sapiens [sequence omitted]

SEQ ID NO: 17180 - DNA, 2512 bp, Homo sapiens
  CDS (95)..(1573)
ctcttctctaagctgcacagcctgaatagaagggctggtccagcggcggcggaggctggcgctgtcctgagagggagggctctgtgcggaagagatgaatcggacaaagggtgatgaggaggagtattggaacagctccaagttcaaggcttttacctttgacgatgaagacgatgagctttcacagttaaaggagtccaagcgggcggtgaacagcctccgagacttcgtggatgatgatgacgatgatgacctggagcgagtcagctggagtggggaacctgtgggaagtatctcatggtccatcagagagactgctggtaatagcggctcaacccacgaggggcgtgaacagctaaagagccgaaacagcttctcctcctatgcacaactacccaagcctacttctacctactccctgagcagcttttttagaggtagaactagacctggaagtttccagtccctttctgatgctctgtcagacacacctgccaaaagctatgctccagagctggggagacccaaaggggagtatagggattacagcaatgactggagccccagtgatacagtgcgacgtctccggaagggcaaggtttgctcactagagagattccgctccttacaggacaaactacaactcctagaagaggcagtaagcatgcatgatggaaacgtcattactgcagttctgattttcctgaagaggacactgagcaaagagatcctcttccgagagctggaggtgcgacaggttgccctgagacatcttattcacttccttaaggaaataggggatcaaaagttgcttttagacctcttcaggttcctagatagaacagaagagcttgcgctatctcattatcgagagcatttgaacattcaggaccctgacaaacgaaaagaatttcttaaaacctgtgttggttcgccattttcagcagaagattccgcacacatacaggaccattacacgctcctggaacgtcagatcattattgaggcaaatgatcgccatctagaatcagcaggacagactgagatcttccgaaagcacccccgcaaagcctccatcctcaacatgccactagtgacaacacttttctactcctgcttctatcactacacagaggctgaggggacattcagcagtcccgtcaacctgaagaagacatttaagatcccagataaacagtatgtgctgacagccctggctgctcgtgccaagcttcgagcctggaatgatgtagatgccctattcaccacaaagaactggctgggctataccaagaagagagcacccattggcttccatcgggttgtcgaaattttgcacaagaacaatgcccctgtgcagatattacaggagtatgtcaatctggtggaagatgtggacacgaagttgaacttagccactaagttcaagtgccatgatgtcgtcattgatacctaccgggacctgaaggatcgtcaacagttgctagcatacaggagtaaggtagataaaggatcagcagaggaggagaagattgatgctcttctcagcagctcgcaaattcgatggaagaattaagtggcattgactaccttgaagcctgcctcatttcctcctctcctgcctgtgaaagcagagagagctcttctttgggagagctgcggcatcacatcgcttgggcccattacccatgggcagtgccagctactcttgacacagataacttcagactgatcttctgtccaaggaacatcatctgaggatcgagatctaaagctttgagtcatgagaatgattctctccacctggtgctcatatgaaggtgggagtgatttctagattgggcccctaccgggtaagatctcacttggtctgagaaaagtgactgctccagaaaggaagaggtatgggagtcatagggtggctactgcattccactcagctaattatgatccaggacttggcgctggacattggcagttctgctctgaatgaagtcagaacagaaccaaaatggcctcaggaaggaatgccagtgtttcccaagacctcctggagatgcactcacaccagactgcacagacccctccacattatgccacacacggcctagacgttgtgtttcctcggccattttccctctgctgccccagtttactctgtccaaaaccctaaggttcttctctcacttgaacacagacgaccttgcttgggtgatgagacatcccctttatctcttcctctactgctggccaagacccgtcactttataagaagctcagatgcagcagtgctggagagctctctctttatgcaaaaatctcatttcaccaggagctttcagaagtttcacctgggctaaattcagcagcatttctgttaggatatttagatggaggttttattttcacacttggattcttgctctgtaccaatatttgcctccttttctgtgactgaactgggtttttctgacatgcctagactcctaataaaggtatttcttccttggtg

SEQ ID NO: 17181 - protein, 493 aa, Homo sapiens
MNRTKGDEEEYWNSSKFKAFTFDDEDDELSQLKESKRAVNSLRDFVDDDDDDDLERVSWSGEPVGSISWSIRETAGNSGSTHEGREQLKSRNSFSSYAQLPKPTSTYSLSSFFRGRTRPGSFQSLSDALSDTPAKSYAPELGRPKGEYRDYSNDWSPSDTVRRLRKGKVCSLERFRSLQDKLQLLEEAVSMHDGNVITAVLIFLKRTLSKEILFRELEVRQVALRHLIHFLKEIGDQKLLLDLFRFLDRTEELALSHYREHLNIQDPDKRKEFLKTCVGSPFSAEDSAHIQDHYTLLERQIIIEANDRHLESAGQTEIFRKHPRKASILNMPLVTTLFYSCFYHYTEAEGTFSSPVNLKKTFKIPDKQYVLTALAARAKLRAWNDVDALFTTKNWLGYTKKRAPIGFHRVVEILHKNNAPVQILQEYVNLVEDVDTKLNLATKFKCHDVVIDTYRDLKDRQQLLAYRSKVDKGSAEEEKIDALLSSSQIRWKN

SEQ ID NO: 17182 - DNA, 2411 bp, Homo sapiens
accattccatgacttcccaccgcgccctcgctcctacctccccacacctctctctcagtccccaggaacacacagaggtgcacatcacattcccttgtccacactgcccgcctctcccacatgccacccccttccctgtccttccccaactccccagctccaagagtggaagaaatccccaagatcatctgggtctccctctccacacccagaactgaggcttggatatcttcttcaacatccttgccaagacttctccaccctctcgcatacctccagggacagagagcttactacctcccaaggcagcctcctacctttggactgctctgactttagcatcagcttaatacacagaagaggtttctgtttttctgtggctctgtccatggcatcccacttgcccactctccttcctggagtgttgaggtcacacattgactcccctgagccctcttctctccaggctaaagaatcccgaaggcatcgaggccatttctgctgcaacaaggtttcctgtctcttcactgtccgcacatttcttagtattccctccaggcttgggcagggagactcgcagatgcacacccacaagtattcagttctcaaactctagacgagtgttggcaactggattgcaagatgctcctaccctgatagatcaggggtggctgctggaggctgtgctggggatctgaggtttggtctgggctcagtgggagatggcagtgcaatcctgatgagtgatgtctgccaggcaccgtaagtttgattagtgatgtctgccacgggcagggatggaaggagcagtgtgatgtctgctctcttctctcccctctgtccctcttcaggaagaaagagctcattctgtctcacaagccaccggcatcctgtatcagcttccagcctcccctcaggctttccagtcaccagggacactcggagccacagcctagagccccgtgttccccggcctgtgcgtctgcccccctctgagatgcagccagaagctctgtgcctgctgcaaagattcaggtggaccctcctctaatctcctcctgctgtgcccgccagtccttgccctcccaccaggtctctgagctcagtcttaccaaattcgccctttaacagcttgctctggcaaccccataaatgacacctgagctccgtagaagctaagctcctgagacccagggggacctgccactggtaccgcggcccagcctggggcctgggggctgcccctcttgaaccacccacatgcttagccccagctttttggaagaggcaaatggctggtctgaggatgacacacaaaaacaaaaacaaaaaacaaaaaacccatgctgggcaggactgaggcaaattgcacagctttatggctctaatccaggggcatcccaggcttctggggcccacagaagtcagagggaggacccaagagaaagggctggtcatgaagggaaatctggctaaggtgggttcaagggcagacacaagactgcccctcagcagctttctacaaatgtgccaaggaaccctcaatcagccctgattcagctcgccagccagccactggccaccctcttaggctggaaagggaagacaggcagtttctgctcctgttggcattcgctcaggctggtagctatttgcaagactgcctgaggccattccttggaggcaaggcaaagaaagctcagcccaaatcaggcttgagcctccctccagagcacagggagaaacagggtttagctggcttggtccagatacaacccacagcaggttctggtggtggctggggttgtgggggaggggtgggcagggatacctctttgtttcttttcaccccgaaatacaacagcccataacagagacttcctcggaccccactaacagggcaaggaacaagaagactacaccgctcatcacaaaccctgcctgtatcgaaagccactttcctgctctgaagctactgcctcttagagaaagggaatagctctttatgggctgggggtgagggcccctccccagggtccctgttaatttctggccttggtgctcaggcctgtccacagcctcccttgtctatgtctctatccatgcttaaggggcccggacaggatttcccaaaccagccgaggccccagcacccgccgtctccccagaagccccctcctccttcccccatgggtcatatgttgaaagtctattttaaaaactatgttccttgccgtagattgcagagctaatttatcacgtttctctcctgtgagaccccccttttatatgatatatccagaggaagttttgtaatataaaacaggacgcccacactgatggttttgcactggtttttgtgaatgtttcttacaaaaagaaaaaggaacaaagaataaatagtgaccgtg

SEQ ID NO: 17183 - DNA, 2162 bp, Homo sapiens
  CDS (92)..(649)
ttttttgccttcctcctcgtcctttagccgggagcctgtctttgcttgcctttgcctttgaggctctgtggctgtggggctgagtggcatcatggcggctcagaaagatctctgggacgccattgtgattggggcggggatccagggctgcttcactgcataccacctggccaaacacaggaagaggatcctcctgctggagcagttctttctaccacactcccgaggaagctcccatggacaaagccggataatccgaaaggcgtacctggaagacttttacacccggatgatgcatgagtgctatcagatatgggcccagctggagcacgaggctggaacccaattgcacaggcagactggattactgctgctgggaatgaaagagaatcaagaattaaagacaatccaggccaatctgtcgaggcagagggtagaacaccagtgtctttcatctgaggaactgaagcaacgtttcccaaatattcggttgcccaggggagaagtggggctcttggacaattccggaggagttatctatgcatataaggccctcagagccctgcaggatgcaattcgacagctaggaggcatagtgcgtgacggagagaaggtggtggagataaacccagggctactggtcacggtgtaaaccacctccaggagctaccaagctaagagcttggtcatcacagcaggtccttggaccaaccagctcctccgtcccctgggcattgagatgcctctccagaccctgcggatcaacgtgtgttactggcgagagatggttcctgggagctatggtgtgtcccaggcctttccgtgcttcctgtggctgggcttgtgtccccaccacatctacggactgcccacaggagagtacccagggctgatgaaggtcagctatcaccacggcaaccacgcagaccctgaggagcgggactgccccacagcacgcacagacatcggagacgtccagatcctgagcagctttgtcagagatcacttacctgatctgaagcccgagcctgctgtcattgagagctgcatgtacacgaatacccctgatgagcagttcattctcgatcgccacccaaagtatgacaacattgtcattggtgctggattctctgggcacgggttcaagctggcccctgtggtggggaagatcctgtatgaattaagcatgaaattaacaccatcttatgacttggcaccttttcgaatcagccgtttcccaagcctgggcaaagcccacctttgacctctggccagaagcctcccttctgtgcacaggagccagtttcacagatggagaagatgtctcagatgaagggagtgtccctgagatatcatccttttcttctgcctcgcctgaatcccccataaacaccagatgattgagtctaccttctttccttggcccgctccctttttcttctgcctcacttgaatcccccgtaaacaccagacgattgagtctaccttcttttcttggccacctccccattcacaactactttctcgctcccagaaggttgatcagatattctacaatcacagagtagcaaggacgtttgagatgggtatatcagtaagaagagggcacaagaactggctctggagaccaaagcagttgttaaaaattctctttgctgggggccgggtgtggtggctcacacctgtaatctcggcactttggggggctgagacaggcggatcacctgaggccaggaattcaagaccagcctggccaacatggtgaaaccctatctccactaaaaatacaaaattagctgggtgtggtggcgcatgcctgtaatcccagctacttgggagactgaggcaagagaatcacttgaacccgggaggtggaggtggcagtgagccgagattgcgccattgcactccagcctgggcaaaaagagtgagactctgtctcaaaaaaaaaaaaacaaaacaaaaaaaacctctttgctggtatatttgaagagcttgggatggatttgactaaatctgccccgaggagggtgaacaaggtgatctcagagatcactactgctcttggagttccttctcctaaagctaaggccagcctccatcacaaatgcccataaaatctggctcgtctttgatgaacaataaatatttgttgaacaaat

SEQ ID NO: 17184 - protein, 186 aa, Homo sapiens
MAAQKDLWDAIVIGAGIQGCFTAYHLAKHRKRILLLEQFFLPHSRGSSHGQSRIIRKAYLEDFYTRMMHECYQIWAQLEHEAGTQLHRQTGLLLLGMKENQELKTIQANLSRQRVEHQCLSSEELKQRFPNIRLPRGEVGLLDNSGGVIYAYKALRALQDAIRQLGGIVRDGEKVVEINPGLLVTV

SEQ ID NO: 17185 - DNA, 1855 bp, Homo sapiens
  CDS (15)..(1655)
aactgagcagcgccatggaggactctgaagcactgggcttcgaacacatgggcctcgatccccggctccttcaggctgtcaccgatctgggctggtcgcgacctacgctgatccaggagaaggccatcccactggccctagaagggaaggacctcctggctcgggcccgcacgggctccgggaagacggccgcttatgctattccgatgctgcagctgttgctccataggaaggcgacaggtccggtggtagaacaggcagtgagaggccttgttcttgttcctaccaaggagctggcacggcaagcacagtccatgattcagcagctggctacctactgtgctcgggatgtccgagtggccaatgtctcagctgctgaagactcagtctctcagagagctgtgctgatggagaagccagatgtggtagtagggaccccatctcgcacattaagccacttgcagcaagacagcctgaaacttcgtgactccctggagcttttggtggtggacgaagctgaccttcttttttcctttggctttgaagaagagctcaagagtctcctctgtcacttgccccggatttaccaggcttttctcatgtcagctacttttaacgaggacgtacaagcactcaaggagctgatattacataacccggttacccttaagttacaggagtcccagctgcctgggccagaccagttacagcagtttcaggtggtctgtgagactgaggaagacaaattcctcctgctgtatgccctgctcaagctgtcattgattcggggcaagtctctgctctttgtcaacactctagaacggagttaccggctacgcctgttcttggaacagttcagcatccccacctgtgtgctcaatggagagcttccactgcgctccaggtgccacatcatctcacagttcaaccaaggcttctacgactgtgtcatagcaactgatgctgaagtcctgggggccccagtcaagggcaagcgtcggggccgagggcccaaaggggacaaggcctctgatccggaagcaggtgtggcccggggcatagacttccaccatgtgtctgctgtgctcaactttgatcttcccccaacccctgaggcctacatccatcgagctggcaggacagcacgcgctaacaacccaggcatagtcttaacctttgtgcttcccacggagcagttccacttaggcaagattgaggagcttctcagtggagagaacaggggccccattctgctcccctaccagttccggatggaggagatcgagggcttccgctatcgctgcagggatgccatgcgctcagtgactaagcaggccattcgggaggcaagattgaaggagatcaaggaagagcttctgcattctgagaagcttaagacatactttgaggacaaccctagggacctccagctgctgcggcatgacctacctttgcaccccgcagtggtgaagccccacctgggccatgttcctgactacctggttcctcctgctctccgtggcctggtacgccctcacaagaagcggaagaagctgtcttcctcttgtaggaaggccaagagagcaaagtcccagaacccactgcgcagcttcaagcacaaaggaaagaaattcagacccacagccaagccctcctgaggttgttgggcctctctggagctgagcacattgtggagcacaggcttacacccttcgtggacaggcgaggctctggtgcttactgcacagcctgaacagacagttctggggccggcagtgctgggccctttagctccttggcacttccaagctggcatcttgccccttgacaacagaataaaaattttagctgcccc

SEQ ID NO: 17186 - protein, 547 aa, Homo sapiens [sequence omitted]

SEQ ID NO: 17187 - DNA, 3310 bp, Homo sapiens
  CDS (31)..(2142)
aaaaaaaaagctccccgccccgccgcggccatggaggacgagcggaaaaacggagcctacggaacgccacagaagtatgatcccactttcaaaggacccatttacaataggggctgcacggatatcatatgctgtgtgttcctgctcctggccattgtgggctacgtggctgtaggcatcatagcctggactcatggagaccctcgaaaggtgatctaccccactgatagccggggcgagttctgcgggcagaagggcacaaaaaacgagaacaaaccctatctgttttatttcaacactgtgaaatgtgccagccccctggttctgctggaattccaatgtcccactccccagatctgcgtggaaaaatgccccgaccgctacctcacgtacctgaatgctcgcagctcccgggactttgagtactataagcagttctgtgttcctggcttcaagaacaataaaggagtggctgaggtgcttcgagatggtgactgccctgctgtcctcatccccagcaaacccttggcccggagatgcttccccgctatccacgcctacaagggtgtcctgatggtgggcaatgagacgacctatgaggatgggcatggctcccggaaaaacatcacagacctggtggagggcgccaagaaagccaatggagtcctagaggcgcggcaactcgccatgcgcatatttgaagattacaccgtctcttggtactggattatcataggcctggtcattgccatggcgatgagcctcctgttcatcatcctgcttcgcttcctggctggtattatggtctgggtgatgatcatcatggtgattctggtgctgggctacggaatatttcactgctacatggagtactcccgactgcgtggtgaggccggctctgatgtctctttggtggacctcggctttcagacggatttccgggtgtacctgcacttacggcagacctggttggcctttatgatcattctgagtatccttgaagtcattatcatcttgctgctcatctttctccggaagagaattctcatcgcgattgcactcatcaaagaagccagcagggctgtgggatacgtcatgtgctccttgctctacccactggtcaccttcttcttgctgtgcctctgcatcgcctactgggccagcactgctgtcttcctgtccacttccaacgaagcggtctataagatctttgatgacagcccctgcccatttactgcgaaaacctgcaacccagagaccttcccctcctccaatgagtcccgccaatgccccaatgcccgttgccagttcgccttctacggtggtgagtcgggctaccaccgggccctgctgggcctgcagatcttcaatgccttcatgttcttctggttggccaacttcgtgctggcgctgggccaggtcacgctggccggggcctttgcctcctactactgggccctgcgcaagccggacgacctgccggccttcccgctcttctctgcctttggccgggcgctcaggtaccacacaggctccctggcctttggcgcgctcatcctggccattgtgcagatcatccgtgtgatactcgagtacctggatcagcggctgaaagctgcagagaacaagtttgccaagtgcctcatgacctgtctcaaatgctgcttctggtgcctggagaagttcatcaaattccttaataggaatgcctacatcatgattgccatctacggcaccaatttctgcacctcggccaggaatgccttcttcctgctcatgagaaacatcatcagagtggctgtcctggataaagttactgacttcctcttcctgttgggcaaacttctgatcgttggtagtgtggggatcctggctttcttcttcttcacccaccgtatcaggatcgtgcaggatacagcaccacccctcaattattactgggttcctatactgacggtgatcgttggctcctacttgattgcacacggtttcttcagcgtctatggcatgtgtgtggacacgctgttcctctgcttcttggaggacctggagaggaatgacggctcggccgagaggccttacttcatgtcttccaccctcaagaaactcttgaacaagaccaacaagaaggcagcggagtcctgaaggccccgtgctccccacctctcaaggagtctcatgccgcagggtgctcagtagctgggtctgttcccccagccccttgggctcacctgaagtcctatcactgccgctctgcccctccccatgagccagatcccaccagtttctggacgtggagagtctggggcatctccttcttatgccaaggggcgcttggagttttcatggctgcccctccagactgcgagaaacaagtaaaaacccattggggcctcttgatgtctgggatggcacgtggcccgacctccacaagctccctcatgcttcctgtcccccgcttacacgacaacgggccagaccacgggaaggacggtgtttgtgtctgagggagctgctggccacagtgaacacccacgtttattcctgcctgctccggccaggactgaaccccttctccacacctgaacagttggctcaagggccaccagaagcatttctttattattattattttttaacctggacatgcattaaagggtctattagctttctttccgtctgtctcaacagctgagatggggccgccaaggagtgccttccttttgctccctcctagctgggagtgacgggtgggagtgtgtgtgcccaggtgggggtgtctcctggctgggaaggagggaaagggagggagagttttgcgggggttggcagtggagagcaggctggagaggagatggctaatagctgtttaatggaaacctgctgggctggagggagttaggctgaatttcccgacttcctctgccagttattgacacagctctctttgtaagagaggaaagaaactaaacccacccaagggatgatttcagggggagaggtggagggcagatgtcctgggcaaaccgggcccctctgcccacacacctcacttgatccttttgccaaacttgtcaaactcaggggaactggcttcccagttgcccctttgccatattccaagtccccctcagacttcatgtctctgctcatcagcactgtcccaggatcctggagagggagaacccctggccccaggggaaagaggggggggtctcccgtttcctgtgcctgcaccagccctgcccccattgcgtctgcacacccctgcgtgtaactgcattccaaccactaataaagtgcctattgt

SEQ ID NO: 17188 - protein, 704 aa, Homo sapiens [sequence omitted]

SEQ ID NO: 17189 - DNA, 2334 bp, Homo sapiens
aaagtgtgatgagaggtcaggggaacatcccagtaaaagagaagagtcacaggaagctcatctcctccctggattctggattaggagcttctgaatcttttccagggataggcaggtagctcactcttggtgcaatttcttgaggatgggaacatgtagagctgctggaaggagtaattctgtgcttgacaaaggacgatttctcctttatcgtgaccagtgctgccgatttcctgacagaggagcttacactctgagcaccttgttttagcgaactctagcaaaacttgtttagcttagcaaaaacaaacacacaaaaaactgagaactctgctgtttcagatatgccataacatacatctgaaacacatgtgtaacaatcaaaatggtgggctctagaatggttttggagctcgagatcttcatgggttagacttgctggtcagacccaggagcacctgtggctcacaccttctgttcccctcctggcctgtgcagaatgtaaacagcagactcatactcaatgggcactacaggccttatcagacgttttatacaagcctggattgcttagtaggggaataaggcattctctgagggggctttccacttagattgagaattttatttgaaaagaatctggtttaaatggcattgtggtccgaggtagctgctctccccactgagagctgagccgaaatataagaataatatatttgtgcttcgagttggtgtttctttcagtgtaatgcatgcagtggtcacaacccagttactcataatatttggattgtatttgttcgtagatatgcccagaagactagagaattagtgttatataccatatagaacttactgtcagtcaactataaacaggcccaattaaaaactgttccattactacgcaaacacatattagaggcctttgctgatgacacattagctggatcttagccaccccagaaagggtttgatttgaagctgattgttgccagatatgcatattggaatcccatctacccatagttcctctgaaggtgattttgtaatttgcaaaagggtataggaaaatatacctaaaagcgaatttgtggctgagaggataaacagaagctgtttgctcatgttctgtgccccacacccaccaatacctaaatctgttaaggaagacagaaaatgttttctttgtgctcattgagtagttccagacagaagaagaatatactctttaaaatgtatttacctgttagttggaagtacccagaattatcagaaacgaatgcaaaaaaaaaaaaaaaaaaaaagcttacacagcttcttagcaattttttttttttttgccgaaacaataaattgcctttagcagcagtttaaaatcctatcgtgaacaacctatattttcgccattttacaatggagagttgtgacaagtacaggttatcaagtttgcacttaactatgccaaaaaaagtttgaagcgctctattctcagacatgctgtattattacttctcattcaagattgaaaaatataaaggtatccaaactctgtcttaatgtaaatgtaactatttttccttcaagtgttgactagggagtcggtttctctcttaaagacactcactgtacaactgaaagcagctgtcatatttctggcaaaatgtgtttacgtatctgacaagttgtacatttgtgtatgaactgacataaaatgtgaaagcctgtaagtgtacatgtagtggtgtggtgttctgtctagaggatacaactgaatgtttttaatttgctgacttacagacacaggctgtttacaaaatgctagctggaaagtctgtaatgttcatgtcataacttttagttaattgccattgagcacctgttctgaggaggtgagatgtggacttgtgcttataaactggagagtttagtcataatccctcctggctttgtgtgaatagcttgctcactttgctggcctttgaaatgtgtcctccgtgataagctatccatgtgtttgtgataagagtgcttgtcaaccatgaccatctttgagccttcctagtcctccacctggcacagtatttgaaatggcaaaggatgtgcttcatcctctaacaaacagtgtacactcccagagctgatattctggattgtgactgtgcacatttcctctagttcatgtctgtagtccctatagaatgatctgtaataaaatagtatactggactgtgcatcaaagggatgtaaaattacagtattccaaaggttgaagttctgctgttttgttataatgcctgatacacatcttgaataaagtcttaacatttttctttt

SEQ ID NO: 17190 - DNA, 1892 bp, Homo sapiens
  CDS (215)..(1330)
agagaactgccgcttgccgccattgacacgcacagatagaacccaaagaaaggcaaagagtcctgcccggcgccggcgccgcgtgggccaaacctgcgcccgtggaggggcgcgcagagggcaccgggcgccgggagcaggcggcgcagcaccagcattgtgttagtgccgggaggccactgtgtcagcaagctgagagggaaactgaagcaagatgtcgggccggagtgggaagaagaaaatgtccaagctgtcccgttcagctagggcaggtgtcatctttccagtggggaggctgatgcgttatctgaagaaagggacgttcaagtaccggatcagcgtgggcgcccctgtctacatggcggcagtcattgagtacctggcagcggaaattctagaattggccggcaatgccgcgagggacaacaagaaggcccggatagccccgagacacatcttgctggcagttgccaatgacgaggagctcaaccagctgctaaaaggagtgaccatcgccagtggaggcgtcctgcccagaattcaccccgaactgctggccaaaaagcgagggaccaaaggcaagtcggaaacgatcctctccccacccccagagaaaagaggcaggaaggccacgtcaggcaagaagggggggaagaaatccaaggctgccaaaccacggacgtccaaaaagtccaaaccaaaggacagcgataaagaaggaacttcaaattccacctctgaagatgggccaggggatggattcaccattctgtcttctaagagccttgttctgggacagaagctgtccttaacccagagtgacatcagccatattggctccatgagagtggagggcattgtccacccaaccacagccgaaattgacctcaaagaagatataggtaaagccttggaaaaggctgggggaaaagagttcttggaaacggtaaaggagcttcgcaaatcccaaggccctttggaagtcgccgaagccgccgtcagccaatccagtggactcgcagccaaatttgtcatccactgtcacatccctcagtggggctccgacaaatgtgaagaacagcttgaagagaccatcaaaaactgcctgtcagcggcggaggacaagaagctaaagtccgtcgcgttcccgcctttccccagcggcagaaactgctttcccaaacagactgcggcccaggtgaccctcaaagccatctcagcccactttgatgactcgagcgcgtcctcgctgaagaacgtgtacttcctgctcttcgacagcgagagcatcggcatctacgtgcaggagatggccaagctcgacgccaagtagccgccgcactttccagcagggatcggaggacgacccgagtcccaagagtggggttttgctttttaaaaggagagaggaggggtgatggcaggggagtggagggtggccgggcaggtcctgccggcgcagggagccctctgcccttcacactctcctccaaaagagcctccatctgtaaggaagcaggtctccgcgaggggtttctttccatgtgttttcctcctgttgttttagaacttttttaaaaaaacagacctcgttttagatttatagcattgacttttacacacattcacacaagaaaaaaatcctttcaaaattcttaaatcttctgttcctcctttttccaagggaagagggcaaaaagtggcctgggctctgttggtgtgcgtgttccgtggcggagagaagaaaatgggaaagacatctcactggtgcttttctcttttgttttagtgccccccgcccccatccctataatatctgtaactactcctaaaaaggttttgattcaggcttttttttggtttcattttgtttttttaagaaaaagaaaatg

SEQ ID NO: 17191 - protein, 372 aa, Homo sapiens
MSGRSGKKKMSKLSRSARAGVIFPVGRLMRYLKKGTFKYRISVGAPVYMAAVIEYLAAEILELAGNAARDNKKARIAPRHILLAVANDEELNQLLKGVTIASGGVLPRIHPELLAKKRGTKGKSETILSPPPEKRGRKATSGKKGGKKSKAAKPRTSKKSKPKDSDKEGTSNSTSEDGPGDGFTILSSKSLVLGQKLSLTQSDISHIGSMRVEGIVHPTTAEIDLKEDIGKALEKAGGKEFLETVKELRKSQGPLEVAEAAVSQSSGLAAKFVIHCHIPQWGSDKCEEQLEETIKNCLSAAEDKKLKSVAFPPFPSGRNCFPKQTAAQVTLKAISAHFDDSSASSLKNVYFLLFDSESIGIYVQEMAKLDAK

SEQ ID NO: 17192 - DNA, 2562 bp, Homo sapiens
gttgtgccatgctgctctgtcatgtttggtacgtgaatcgtccctttgtgcagcctatctatgctatgtgggctacctgcccgttagtagtcacctagggtatccaatcagctgtcctgatatcagagtgcctgtgttcaagtaactcttattttgctcagtggccccagattgcaagagtagtgatgctggcatgtcataatagttctattttagtatttgttattattgttgatctgttactatgcctagctcataaattaaactttctcataagtatgtatgtatagggaaaaaaacaacatatatatgggtttcggttctatctacggtttcaggcatccactggggtcttggaatgtatcctccaaggataaggaaggactagtgtattccccacacccctccctcttgctaccttttgctgcttttctttaatcaccctctcctcctgtggcctgtttctatatacttggcattctgtttgctttctttgttttgtcaatcacttcctttcttctctgcccaaaccctggttgcaggtggcaatggctacatcaatgactttcccatgggccgctttcttcgagatgccaagctgtatgagataggggctgggaccagcgaggtgaggcggctggtcatcggcagagccttcaatgcagactttcactagtcctgagacccttcgcccccttttcctgcacctagtggcctttcttgggaagtagagatgtggcggctttcccaccctgcccacagcaggccctcctgcccagctgctcttgtcagccctctggcctctggatgaggttgagttctccacaacagctcccaagcatcatgggcctcgcagccgggcctgtgccacggctagtgttgtgtgatttaaaatggactcagcaggaagcatattgtctggggattgttgggacaagttttggtgactctgtgcccttgctctctaacttctgagcccacctcccagggtaggcacctgggggcatgcaggtgcccacctcccagggtaggcacctgggggcatgcaggtacccacctctttctcttgggtgaggctctggcaaggagatctctctgctcaagcacagcagaatcatggcccctctccatgaattggaacttggtacaggttaagtatccctaatcctgaaatctgaaacacttgtggttccaagcattttggataaggcaaattcaactttcagtctcttttctgggggaaaaaaataataaacctagcctagccaggcgtggtggctcatgcttgtaatcccagcacttcaggaggctgagatgggtggatcacctgaggtcaggagttcaagaccagcctggccaacatgtggaaacctcgcctcaactaaaaatagaaaaaaattagttgggcatggtggtgggcacctgtaatcccagctacttcaggaggctgaggcaggagaattacttgaacccaggaggcggaggttgcagtgagccgagcttgtgccattgcactccagcctgggcgacaagggcaaaactcttcaaaaaacaaaacaaaacaaaaaaaccctggcccttgtttcttccagtttctagaggtatcagctcctagcagcttatgaacacatatgcttgcttggccaggcaaggtggtgtgtgcctgtaatcccagcactttgggaggccaaggcaggtggatcacttgcagtcaggagttcaagaccagcctgtccaacgtggtgaaaccccatctctactaaaaatacaaaaattagccaggggtggtggtgcacgtctgtaatcccagctactcaggaggctgaggcaggagaatcacttgaacccgggaggtggaggttgcaatgagccaatatgacaccgctgcagtccagcctgggccatagagtgagactctgtctcaaaaaaggaaagaaaaataggctgggcacagtgactcatgcctgtaatcccaacactttgggaggccgaggcaggtggatcacgaggtcaggagttcaagaccagcctggccaagatggtaaaacctcgtctctactaaaaatacaaaaattagccaggtgtggtggcaggctcctgtaatcccagttacacagaagactgaggcaggagaatcgcttgaacgcaggaggcagaggttgcaggagctgagatcgcgccattgcactccagcctgggcaacagagtgagactctgtctcaaaaaataataataaaataaatgaacacacatgctgctgagtccgcaggggggcagagcagaggacagcgtgcttttgtgtactgttggaagactggctcctcctgtacagcacctctgagcccttgtgcaccgccctgccacgggcaccatccagtcctggccgtgtgaccacccacagctgactgggcagcaggcacaggccctacccgagcaggccggagttggctcgcatgactccagctgaggctgcctgtgtacatttctccagataccctatggctaattttgttataactgcacagtggctgctgccattttgtattaaatatattgtgaaac

SEQ ID NO: 17193 - DNA, 2018 bp, Homo sapiens
  CDS (81)..(1178)
acacccagctgcctgagaccctccttcaacctccctagaggacagccccactctgcctcctgctcccccagggcagcaccatgtggcccctgtggctctgctgggcactctgggtgctgcccctggctggccccggggcggccctgaccgaggagcagctcctgggcagcctgctgcggcagctgcagctcagcgaggtgcccgtactggacagggccgacatggagaagctggtcatccccgcccacgtgagggcccagtatgtagtcctgctgcggcgcagccacggggaccgctcccgcggaaagaggttcagccagagcttccgagaggtggccggcaggttcctggcgtcggaggccagcacacacctgctggtgttcggcatggagcagcggctgccgcccaacagcgagctggtgcaggccgtgctgcggctcttccaggagccggtccccaaggccgcgctgcacaggcacgggcggctgtccccgcgcagcgcccaggcccgggtgaccgtcgagtggctgcgcgtccgcgacgacggctccaaccgcacctccctcatcgactccaggctggtgtccgtccacgagagcggctggaaggccttcgacgtgaccgaggccgtgaacttctggcagcagctgagccggccccggcagccgctgctgctacaggtgtcggtgcagagggagcatctgggcccgctggcgtccggcgcccacaagctggtccgctttgcctcgcagggggcgccagccgggcttggggagccccagctggagctgcacaccctggacctcagggactatggagctcagggcgactgtgaccctgaagcaccaatgaccgagggcacccgctgctgccgccaggagatgtacattgacctgcaggggatgaagtgggccaagaactgggtgctggagcccccgggcttcctggcttacgagtgtgtgggcacctgccagcagcccccggaggccctggccttcaattggccatttctggggccgcgacagtgtatcgcctcggagactgcctcgctgcccatgatcgtcagcatcaaggagggaggcaggaccaggccccaggtggtcagcctgcccaacatgagggtgcagaagtgcagctgtgcctcggatggggcgctcgtgccaaggaggctccagccataggcgcctggtgtatccattgagccctctaactgaacgtgtgcatagaggtggtcttaatgtaggtcttaactttatacttagcaagttactccatcccaatttagtgctcctgtgtgaccttcgccctgtgtccttccatttcctgtctttcccgtccatcacccatcctaagcacttacgtgagtaaataatgcagctcagatgctgagctctagtaggaaatgctggcatgctgattacaagatacagctgagcaatgcacacattttcagctgggagtttctgttctctggcaaattcttcactgagtctggaacaataataccctatgattagaactggggaaacagaactgaattgctgtgttatatgaggaattaaaaccttcaaatctctatttcccccaaatactgacccattctggacttttgtaaacatacctaggcccctgttcccctgagagggtgctaagaggaaggatgaagggcttcaggctgggggcagtggacagggaattgggatacctggattctggttctgacagggccacaagctaggatctctaacaaacgcagaaggctttggctcgtcatttcctcttaaaaaggaggagctgggcttcagctctaagaacttcattgccctggggatcagacagcccctacctacccctgcccactcctctggagactgagccttgcccgtgcatatttaggtcatttcccacactgtcttagagaacttgtcaccagaaaccacatgtatttgcatgttttttgttaatttagctaaagcaattgaatgtagatactcagaagaaataaaaaatgatgtttc

SEQ ID NO: 17194 - protein, 366 aa, Homo sapiens
MWPLWLCWALWVLPLAGPGAALTEEQLLGSLLRQLQLSEVPVLDRADMEKLVIPAHVRAQYVVLLRRSHGDRSRGKRFSQSFREVAGRFLASEASTHLLVFGMEQRLPPNSELVQAVLRLFQEPVPKAALHRHGRLSPRSAQARVTVEWLRVRDDGSNRTSLIDSRLVSVHESGWKAFDVTEAVNFWQQLSRPRQPLLLQVSVQREHLGPLASGAHKLVRFASQGAPAGLGEPQLELHTLDLRDYGAQGDCDPEAPMTEGTRCCRQEMYIDLQGMKWAKNWVLEPPGFLAYECVGTCQQPPEALAFNWPFLGPRQCIASETASLPMIVSIKEGGRTRPQVVSLPNMRVQKCSCASDGALVPRRLQP

SEQ ID NO: 17195 - DNA, 2357 bp, Homo sapiens
  CDS (172)..(516)
aaaaaaatgcttctgtgctctaagatatatatgtgtgtgtgtgtgctacatatatatttttaagaaaggaccatctctttaggatatatttttaaattctttgaaacacataaccaaaatggtttgattcactgactgactttgaagctgcatctgccagttacaccccaaatggctttaatcccctctcgggtctggttgccttttgcagtttgggttgtggactcagctcctgtgaagggtctggttaggagagagccatttttaaggacagggagttttatagcccttttctactttcctcccctcctcccagtccttatcaatcttttttcctttttcctgaccccctccttctggaggcagttgggagctatccttgtttatgcctcactattggcagaaaagaccccatttaaaacccagagaacactggagggggatgctctagttggttctgtgtccattttcctctgtgccaaagacagacagacagaggctgagagaggctgttcctgaatcaaagcaatagccagctttcgacacatacctggctgtctgaggaggaaggcctcctggaaactgggagctaagggcgaggcccttcccttcagaggctcctgggggattagggtgtggtgtttgccaagccaaggggtagggagccgagaaattggtctgtcggcccctggttgcactttggggaaggagaggaagtttggggctccaggtagctccctgttgtgggactgctctgtcccctgcccctactgcagagatagcactgccgagttcccttcaggcctggcagacgggcagtgaggaggggcctcagttagctctcaagggtgccttcccctcctcccaacccagacataccctctgccaaactgggaaccagcagtgctagtaactacctcacagagccccagagggcctgcttgagccttcttgctccacaggagaagctggtgcctctaggcaaccccctcctcccacctctcatcaggggtgggggttctcctttctttcccctgaagtgtttatggggagatcctagtggctttgccattcaaaccactcgactgtttgcctgtttcttgaaaaccagtagaagggaaacagcacagcctgtcacagtaattgcaggaagattgaagaaaaatcctcatcaatgccaggggacataaaagccatttcccttccaaatactcgacaatttagatgcagaacatttctctgtattcagacttagagtaacaccagctgaaaactgcagtttctttcctttggatacataaggcttctctatcggggtacgggacagggaggaggcctcatgtctgaagggggatttaggggcgagagccccagccctgaccctcggtcctgtgcaccgctttggggcacagtctgatggcgcctttgctggcgccttagtatggttgactccggatggacaaaagaaaaaaaattttttttcttgaatgaaatagcaggaagctcctcgggagcatgtgttttgattaaccgcaggtgatggatgctacgagtataaatggattaactacctcaatccttacagtaagattggaactaagggcagggactcatgcataagggtatgaatcccagccaggacaagtgagttgaggcttgtgccacaaaaggtttgtccttggggaacaggcaggcctgccaggatcccccccatatcgattgggctgggagggctggccgtgaggtccccactttctgctttccttgcccatgtgtcacccctttggcctccagcttgtccctctctcactttctatagctttgttggaccagatggtgaggaaaggaatggcctcttcccttctagagggggctggctggagtgagacctggggcttggcctggaacccaccacacagccccaaagtcaggaagcctggggaaaccagagctgagacctcttcaacagggtttctttgagatcctacacctccattgggccctttttcagtcttcaatgggggcccagttggctctagaaggagaagaggtgaagcaggatcctttgccctgggggagtctgagggcgcggtccttggactcattcaggccgtctttgtagttgggggagttccactgggcgatcccagcccctccccacccaccctctaatggacctcctcatagaagccccatttcacttttgttttatctacctcttagcaaaacaatagataaattaggtagtggcagctccacttgcttaggttagggggggaaaaagatttctttttccaaaggaaaaaaatattaccttgagaatactttccaaaaaataaaatttaaaaaaaaaaacc

SEQ ID NO: 17196 - protein, 115 aa, Homo sapiens
MALIPSRVWLPFAVWVVDSAPVKGLVRREPFLRTGSFIALFYFPPLLPVLINLFSFFLTPSFWRQLGAILVYASLLAEKTPFKTQRTLEGDALVGSVSIFLCAKDRQTEAERGCS

SEQ ID NO: 17197 - DNA, 1946 bp, Homo sapiens
  CDS (100)..(1431)
ctgggcgcgcgccagcaaatccactcctggagcccgcggaccacgagcacgcgcctgacagcccctgctggcccggcgcgcggcgtcgccaggccagctatggcccccgacccggtggccgccgagaccgcggctcagggacctaccccgcgctacttcacctgggacgaggtggcccagcgctcagggtgcgaggagcggtggctagtgatcgaccgtaaggtgtacaacatcagcgagttcacccgccggcatccagggggctcccgggtcatcagccactacgccgggcaggatgccacggatccctttgtggccttccacatcaacaagggccttgtgaagaagtatatgaactctctcctgattggagaactgtctccagagcagcccagctttgagcccaccaagaataaagagctgacagatgagttccgggagctgcgggccacagtggagcggatggggctcatgaaggccaaccatgtcttcttcctgctgtacctgctgcacatcttgctgctggatggtgcagcctggctcaccctttgggtctttgggacgtcctttttgcccttcctcctctgtgcggtgctgctcagtgcagttcaggcccaggctggctggctgcagcatgactttgggcacctgtcggtcttcagcacctcaaagtggaaccatctgctacatcattttgtgattggccacctgaagggggcccccgccagttggcggaaccacatgcacttccagcaccatgccaagcccaactgcttccgcaaagacccagacatcaacatgcatcccttcttctttgccttggggaagatcctctctgtggagcttgggaaacagaagaaaaaatatatgccgtacaaccaccagcacaaatacttcttcctaattgggcccccagccttgctgcctctctacttccagtggtatattttctattttgttatccagcgaaagaagtgggtggacttggcctggatgattaccttctacgtccgcttcttcctcacttatgtgccactattggggctgaaagccttcctgggccttttcttcatagtcaggttcctggaaagcaactggtttgtgtgggtgacacagatgaaccatattcccatgcacattgatcatgaccggaacatggactgggtttccacccagctccaggccacatgcaatgtccacaagtctgccttcaatgactggttcagtggacacctcaacttccagattgagcaccatctttttcccacgatgcctcgacacaattaccacaaagtggctcccctggtgcagtccttgtgtgccaagcatggcatagagtaccagtccaagcccctgctgtcagccttcgccgacatcatccactcactaaaggagtcagggcagctctggctagatgcctatcttcaccaataacaacagccaccctgcccagtctggaagaagaggaggaagactctggagccaaggcagaggggagcttgagggacaatgccactatagtttaatactcagagggggttgggtttggggacataaagcctctgactcaaactcctcccttttatcttctagccacagttctaagacccaaagtggggggtggacacagaagtccctaggagggaaggagctgttggggcaggggtgtaaattatttcctttttctagtttggcacatgcaggtagttggtgaacagagagaaccaggagggtaacagaagaggagggacctactgaacccagagtcaggaagagatttaacactaaaattccactcatgccgggcgtggtggcacgcgcctgtaatcccagctacccaggaggctgaggcaggagaatcgcttgaaccggggaggtggaggttgcagtgagctgagatcacgccattgtactccagcctgggcgacagagcaagactccatttc

SEQ ID NO: 17198 - protein, 444 aa, Homo sapiens [sequence omitted]

SEQ ID NO: 17199 - DNA, 4225 bp, Homo sapiens
  CDS (108)..(1745)
tcttccaacagaacgttgggaagacgagcaatatctttgggctgcagaggatcttcccagccggctccattcccctaaccaggccagcccattccacttcagtgtccatgtccaggctgtcactgccctccaaaaatggttcaaagaagaaaggcctgaagcccaaggaactcttcaagaaggcagagcgaaagggcaaggagagttcagccttggggcctgctggccagttgagctataatctcatggacacatacagtcatcaggcactgaagacaggctctttccagaaagcaaagttcaacatcactggtgcctgcttgaatgactcagatgacgactcaccagacttggaccttgatggaaatgagagcccattggccctattgatgtctaacggcagtacgaaaagggtgaagagtttatccaaatctcggcgaaccaagatagcaaagaaggtagacaaggctaggctgatggcagaacaggtgatggaagacgaatttgacttggattcagatgatgagctgcagattgacgagagattgggaaaggagaaggcgaccctgataataagaccaaaatttccccggaaattgccccgtgcgaagccttgctctgaccccaaccgagttcgtgaaccaggagaagttgagtttgacattgaggaggactatacaacagatgaggacatggtggaaggggttgaaggcaagcttgggaatggtagtggcgctggtggcattcttgatctgctcaaggccagcaggcaggtggggggacctgactatgctgccctcaccgaggccccagcttctcccagcactcaggaggccatccagggcatgctgtgcatggccaacctgcagtcctcatcgtcctcaccggctacctctagcctgcaggcctggtggactgggggacaggatcgaagcagtgggagctccagcagtgggctgggcacagtgtctaacagtcctgcttcccagcgcaccccagggaagcggcccatcaagcggccagcatactggagaaccgagagcgaggaggaggaggagaacgccagtctggatgaacaggacagcttgggagcgtgcttcaaggatgcagagtatatctatccttcactggagtctgatgatgatgaccctgctttgaaatctcgacccaagaaaaagaagaattcagatgatgctccatggagtcctaaagcccgcgtgaccccaactctgccgaagcaggaccgtcctgtgcgtgaggggacccgggtagcctctattgagacaggtttggctgcagcagctgcaaagctggcccagcaggagctacagaaggcccaaaagaagaaatatatcaagaagaagcctttgctgaaggaggtagaacagcctcgccctcaagactccaatctcagtctgacagtaccagcccccactgtggctgccacaccacaacttgtcacctcctcctcacccctgcctcctcctgagcctaaacaagaggccctgtcaggaagtctcgctgaccatgagtacaccgctcgtcccaatgcctttggcatggcccaggcaaaccgcagcaccacacctatggcccccggtgtcttcttgacccagcggcgcccttcagttggctcccagagcaatcaggcaggacaaggaaagcgtcccaaaaagggcctggccacagcaaagcagagactcggccgtatcctgaaaatccacagaaatggcaaactacttctgtgagccctcctgtgtcccacccctcacccctttacccccattgccttctccattgtcaactcttggggcactcctggatcctatctgccctggaccaggtgctgaggtgcattgtcctgctttcttgggacttaccaaaggcacggacccctccaccgactccttctagttcccttccccactttcactagagcatcctgcctgccttctccactgaggagcaggtaaatgggagaggtttccagctgactagaaccctcctttctactcgtccaaaccactcccgtcacctgccttgtctgttctttattcttcatcccccgctagagctggaaggcaggatgaggagaggtatgaaggagcctgagccatgaagtgggaagcccagtgcttgacactttctgcaactctagccctatatccagaagcctgcccacctccacccattctgtttgccccatttccccagtccagtggacatgccccacctccagacttgctcatgggagaaggctgtggtctctgccccctcttgccaaatgcttcatggaaatgaagaggaaggcctagagcctccttcctgccccactgtgggccatttccggaagtggcctagaaatgccaacttcacttacctttcaaaagaaaggtgattcctatcacttgtcaaggtagggagaggtcagatgcccaagcctttgaccacggttttgtagcctgttggaggaagctacttttagctggctacacatgaggccacttgttttagggtgagctccagggatttgcctggattttgaaatcatgtagaacattatccacgtggctgtggctgtggctgtggctgggccctggcaggtggaaaaccatctcccagaaacctgaaagcacctgccaatgacgcagataaccctggccctacagcctgcttgctccgcctataccacagagcacagcctggacattatggagggtgtggcgggacggcccacacctgggtcctccatcgggaacttttcatgcttctttctccacctgaggtcttggtctgaagaagacctcaggactcacatcttcactcctgggcctttgcacttccagacgacaggtcatcgttcaagcagaatgcagacaggccattcacgagcccaagttgaagagaagagacgcccatccgtgaaggagcagaccatccatccgatcctccccttcccctgtccttccttcgtggattgtctccattgtccagacagtgccccccacctcccaccgccttgcctcactggcaatctggactcgatggagaacatccccccacctccatttggcactacccaagtggagtgtacccttgccctttccacctgtaccacccactccaacctcaccccagcttgcccaatgcttctggggaatttaatagctaccatgcaggccacagggaatttgtgaggcttcttttgtcatctttgtatctccagtttgtctttcttttctccatagccctgcctctactttccttccttggaatcaggggttcctttagcccatttgctttctctaccttggggaccccaggggccaagcagttctccatctagtcacaccaaaggcaaaaagcctggctacctcccccctagcacgtgagtccctactcccctcccctctgtttctgcccagctttgcttattctggggatttcagggcagcagagggtagtgaggggagagcaggagaagcctctgtcctgtataggcaactgcctgactatgcggtgactgctgtaaccaagatcaggtccccagcccttttgtccattaacaccccttcttgatctttcaaaggcagctaattgctagcaaatccccccgattccggccttttccctctatttctttgttagaagttttctgtggagctgaaacccagcctctgtttgactgggtttcatttagcttagttgggttcttagagccccctgtttgttgttttgtgttgtttccaatgaaaagcaagtttaccctcagagttgtgcttttccaaagaggctgatgtctttgtttttgttttttttaatgtttcaggttctaagtgaagtgagttggggaggggttgggagtgttagtaatcaaggtttagaacaccatgagatagttacccctgatctccagtccctagctgggggctggacagggggaagggagagaggatttctattcacctttaatatatttttacaaaaaaagcaaacaatttaaaaacaagcccaccgcttctgtacatgtctaaatatatttttagaagtgggtaggattgtgaatttctgatgcagggcctttttataaataggttagggtagcatcattcagacttctctgttgtttttgtccctgtctttttcttatgttgtgttactaatgtaatttatattttttttagatcctccctttcctatagagataaaagtgatttatcttggc

SEQ ID NO: 17200 - protein, 546 aa, Homo sapiens
MSRLSLPSKNGSKKKGLKPKELFKKAERKGKESSALGPAGQLSYNLMDTYSHQALKTGSFQKAKFNITGACLNDSDDDSPDLDLDGNESPLALLMSNGSTKRVKSLSKSRRTKIAKKVDKARLMAEQVMEDEFDLDSDDELQIDERLGKEKATLIIRPKFPRKLPRAKPCSDPNRVREPGEVEFDIEEDYTTDEDMVEGVEGKLGNGSGAGGILDLLKASRQVGGPDYAALTEAPASPSTQEAIQGMLCMANLQSSSSSPATSSLQAWWTGGQDRSSGSSSSGLGTVSNSPASQRTPGKRPIKRPAYWRTESEEEEENASLDEQDSLGACFKDAEYIYPSLESDDDDPALKSRPKKKKNSDDAPWSPKARVTPTLPKQDRPVREGTRVASIETGLAAAAAKLAQQELQKAQKKKYIKKKPLLKEVEQPRPQDSNLSLTVPAPTVAATPQLVTSSSPLPPPEPKQEALSGSLADHEYTARPNAFGMAQANRSTTPMAPGVFLTQRRPSVGSQSNQAGQGKRPKKGLATAKQRLGRILKIHRNGKLLL

SEQ ID NO: 17201 - DNA, 2351 bp, Homo sapiens
ttgttcagtcctcaattgttggacattttttttattataatgatgccatgatgatcgtttatgattcactgtttttattttttgatttctttgattttagtggaggtgaacatttccccataataatgagcttcattgatttgtaaattatattatctttgagattatattcaaagctataaaatcatcaactcttaggatcacaggcaacctcaaaagttgtctagttcccatctattcctcgaccctctctacggagtttgtataaaacccatattttcattacttcctaactctgataattataggggatatattttaaggattaaaactagtatcttaaatgtttttatatcagtcagtttaaaaactaatattcagtttagtctttcagaactttgagtcacgaaatgcatctttaaaagcagggtacatttattgaaataaaacactctacagtgatctggatctttttttaatttatttttttattatacttttaagttctgggatacatgtgcagaatgtgcaggcttgttacataggtatacacgtgccacggtggtttactgcacccatcaacctgtcatctacattaggtatttctcctaatgctatccctcccctaccatcccaccccctgacaggcgccttggtgtgtgatgtttggatcgttttttttcttgaacatacaaacgttagtacataccttttctgtttgtatgcagacatatgaatgttttttcagaagaggagttacactgtacacacacagtcctacagcttattcattcagccctcactagcagggtgctttgtgagccataaatgcagggacctgttctttttggtcactgatacttctcaaaggcttagaacagttcttggcacattgctcaatatgcatctgatgagtaacaatatatataagagtcattcttctatgtcatttcaagagacctgctttatttttcttagtgccaagtcatatatttgaaagcaaactgtagttgcaggaagtcaaggattactaaaattcagttctcaatattgttaggactgttatagcctttccttgaaatctgccccaagtgttaatttttgaaatggcaaattggaaagccaggaatcttatgtgtttttgacattggacatgaggagaaacttccaggtcattcactatatactctcctgaatatatttagattctataaattgtaatgaagtctgctttaaaatatgactaggcaccattcagattaaaaagtgtaatttaaaaacatacaatatgttggctgggcgcagtggcttacacctgtaattccagcactttgtgaggccaaggcaggcagatcacttgagtccaggaatttgagaccagcctgggaaacatggcaaaaccctgtctctaccaaaaacgatagaaaaattagctgatgtgttggcatacacctgtagtcccacctactcgggaggctgaggtaggaagatcgcttgagcccgggaggcagagtgagcagcgattatgccactgcactccagcctgggtgacagagccagaccctgtctcaaaaaaaaaaaaaaaaaaaaaaaaaaaggatagcgtattaaacagataccccaagtatcctaaggaagctgtaaaattacatgctggggatataattttgttaaattacatttatatttaattaaacatgaggtccatttagattttgggttgattcattcatctgtgattactgagcatttgccatgtgccagtcaatcagtattaggcaccagagttaccacagtgagcaagagagacatggaccccttctgcaagatgcctagacaattaaatggccaatgaaactaaagtgaggtaagggttctgatgtgaaaagctgagggtgtgatgaggacaagtggcagaaagttcacctggcttggtggaagggaaggtcagagaagacctcttagaggactcagtaatgtccattgaggattttaggttgaagggaatgtttgaagtttgagggcccttttgaggaccaccaagaacttcactgtgctgtaggatattgagcaggaggtgaagctagagagatgtgtaggccacattgcagagtttgaacttggggcaatgggaagccattgaagggttttaaacaacccaagtggtgcattcttctgtaaatgttagagagatcagtggctgccctgcacatcaaaggggagaacgattggagacaggcagattagatggaaggacggagttgtactccaagccaaagatgatggagagtgaattaagttagtgcaatgggaccaagtctagagctatttagaagtgagaagtgacacgg

SEQ ID NO: 17202 - DNA, 3306 bp, Homo sapiens
  CDS (18)..(353)
atgagaacggcgtcttcatgtgcgccgagggcaccggcaagttctgtcccctgaggtccttcccagacactgtctacaagaagctggtccagagagagaagactttaaaggttagaggagtggaccgcactccctacctgggggatgtcgctgttgtcgtgcaccctgggaaaaaagagatgggaaccccactcgcagacactcctacccggcccgtcacccggcatgggggcatgagggaccttcacgaatccagcttcagcctctctggctctcagatcgatgaccatgttccaaagcgagcttcagctcggatcctcgctcctcccggaggaaggtcgagtggcatttggtaaaggcattgccaagccccccgagtgaggacgcaccgccgccaccagcccgcaactctccagccgaagctgcaggggcaggagaggctgggctgggtggcacaccacccgaggggggccccgggacccacggagccctccctatgtctgcaaagtgattcactgtgcttcgagccaactctaacaggcactttgagatgtgttcctcctgctgtagtcctttctgccttggcctcggcgggcttttctggggcccaggaagcccacactatgcacagagcccaatgcatagagccctggccagcccttcctctcactcctgcctccgctggctttgggaaagcccagactttagtgccctgccccctggctgactggccagttgcccagagcactttagcagatgtggtttcaaagtaaaggcctcctcccccaccccttaggccccgtggtgacatttcccaagtcagacagatgtcagcttcccagccatgcccaggacgtcctatctcccccaacccacctctggccctgtgtaggggcagggatgggggtggctgggactcctggtgcccctcgccagcttctcctgcgccccgcccacaccctcgggggggtcacaggcccagaagggtagctgggcggggctcgaggctggtgccaggcgcgtgtaaatggttttgttttgcacgtttggtttgcgcagtagtttggtttgacttgtttgtgcatcctgtgaaaaataacggtgcttgtgtcactagcatagaatagcgacaggaatagatgtggtccttaggagacgctgcacttgacaccaaccagacagcacagggcaggggtggtggagggggctgggctcacaggcctctcttttccccgcctgcagtcttctgggctgcgggaggccctggccctttccccttcccctcccctccttgtctagtttcccacattccaaaagggggcctgggatgctagccccagagatgccagcccttcaggaagcaggtgtcctttcccctctctgcccctgatcactcccagcactccccttgccttcccctgtcttcacctgccaccacacacacacacacacacacacacacacacacgcatggcttcctataacttcttcctgctggacagagactcagcgctcctcctgtgtgactggcaagaggcctcatgcctgctgagagaggaggagtgggagaggggcttgccagacaccagagagggagaccccaggcccacaggacctggctgtcgaacccgcattgctgctcaggtgccgtgatctcccgtggtcggcaccaggcccttgccagctcatggcctcatcttctcccctgtccatccaggtgggccctccctgcttctaaagccccacagaagttcccatggaaacactagaggccgggtgtctccttccacctccagtgatctgggaagtgacccagccgcctgcccttgttaagcctggtctgccccgtgggaagtgacttcatgttgcacatgtgatttcagcccccgaggcttgcgcgaggcttctggaccctcggttaaaggtcagcccctggccgggtgcggtggctcacgcctgtaatcccagcactttgggaggccaaggcgggtggatcatggagtcaggagatcgagaccatcctggctaacacggtgaaaccccgtctctactaaaaatacaaaaattacccaggcgtggtggcgggcgcctgtagtcccagctactgaggaggctgaggcaggagaatagcgtgaacccgggaggcggagcttgcagtgagccaagatcacgccactgcacttcagcctggacgacagagtgagactccatctcaaaaaacagacaaacaaaaaagtcagcccctgcacatctctgtagtgcttttcatgtattcaaaccacttccgtatatgacctctcacttagtcctcatgacaatggagcacttattattcttcccattttacagatgaggaaactaagacccagaaagttcgggtcctctgaccccagaagtgtctgtgatgaccctcccaaccttggctatctaccccacctgtggagaggaggtctggggtgacatctattgtagatcccacctgagagtttaaccaatgagaagacttactttcctggtaggcagcctgctttgttttgcacaggaagatagattttttttctcatctttcttataaacaacctcatgcacattctgtgtttgagccaagactagtcacccattgggggctaaccgtgcagtgtgagctgcgtccacaccctcacttctcccttcactccccctttcctcactcaggggctgagaggacagaggtggtcagccggggagcagaggtggcgaaggggctcatggcaagtggcagccattggaacaggggtgaggacccaggcctgggaaagccaccagggatgggggaaaccatgacgccgcctcctggtgcagtgcacaccatctctatccctgtcagccctcactgggtcatgggccttgggcagatgtcaaagagcccagcagcagcggtggtggccagctgggcagagcatccttgcttgggctaggaaagctttaccttctctgagtgcctccgcctgagagatgtgtgacccgtggcaccagggaaccacgtcttggagtggtccactgtaggccatgcgcttcatccacccccagtccctacataggccctacccttgcccgggagcttctagatagaaatcagaaagagattcaaggagccaaatgagcggtcagcccccaccatgcactccttgccccgtgcagagctccagccagcttcgtcaccagccccactggctcctggttggaacgaaagggtctctggttgcactgaatgcagctctcaaactggtcttgtacttgctgaataaatactgttgttcttgcctt

SEQ ID NO: 17203 - protein, 112 aa, Homo sapiens
MCAEGTGKFCPLRSFPDTVYKKLVQREKTLKVRGVDRTPYLGDVAVVVHPGKKEMGTPLADTPTRPVTRHGGMRDLHESSFSLSGSQIDDHVPKRASARILAPPGGRSSGIW

SEQ ID NO: 17204 - DNA, 3975 bp, Homo sapiens
  CDS (2220)..(3104)
aagggaccggcacccagggacagggcgggcgcccggggcctgcgcccctcagcggtatctggaaatatttttggttgtcatgatggggtggggtacaggccaggggtgctgcttagcatctggacagcccccactatggagaatgatgaggctgagaaagctccccaggccggggctctcctgtgaggcaagtctcctggcagtcttcaggtgtggcaggggttggggtgggcccgggggtcatgtcccagctcagctggtcctgagaagctgcctggtagacagtcaccggcacagagagctggaaagtgccctcgaccccagaacctgggtcctgtgaggacatccaccctgtgtgaggccagggagtgctcagcagatgggggcagcagggggtgtcagcatgggtgggggttcctgccaaggcaggcagctgagctggccccacctcagagtgcaggggccctcagcttgatcttttctgggctccactcttgactgatggacccatggggcaccctggccccaccctgcctgccttgccccagctcctgcccttgccccgtagggctctgcggcctcccctgtgcctgtgtgcctggctcactagaccctggacctgcggtccctcagctccactctagtccccttactctgtccctctactgcctggcgtcgctcagctcctccctgcctgtccagcgcccagcatcctgtgcccatgacctcacatctgtccctctgcccgggtcccccactcacctgtgttttggtccatctttgtctgctgaccccactatagattttaaaaatacaaatatgcatgcacgtggttaaaaactcgctgatgtcagatggctgggatgaaaggactgcctgctgcctttcctcttgtagtgctcggacacctctgcaggcgaagctccttgtttttcttttttgttgttgttgttgttttttcacttcttattttgaaataattatagattcacaggaagttgcaaaaaaaaaacaaaacaaaacccgtgggagagatcgcacggacccctccccagttcccctgattgcacacacagggcatatctggggtctctggatttgtgtgtcttactttgtgcgtctgtgcacgcatgtgtataactgcagttttatcacgtgtgaatatctgtggccattctcaggcccacgcggcttcctgctcctgcccctgaatgggcacccccaacaccccaaaacctgttctcagctgtaaaatcgtgtcatttcaggagtgtcatagatggatgcatcggcctgtcactttttagccttacccttttccctcaccatagtgccctcagatccacccacttctgtccatctccggctccctgttcttgctgagaagtcccacatggtgtagtggcaccttgattctccctttctggctgttaccagtatagctggctgctgtgagctttcgctgcaggttttgtgtgagctgcagtcttcgtttctcagtgatccatgcccggaagtgagagggccaggtcgtggagtagttgcttgtttggtgttgtgaggacctgcaccctgtcttccagagggccacccgttttgcctccccaccagcagcatgccagtgacctggtttctcctcatgctggccagtgttcaggttcaccactgcatctgtctgggccacatcgcctgtgtttccctggtggcgtggtgacctttccgcggcacacctgcggctgcccctctgtgctgtccttgctgttcctcccgtcatcttagcccacgtgtgtaaatgacatatgttcccctcccttgtgggtgttgtttttgatgtcctgtgaccgctgtcctggagtgtgggccagattcactggctgtcacagctggctatgcccaccctccctgcggcagggtcctcagtgagacctgtgcctactggttctgggtgatgagcgtgaacgttctccgtggctgctggcacgtgggcatgaccacagggtagagtgagactgcagagatgagggcagcaggcccctgcttggcacctgaagccctgggcaactggcaaggactgagccctctcctggctggaaggggctgggccacctgctcttgggcttgtctctggaaggccctctgggggtcttactacctccctgtctcagctcccaccagcctgtgaagccctgtgcagtccatacctgcaatcaaccccagccatggaggtggctgtaccccaggtgtctccacttagtgcccccccccccccgacatgccccacgctgcccagcctctcctcttcccaccatccgtctggtcaggggtcattcttgtggtgcctgcccaaatcctctgaggagggctgcctggagtgcaggctccaggaacactcggaggtgtctggcttccttctggagtgtgacagctcggtgcagggcgcgctgcagaagcacctcgcgctatacaggatccggcggaaggtcacggtggagccgcacccggagctgcgagtgtgggcggtgttgcccagttcccctgaggcctgcggggctgcatcgctgcaggagagggcaggggctgccgccatcctcatccgcgacccgcgaacagcacgcatggggtggcggctcctcacccaggatgaaggcccagccctggtgcccgggggccggctcggggacttgtgggattatcaccagcaccgatacctgcaaggcgttcctgagggggtccgagacttgcctcctggggtggccctgcccctggagtccaacctggccttcatgaacggcgtgagcttcaccaaaggctgctacattggccaggagctgacggcccgcacccaccacatgggcgtcatccgcaagcgcctcttccctgtccggttcttggacccccttcccaccagtggcatcacccctggtgccacggtgctgactgcctcaggacagactgtgggcaagttcagggctggccagggcaacgtggggctggccctgctgtggtcagagaagatcaagggtcctctgcacatcagagcctctgagggtgcccaggtggccttagccgcatctgtgccagactggtggcctacagtctccaagtagtccgaagccttggctggcgcaggctgatggggaggctggggcctggggcctttggcctctgtccagggtcttcccgtcccatctgtctgctgcgcctactgggtgggagccctggtttccatctgggaaagtcccccttgtaggtgccctgcctggccccacccatgctcaggggccccaggcacgtgggttgttttctccctggacttcctgtggccccagaggagcccaccgtgtgagtgctgggctccatatggcgccgggtcccaatcgtggctccacacagggttgtctgggaggacgggacggtgtctctggccagcactggcagcttccgggccttgtaccccactctgcctggcatgagcctcatggggggttggtccctgtgcctggaagcggggtggtgtccagggtctgcaggctggggctcgggctttgggagttgtttcactgtgcttgcttccagcatgtctcagggtggggctatgcgtggtctagaggggtctggggcattggatcaggtggcgtgtgggtgtctacacatcgagaagcacacagggatgagccactaggtatcccatgctggaggcttgtggaaggctgtgcccatctcccatgtttccccacctctgttcctcctcagagccctccaggagcgtggggtgggggccagcgcagggctcaggagccagcagggcagagttctgcctgtgtgtgctgggttttggcatagcctgtgtttgcagtgagagtgacttgctgtcagtcacggggcacagcctcctgttcacccactggcttcccccttcccactgaagtgtgagctctatgtttcagggcatctattaaagagtgagccacaggc

SEQ ID NO: 17205 - protein, 295 aa, Homo sapiens
MEVAVPQVSPLSAPPPPTCPTLPSLSSSHHPSGQGSFLWCLPKSSEEGCLECRLQEHSEVSGFLLECDSSVQGALQKHLALYRIRRKVTVEPHPELRVWAVLPSSPEACGAASLQERAGAAAILIRDPRTARMGWRLLTQDEGPALVPGGRLGDLWDYHQHRYLQGVPEGVRDLPPGVALPLESNLAFMNGVSFTKGCYIGQELTARTHHMGVIRKRLFPVRFLDPLPTSGITPGATVLTASGQTVGKFRAGQGNVGLALLWSEKIKGPLHIRASEGAQVALAASVPDWWPTVSK

SEQ ID NO: 17206 - DNA, 2338 bp, Homo sapiens
  CDS (329)..(709)
gaaagaggggctgaagtcgcccttgaataaccacagcagtggcacccacaaaggtgcagttcccacagcctcatagctgcttgtaggtgccacctcttaaggccattaccatagcaattaatactgaacatgagctttggagcagacaaacactcaaaccgaacagggggatggaggaaaggagcttcaatggcaagatctcctggactcctgtcctggcccctcctccccctgccccacccctgctctcctcctgctccccctctcagagcttgccctgaccctgctcctctcccaggtgtattccgaacttaagtaccacccagagatgagattcttccactggttcagcaagtggaggaagctgcatcgtgaccaggagtatgaggtcacctggtacatatcctggagcccctgcacaaagtgtacaagggatatggccacgttcctggccgaggacccgaaggttaccctgaccatctttgttgcccgcctctactacttctgggacccagattaccaggaggcgcttcgcagcctgtgtcagaaaagagacggtccgcgtgccaccatgaagatcatgaattatgacgaatttcagcactgttggagcaagttcgtgtacagccaaagagagctatttgagccttggaataatctgcctaaatattatatattactgcacatcatgctgggggagattctcaggtgagggtctccctccaggctcatcgcctcgctcctctcacctcctgctcatcctcttgaggcctcccctctgttccagaccaggtcctctcctggccaggccctcctgccttccctcctgccccctgcctgccctcgtggttacactccctcacccacactcctcgtgctccctccacctccctgcctcccacctgctttcctgggcccttcctgtgagtgagaggccccttctgcctccagagcaacctccatccacccccacagcctgggagccccaacctggccccttccatctccctggcataaccgaatttgtcgtaaaactggacgtagtaagtgggcatgaatagtcacaagcccggcagtcagaagctttgagcaacatccttaaaggccaacctgagcccctgagaaggagctgcctccatggaaacagagcttcaggcttcggctgccatagaagatggccgggctgggtgcccacagggcaggcatttattttctcacacatctggaggctgcaagtccaaggtggaggggtgggcggggttgtgtcttctgcagtcgctcctcctggctggcagggggtcccttccggccctgtcctctctggcctttcctctgtgcacctgcactcgtggggtctctctgcctccaaatgtcctcctcgtttatggaccccagtcatgtgaatttgggcccacactgaaggtctcatttaagttaatcatctgatgaaaggacctgtctccaggccaggtgcagaggctcatgcctgtaatcccagcactttgggagtccaaggcgggtggatcacctgaggtcaggagttcgacaccagcctggccaacatgttaaaaccccatctctaccaaaaatacaaaaattagccgggagtggtggtgggcgcctataattctagctactcggaaggctgaggcaggagaatcgcttgaacccgggaggcggaggttgcggtgagcccagactgcgccgctgcactccagcctgggcaaaaaaagcgaaacttcttctcaaacaaacaaacaagaaagaaaggacctgtttccaaatacagccaccctttgagggagcgggggttaaggcttcaatacattgattttggggagaaacagtgaaggccacggcaagaagctgcagtcattgtgggcgggcctgggtggggagtgcaggggttcctgtcctgtgtgtctgtttcccaggggagtcctgacctgactctcacagcccctccacccagatgttcctgtgtgcttcacccaccccattccttctgcacccaacactcctgagcccctccttagctcccccgacaggctcccctgctcccccactcccgggctgctcctcttctcagcctctctctgggcctctctggggtccggacatgacccctcagctgatgcctgtggcttccccagccagaatcttcccagttccaggctgggctctgcagagtcctatcaaaggtggcatcctcccctctgtccactccagggtgaagatctggtgtttctggtttggaaatgcctctgcactgggtgctaataattcacttttacctttataattgtggttttgtaaggacaggtatttttggcaacag

SEQ ID NO: 17207 - protein, 127 aa, Homo sapiens
MRFFHWFSKWRKLHRDQEYEVTWYISWSPCTKCTRDMATFLAEDPKVTLTIFVARLYYFWDPDYQEALRSLCQKRDGPRATMKIMNYDEFQHCWSKFVYSQRELFEPWNNLPKYYILLHIMLGEILR

SEQ ID NO: 17208 - DNA, 2672 bp, Homo sapiens
aataggaaacaggattgggcctgtttgataaaggatgtgcttgtgtgtgtgcatgtgcgtgtgtgtgtgtgtgtgtatgtgtgtgtgtattggaggtctttaggaggagagaagcgtggaaggacagcatcaacacctggcatgggagccaggctttggcactggtggtagtggggaggcaaggtgtgttatggggcatgcaagcacccttactccttgggacactcatcattccccagacattgcttgcctgtgacatctctgtggcaggggtgagacgtgatgctgacaggggcagtagagtaggggttaagagcaggacgtttgaggttgcacagacctggaatttcagcgtcaacttttactgtgcccttggatgagctactgatcctttctggggtgtttttttttattattattatactttaagttttagggtacatatgtacaacttgcaggtttgttacatatgtatacatgtgccatgtttgtgtgctgcacccattaactcgtcgtttaacattaggtatatctcttaatgctatccctccccactgcccccaccccacaacaggccccggtgtgtgatgttccccttcctgtgtccatgtgttctcattgttcaattcccacctatgagtgagaacatgcagtgtttggttttttgtccttgtgatagtttgctgagaatgatggtttccggcttcatccatgtccctacaaaggacatgaactcatcattttttatggctgcatagtattctatggtgtacatgtgccacattttcttaatccagtctatcattgatggacatttgggttggttccaggtctttgctattgtgaatagtgccacaataaacatacgtgtgcatgtgtctttatagcagcatgatttataatcctttgggtatatatccagtaatgggatggctgggtcaaatggtatttctagttctacatccatggggaatcgccacactgacttccacaatggttgaactagtttacagtcccaccaacagtgtaaaagtgttcctatttctccacatcctctccagcacctgttgctctgtcactcaggctggagtgcagtggtgtgatctctgctcactgcaacctctgcctcccaggttcaagcaattctcctgcttcagcctcctgagtagctgatactacaggaatgcaccaccatgcccggcaaatttttgtagttttagtagagatggggtttcaccttgttggccaggctggtctcaaacttctgacctcaggtgatccaccacctcggcctcccaaactgctgggattacaggcgtgaaccactgcacccagcctgctgatcctttctgaacactggaaaatggggataataccacccttaaagggttgtgtgagaataaaatacaatgatgtctgcaaggagcttagcacatggtaagcatactcctaccctagggtaatcctccaccgcctggattgttctttctccaaatgtctgcagggctacttcctctctctgacttaagtctctgccattctaaaaagagcaaaccctccctagtcctgggcaattcctggtcctattctctgctttattttttcccatagtacttgtcaccatttaacatagcatatattttactaatttgttattcccccgactaggatgtaagtttcatgaaggcaggaatttttgtctatttattatatcctgaatgtctgatatgtaataagcatgccatagatatttgttgaatgattgactcacaaaatatatcataaattttaattatacatattagttgttggacacttttgccatgtcatagccttggaataattaagtctcatgaacctccttatccaagagtccaggtctcattatcataggggaccctcctttcttaagcattagagaccagacagaaggaaggtgggattcacacaaaaactttaatcctcagcagttctcaaccctggctgcatgttagaatcaccttggtggctttctgaaaatagcaatgattgaaccacttctagaaactctgatttaactgctctgggatgtggcttggacttaaaatttccttttaagctgccctgttgattctactgttgaggatcaataaactatgtgaactcgaagctactgaaggctagagaatgagggtcttgcacaacagcctgccattgaggttggaggagacattgttcccagaccaaactgagggtctggctgcttattcttgcagcccaatatggagatgcagatgaactgggaaagaagagagttatttttgtaaccgggtacagggagaagacctggaaaaaatcgccagaccaactcaaaattacaaagttttccagagcttatataccttctaagctatatgtctatgtgtaagtgtgcaggcatctaaagatataagtgattaacttcttctaatctataactaaggtctgagtcctgaagacattcctctggaacctaagtaaatttacttaatctacatggatcccagtgctggggtgattacccttatcttgtctcctgctaaatcatggaggtttggggagttcagacctccaaaccttcagacctccaataaacttgtttgtggaggtctggagagtctcttcagacctccaataaaaatttgtttaatcct

SEQ ID NO: 17209 - DNA, 2710 bp, Homo sapiens
aagaaggaaaatggacaatcatttctgcacatatagggtttaataaaacatgtataataaaatatctcatattttaaatttccaccttattggtagctttcatgacaaagggctagggtgctgatggccatacaattaaggtttttggttagttagttagcagaactaactggctcctacctggtgggtttttcttttgtttggttggttggttggttggttttttcccagatggctcaggaggaaggtaaatagcagtcattgtatgtgtgacagagtttgagatagaatgagcatattgaatctcacatcctattcttattactgtcaggcagcgttgacctagcagtataaaactatctgaagcaatgtagtcactcagttctcataaagtttatttcaagtactgtaacaattcatgtttggattagaaaagtcactagaaatttgacttccatatagtaatctatacttttttctctcatttccttcattttttgagccgtaagtgtaaggcattttgctggtattattacaatggttatgaggagtttctttgcttgcccaaggtcacatagctagcaagttaaagtagattcaaatccaggcctgctagataccaaattattatttaagagtacttttcactactcctaaataatgacacagatacgtttgtcttacacatttcactttattgtcaagttattagtatgtttattttcaaaagttattttttgcaatttctttttattattccgtactttttaaatttacttcattatcacgtcttcctttattctttttaaatagtttttgcttttgttattttgttttcccttttttactcttggtttgtaatacctctttccttatttgctcctttctcatttgatctcaatgttaatccaactgttttccacatctgattcactaaaattttagcccttaaaaaaaaaattcctgtttttcctatctccttttgtccattctcttctccttgcctcacttcttttatctttttccattttactttcattttttgtttctctagatgttgttttgacatatgagttaatgtactggtacaattttgcatctgtaaattagagcttcagaatcaactgagtgtatttattctttatttttaggcctaaatttatcttaccttttattgattttataatatactatactctttcattttagtctgcatatgttagccaaagaagatatgcccctgttttaagaaatctctgtaaaaaatgtcaagtgtgacaagaattcttcaagaaacaagctcctctagtttgtcttctatatttagagcttcaacagttacctatattactggtaactcccaaatataccttcaaacttgttttttgggcccaagttttttgcttcatatatatctgttttgaatatcccataaataattgcatctaaagcatacctccactccattgttctcaaagataaaaccaaacctgtgctgcttcttatatttctagtatttaagcgtcacctgccacccctttacctgagctacaagtcacgcattgcattagactcctctgctttcttctttcacctctaactagactattaaccaaaaattttttaatataactttcaaaaggtattttattacatcatttccatcctttatgtttgggttcaagccctcattaactttaacatggattcttggagtaccctccttactgattttgttacacatgtccctcttttagtcagtactaccatgataataccatggataataattttttcatttttatttttagtcttgctctgtcgccgaggctagagtgcagtggcgcgatctcagctcactgcaacctccacctcccgggttcaagtgattctcctgcctcagcctactgagtagctgggattacaggcacctgccacagctcctggctaatttttgtatttttagtagagatggagtttcaccgtcttgaactcctgacctcatgatccaccctcctcggcctcccaaagtgctgggattacaggcatgggccactgcgcccggccaataatttttgtgtgtgtgtgtgctaatcatactacattttctttagaataaaagatcacatacttgtttgccattcgcagtctggccccattgtgccattctagacttacctcctgccactccccaccagctttgttttgtcttagccacacaaaataatctagcgtctctaaccagtcaaacattttaccttgtgccttggctcactctgtgccttttctccagaatatctttctgtgtacttttctcccatccttttacctttaaacctgctgctatggtttgcatgttgtttggcccctccaaaactcatgttgtagttcaattgccaatgtaatagtgttgggagatggtacttttaagaggtaattaggttgctaagatggattaacatctttctcttgacactgagactgggttctcctgggaatggttagttcccaagagagtgagttgttataaaacaatgctgcctcttctattttgcgctttttgtttgcacaaactcggtccccttctgtttctctacgatgttttgatgcagcatgaggcagtcatgagaacccaccagatacagctgcctgatcctgaatttcccagccaacagaaccaagtgctaaataaaactctttttaataagtt

SEQ ID NO: 17210 - DNA, 3588 bp, Homo sapiens
  CDS (778)..(2799)
acgtcagtccccgcgcttttcggaggctgccagcgtcccacaccagccgcaggtgaaaaccggcagaaagacattaagagattttcctgcagtcactgctggcagatgatagagccaggatttgaaagcaggcagcctggctccagaccctgtgctcttaactcccgttttgcatcaagaacagaatcctatgaaaggcttgtacagtgcttggtactgagtaggcactccgtcagtattttagtagctattattccaaaggacactgtattctaggtactaagacaatgtgaatggaatggaaaacaattcctccctgcagaagccaactgtctaggaagacagataatgacattattaaaataatcagaacattggcaaaataaagaagattgaaatgcagttcatatgacagtgctaattaatcatactttttagatctaggaaaggccataaaggttaaattgacttggaaatggtaaacaagacaatggttgtgtcactgatcggtgatggccagtttttggttatccttatttgccatttaaatgattgaattgaaaggaagaagtaagacttggaagatgaatattgaaggaaaggtgaagatggaaaagagaagggggtttattctgagaacagtgactagaactctgaggatagcagcatcaaggagcattgtgtacatgcagaagtgcacagtacctggagtgaaactgcttgtgttcgatttctgataccattcataactggctgtgtgatctcaaaacctctaaaatgcagacctccagctctagatctgtgcacctgagtgaacggcagaagaattacttcgcaattacatctggcatatgtaccggaccgaaggcagatgcataccgtgcacagatattacgcattcagtatgcatgggcaaactctgagatttcccaggtctgtgctaccaaactgttcaaaaaatatgcagagaaatattctgcaattattgattctgacaatgttgaatctgggttgaataattatgcagaaaacattttaactttggcaggatctcaacaaacagatagtgacaagtggcagtctggattgtcaataaataatgttttcaaaatgagtagtgtacagaagatgatgcaagctggcaaaaaattcaaagactctctgttggaacctgctcttgcatcagtggtaatccataaggaggccactgtctttgatcttcctaaatttagtgtttgtggtagttctcaagagagtgactcattacctaactcagctcatgatcgagaccggacccaagacttcccggagagcaatcgtttgaaactccttcagaatgcccagccacctatggtgactaacactgctaggacttgtcctacattctcagcacctgtaggtgagtcagctactgcaaaattccatgtcacaccattgtttggaaatgtcaaaaaggaaaatcacagctctgcaaaagaaaacataggacttaatgtgttcttatctaaccagtcttgttttcctgctgcctgtgaaaatccacagaggaagtctttttatggttctggcaccattgatgcactttccaatccaatactgaataaggcttgtagtaaaacagaagataatggcccaaaggaggatagcagcctgcctacatttaaaactgcaaaagaacaattatgggtagatcagcaaaaaaagtaccaccaacctcagcgtgcatcagggtcttcatatggtggtgtaaaaaagtctctaggagctagtagatcccgagggatacttggaaagtttgttcctcctatacccaagcaagatgggggagagcagaatggaggaatgcaatgtaagccttatggggcaggacctacggaaccagcacatccagttgatgagcgtctgaagaacttggagccaaagatgattgaacttattatgaatgagattatggatcatggacctccagtaaattgggaagatattgcaggagtagaatttgctaaagccaccataaaggaaatagttgtgtggcccatgttgaggccagacatctttactggtttaaggggaccccctaaaggaattttgctctttggtcctcctgggactggtaaaactctaattggcaagtgcattgctagtcagtctggggcaacattctttagcatctctgcttcatccttaacttctaaatgggtaggtgagggggagaaaatggtccgtgcattgtttgctgttgcaaggtgtcagcaaccagctgtgatatttattgacgaaattgattccttgttatctcaacggggagatggtgagcatgaatcttctagaaggataaaaacagaatttttagttcaattagatggagcaacaacatcttctgaagatcgtatcctagtggtgggagcaacaaatcggccacaagaaattgatgaggctgcccggagaagattggtgaaaaggctttatattcccctcccagaagcttcagccaggaaacagatagtaattaatctaatgtccaaagagcagtgttgcctcagtgaagaagaaattgaacagattgtacagcagtctgatgcgttttcaggagcagacatgacacagctttgcagggaggcttctcttggtcctattcgcagtttacaaactgctgacattgctaccataacaccggatcaagttcgacccatagcttacattgattttgaaaatgcttttagaactgtgcgacctagtgtttctccaaaagatttagagctttatgaaaactggaacaaaacttttggttgtggaaagtaagtgggatacttggaatcaaggcatctctgtattacagtcttctttattttttagcatagaaagttggggatgtgttaattgtatttttaagaatatattctaaattctgtacttcaaataatagcacagattttacatctgattgacatagtgtatgttaatgtaagttttgctttccagtgattacctgatacgtaagcctatttgaacaaagtgagaatgaacttttgtttctaagaagtctttatcttgaagctatataacatgaaaagtgagctcaaattttttttagttgaagattacatataaagttgtgtctgattaatattcatcttttattgaagaaagtgccttctgatggccacataattcttaatgtcagctagtataatggtttacatttggacaaagtattgcttagtgttatttaagtagatttaagatctcaaagctaaagtgccaatttttactttcttcagccaatttgttacctcttttatggtttttaatttttatcaggactaacattttcagaaatagcaaggtgtgatctagtattagattcacagaactgaaaggttaattaagaatgttggttattttcacgggagcgtgtgatatttaacattaatattttatttgacactacagcctgtaatactgctctctttcaaaagcaagttttcagatttttataacagacccattttgttttatgaaacatgttcattacagaaacatgagaaaatagagataagtaaaaagaataaaagtcactattatcct

SEQ ID NO: 17211 - protein, 674 aa, Homo sapiens [sequence omitted]

SEQ ID NO: 17212 - DNA, 4688 bp, Homo sapiens
tttcataaatcatttgctcctgtcttttgctttaattgtcctatttgctataaatacttttttatactctacttttttattcaatttaatatgatcaagtatgttcgtcttttttgtatgttgacctttcggtgatatttttgttttttttaatttggggtgtgtgtgtgtgtggtggtggtggtggttgttatatagtactgatgtggtattacttgttcttgatactatagctctatagctttgtgattactagttcttgacatgttagggtggcatttactgcttgtctcctgttcaagtagcttttctttctagttaaaatgagaatgagattttccttaaaattaataaacttacctttttatattgagattaatcattcatttttttttgagatggggtctcgctatgctgaccaggctgttcttgaactcctggtctccagtgatcctcctatttcagcctcccaaagggctagaattacaggtgtgagccactgcaactggctatattaagattaatctttattctctatttacagcaagtatttgcccacttgtgttctgtgagcaaagaaatcaagtgtttttcctttgtaacgtagcacaattagtttctttgtcattttaatgctttcttgaataatttttttatcattaggtggcataattatcccagtattttatgttgttattattgatacaactttctaccaaacttttggcataaaatctaatgtatttttcaaattacctaatttttccataaccactttttgaatatcttcatttccttgctgaatttttatgctttaaaaaaaatcataaaatcttatagtcaatcaatttagagtatttttcttcacttccaatgatcttttttcaagttaagttgtctttgatatatacgtgtgtgtgtgtgtgtgtttgtgtatttctgctttgaatgggatttcgttatgttatattctgaactcttggtagaagtaggaaatatgtggttttagcataatggttttctgtctaccgactctcattgattcttcagttttttgggtcaattctcatattttcaccttaactaaccattatctgcatattataaaagccaatttcatattattagtttaatgtgaaacattaaagcatggttcatacttccagcaaaattatagtagtgaccgaggaattgtgtcttatgcgtaattttaataggggtaattctagttttaggattcctttgttacaaggaaatatccttgatcttgttcacgaagttcctcattaattaggagtcttaaaaaattagggttgtgtatcttcattacaaatgatttctgtaccagctgatccaaatttttcttagtaccatccatgggctgaaagaaaggctatttcttcgctgtgtgatcagtgtgtcattaactacccatttcttcatttatttagtcaaatttattgagatgataatttaatttttctcatgtcaaatactgaaaaagagtctgtttttttaattgttttcaactgttgggttagaaaggactcttacatattgctgagtgcattgtcaattggtttacagtttagaatgcaatttggcaaaagtagtaaaatgatctttcaagtttcataccttttggacagtaagtatatttctagaattaataagtgacagaaaataggccagaaatagtcatctcagcatgatactattatttacttcctaataggaccacattagaccttccattaaaatacttttaaatggatttttaaagattcttcccaccttaattttgatactttatctgcatcctctagtattcaattgttgagcatatatttgaatggctggatgatgattagaataaaagacttagatattcattaaggatgactgaacacataactgttgaattgtgtacctgagccaaatgcactagtacacagaataggtcgttcctctgtaacagtctcagagcaactgctttccaggggctaatgttattctgccatctactggttaaaattaaaagtctttgtttagctagattacagaaaatatatctcctttatcaaaacaacagtaataacaaaacccagaaatttttatagcacatgtgaaagttcaaagttggcagcttatataaattacataagtgaatattaaaaacttttggtaatttttggggtacggtagatcaaagagaagaattattttttatattacttaaaaatacagatttaaatagctatgacctttattttatttataaattcatatacatttaattttaaaatctgcaacatttcatctggattctaagcattcatacccaatacttgctttttcctttgagtggattccccataccatttttatttttagtttttagcagacagcctcatcacaaagacatgtatagagtaaatcttttccacagcagaaaggacgtaatatgcattatatctggttataagtaaatatgacaacctcataatatttaagaaatttttatattggtttgctcatttgggtatgaggatcaaatcatgactgctatagccacataattttcacccggccagccagacacacatatgcataagcatatacatgtgtttgatgtaaaacagcttttggaccagctgatccagatttttcttagtgccacccatgggctcaaagaaagtctatttcttgactatgtgaacagtaagaatggcatcaactacccatttcctcattctccatgttattgtctcagaacaaaatattctcttacaccaagcattttttccctcaagatggatgtgtataacaacaagtgatctcttaatagtgcctcctgaaggatatcaagagtgcacatatcttttctacatagaactgaaggagcaagattagatttcgtgcaatcttagaacaagatgtgtataaagctgttgacagcaactaagtaacccaaacttcagaagtttcgttgtctagagccccttctccaattgtaagtccaaagagtatgtctagctctttactggtccatcttccaaaagactattacaatacagccttacaatctcttataatggaagtttatcattttttgcctcatttcacccaagtgccagtcaacagagtacatgtttgtatgtggtggggatgggaggcaggtctaacttctactgattcaaacagctttatcttacttagggagtatactttatcacttagaagtcaaaacattcttccagccaggaattagtgatccattaaaacttatttctaattcatgtcaaatcatgaaccaaaacatactcagtataaaaacctaatgtgagtcagtgtaatgtttatttcttcatactaagcagtgtttacttcaattttttattactctctccatctttctccagataagaaaatcacagatttcacaaaacctttcatatatgtatatacacatacttgaagacatcaattaactcaaagattaaggaaaaagagtttttgttttgattttgttttttgttgttgttgttattgtttgttttttgagatagagtttcactcttgtcacccaggctggagtgtagtggtgtgatcctggctcactgcaatctccgcctccccagttcaagcgattctcctgcctcagcctccggagtaactggcattacaggcgcctgccaccacccctggctaatttttgtatttttagtagagacggagtttcaccatgttagccaggctggtctcgaactcctgacctcagatgatccgcctgcctgggcctcccaaaagtgctgggattacaggcgtgagccaccgcccccagccagaaaaacaatttttaattttcaaggctggctctccattaataatctctcccatgccctggactagctatactttatcctgcaaggggaataagttatggattccattggtatgtctactttgttcacttcttgggctgcaatatctacacttcccattcacccttaccacttacttagtagatagtctagccacttgcaacaggttcatggctaccatttgggaatgcctataggagatcaaggagatccattgaaactcagcccccaaatccaaagtcactttccttttgatatctgtagtttcatcatctgtcataaccatgcctacttatcatctgtaaaacaccctttctacattaagggatactcacattatgaattctagttgtggttgttttaaaatatattcacaaattttctcatgctcgtttctttcctccttttgactatgtgttggatttagtgattcccatctaatgaatacaatgaaacaatggtgtttaaattatagactaggtcataaaaaattgtgtacttcctccatgtttatctctcttctatcacttcctctagtacaagccagctgccatgttgtgagcacataccacatagctccatggagatgcccatgtgactgtgatgaagagctaagacttcctgtcagtggccgtgtgagtgacccatgttagagacagatccgccagcccaaacagaaccttcagacaactgcagccccagctggcatcttgactgcaactcatgagcgattctaagcccaccgaagctgctcttgaattattgattcacaaaaacttttaggtaataaatgtgtgttgtttt

SEQ ID NO: 17213 - DNA, 3943 bp, Homo sapiens
cttttttcccgggaactaagtgttaaacatttaccagcacaccactgcctagacttgttaggaaattcacaagtgagaagaaattctgtgattccaggagatgaaagagggaagtgtaatgagaatatcaacttgagtattttatccgttgctttctttaattgggtcatttcagagggtgggtagattttgttaagacagttgaaatatttaggtaggtagaggggtgagtgcagttgaagagtaaaggctgtttggggcagacaaaaggatgatagcactctttcaagtgctctgccaccagcagtaaaagtcgggagaaggacctagcaccaggacacgtgatctgtccggcgtaagcgagtgctgagtcaaaggcctgcaattcaggcccctgctctggggcacggtcagtttcagccaggcccaactctctttcccaggtccatggcgtggatggcacccagaatccagcaggggagtgctggtggatacacctgggagggcctggtggaggatcatttgcgtgcagaaataaggaaatagacatatttgagctggaagaaaatcttacatgtctgatccaattctctcatttcacagataaggaaaaggggccccaaagagtgaagaggggatgtcctgaggtcatgaggctggcttacagcaaggatctggaccagacagcagggtgggaccctcagctgtccccatacttgctgcttgatattggataggttatttaggctctatgtgttttctcataaacacatagaggttaggtaaaaatggtggtgtgagaatgaactaatacatgtaaagagcttgcatgtagtaagctctcaataaatattaataatactgggcacagtggctcacacctgtaatcccagcactttgagaggccaaggcgggtggatcccttgaggtcaggagtttgagaacgccctgacaaacatggtgaaaccccatctctactaaaaatacaaaaaattagccaggcatggtggtgggtgcctgtaatcccagctgctcgggaggctgaggcaagagaatcacttgaacctgagaggtggaggttgctttgagcccagatcatgccactgcactccagcctaggtgacagaaccagacttcatctcaaaaaaaaaaattaataatatagagcccttgtgttgacactattctcttttacagccagaaagagagaaagattacagaaaataaaaatatattaatatattaaaggcataatactgtgaattaatactgattaattcaatatactattatatcaaaaaccaggatactaataataaataatatatggaaaaccaccatacacattggtaaaacattaacattttcaaatctccaatccaagaattttccccaaatccagattgtgcaggtattttagtgaatgattcaccctacagaattacttattacatttttctttaaacttcaatggatttgtagctgaatgagggatcaggtaatcaccagacatcttggaagggcacatgatccctcaggccttttcttggagaatgtttaaagaaacctcttccttcccattagggaggccgaccatgagtccctttgtgttgacagtgaaggtgtctggggctacacctctttcacatgctctgccaccagcagtaaaagtcagaaggccctggcacagggcacacctgatctgttcggcataagtgctgagtcaaaagcctgcaattaaggccagtggctgggaggaggcctggtcccagcctctccttgatttgcctcaccccacccaaacacaggtcatgttcatcatctgctagccagcaaggaagatgtgtggggtacaggttacagggactgagcccggagcctgactttctgggctctaccactcgttgtcttcatttccaaaggcaaagcacttgacctctctgagcctccatttctcatccataaaatggggatgatgataaaagtgactgcttcataggattgttgagaggatcaactcaagtaatatgtgaaaagtggcacataataagtactctgtttcatgtttctaattaattttattttttttaggttttttactgtggtaaaatatatgtaacataaaatttactattttactatttttaagtgtaagtggcgttgaatacattgtggcattgaatacattcacactgtcatgcaaccatcaacaccatccacctccagccttcttcgtcatcccaaactgaaactctactcattaaacaataactcctcattcccgcttccccttagcctctgggaaccattgttctttgcccatttttaaacggaggttgttgctgggttgtgggagttctttattctggatattaatcctttaccaaatagataatttgattttttttcctattctgtgtgttgccttgactatgtcctttcatgcacaaaatattttaattttgatgaagtctagtttacctattttttcttgtattgcctgtgttttggtgttaattccaagaaatcattgcaaaattcaatgtcatgaaattttgcccctttcttctaagagttttatagttttagctcttatgtttaggtcattgatgactttgagttaatttttgtttatgatgtaaggtaatggtacaacttcatccttttgcatgtggatatccagttttcccagcactatttattgaaaaaaagactgtcttttctccattgagtggtcttggcatcctagttgaaaatcatttgaccctatatattaaggtttatttctgatttcattggtctatgagtctgtctttatgccaggaccactctgttttgattacggtagctttatagcaagttttgaaatcaggaagtgtgagaccttcaactttgttcttcatttttctggatgttttggctattctgggccccttgagatttgagaaagagttccctctactggcagatctaagacagtctgttgactcaggtacctgataatttttgaagatgcatttaagaagttaaactattgagaataaaaaaatcttagctaggctttattttatttttctgatcggttagagactcttggagacttctctttcttctcaatcaatttgactgaggtataattaaaaaaaaataaaacatactgatatggcttggctgtgtccccacccaaaatctcatcttgaattataatccccataatcatcataatccccacgtgtcaagagagagaccaggtggaagtaattgaatcatgggggcagtttccccgatgttgttctcgtgatagtgagtgagttctcacgagatctgatggtttatatgtttactagttcttcctgcgttaattttccttcctgccaccatgtgaagaaggggtcttgcttccccttcgctttcttacacgattgaaagtttcctgaggcctccccagtcctgcggaactgtgagtcaattaaacctctttcctttataaattacccagtctcggacagttctttatagcagtatgaaaacagactaatgcatatacagacacatacacctaagtaaccatcactatcgcaatcaggatatcaaatatttctatcaacccaaaaagttcctttgtgatttttgtagtcagtccccactcttgattccccatgccccaggcaaccacaggtctgctccccgtcatatagacgagtgttgtctgtgttcagatttcaaatacatggaattgcacaatatatgctcctatgtctaaatttttttcacttagcataatgttttcgaaattcattcatgttgtatttatcagtagtttttagcattgtatcgcactgtggtatttcattgtatatatcatcatttgtttatccattgaccagttgaacatttgggctatttccagtttggggctgttttgaataaaggtgccaagttc

SEQ ID NO: 17214 - DNA, 2687 bp, Homo sapiens
  CDS (349)..(1440)
acggcgcgctgggctcacactgtcccgccgcggacgggctttgtggttgggggcgcgcgtgcgagtgccagtgagagtgtgggtgcgcgctgtgggccgcggcgcgggtgggtggccgtgcgttcttgcgagccggcctgcaggaggcgaggctcccctggcctcccgcacccagcggcggaccgagcccctggagggaagttgccgcagccgcccgggccgccggccctcctgtcccgcgccaggtacacagcttctcctagcatgacttcgatctgatcagcaaacaagaaaatttgtctcccgtagttctggggcgtgttcaccacctacaaccacagagctgtcatggctgccatctctacttccatccctgtaatttcacagccccagttcacagccatgaatgaaccacagtgcttctacaacgagtccattgccttcttttataaccgaagtggaaagcatcttgccacagaatggaacacagtcagcaagctggtgatgggacttggaatcactgtttgtatcttcatcatgttggccaacctattggtcatggtggcaatctatgtcaaccgccgcttccattttcctatttattacctaatggctaatctggctgctgcagacttctttgctgggttggcctacttctatctcatgttcaacacaggacccaatactcggagactgactgttagcacatggctccttcgtcagggcctcattgacaccagcctgacggcatctgtggccaacttactggctattgcaatcgagaggcacattacggttttccgcatgcagctccacacacggatgagcaaccggcgggtagtggtggtcattgtggtcatctggactatggccatcgttatgggtgctatacccagtgtgggctggaactgtatctgtgatattgaaaattgttccaacatggcacccctctacagtgactcttacttagtcttctgggccattttcaacttggtgacctttgtggtaatggtggttctctatgctcacatctttggctatgttcgccagaggactatgagaatgtctcggcatagttctggaccccggcggaatcgggataccatgatgagtcttctgaagactgtggtcattgtgcttggggcctttatcatctgctggactcctggattggttttgttacttctagacgtgtgctgtccacagtgcgacgtgctggcctatgagaaattcttccttctccttgctgaattcaactctgccatgaaccccatcatttactcctaccgcgacaaagaaatgagcgccacctttaggcagatcctctgctgccagcgcagtgagaaccccaccggccccacagaaggctcagaccgctcggcttcctccctcaaccacaccatcttggctggagttcacagcaatgaccactctgtggtttagaacggaaactgagatgaggaaccagccgtcctctcttggaggataaacagcctccccctacccaattgccagggcaaggtggggtgtgagagaggagaaaagtcaactcatgtacttaaacactaaccaatgacagtatttgttcctggaccccacaagacttgatatatattgaaaattagcttatgtgacaaccctcatcttgatccccatcccttctgaaagtaggaagttggagctcttgcaatggaattcaagaacagactctggagtgtccatttagactacactaactagacttttaaaagattttgtgtggtttggtgcaagtcagaataaattctggctagttgaatccacaacttcatttatatacaggcttcccttttttatttttaaaggatacgtttcacttaataaacacgtttatgcctatcagcatgtttgtgatggatgagactatggactgcttttaaactaccataattccattttttcccttacataggaaaactgtaagttggaattatcttttgtttagaaagcatgcatgtaatgtatgtatgcagtatgccttacttaaaaagattaaaaggatactaatgttaaatcttctaggaaatagaacctagacttcaaagccagtatttgtttaggtcatgaagcaaacaatgctctaatcacaatattaactgtttaattaaaatgttgtaacaagtataaaacagggaatgtaagtttattaccaaagtgatatgtattccaaaaaagtcatagaagatgaagcactataatattgttcccatatatttaaaatacccaagtacattctaattaccagtatatcagaggaaaattttcgtagtctttgtaaaataatatactcatcatagaaaacttgaaaaatgcagaaatgtataaaaaagcaaaaatgattactgataatatcacaacccagaagtaaccacctttaaaaagcaacccccatgtatgcctatatgtgtattgtatactttttttacataattggagtcatactgtaaacagttttataagtagatctttttcattgcaaaattgccacattttcttatggcattaaaaattttacaaaaacataattttaatggctatattatattccatttaatggatgcaactcagtttatttaaccattcccatgttgttaactatttaggttgtttctaattttcattattataaagttgcagaaatttggtgt

SEQ ID NO: 17215 - protein, 364 aa, Homo sapiens
MAAISTSIPVISQPQFTAMNEPQCFYNESIAFFYNRSGKHLATEWNTVSKLVMGLGITVCIFIMLANLLVMVAIYVNRRFHFPIYYLMANLAAADFFAGLAYFYLMFNTGPNTRRLTVSTWLLRQGLIDTSLTASVANLLAIAIERHITVFRMQLHTRMSNRRVVVVIVVIWTMAIVMGAIPSVGWNCICDIENCSNMAPLYSDSYLVFWAIFNLVTFVVMVVLYAHIFGYVRQRTMRMSRHSSGPRRNRDTMMSLLKTVVIVLGAFIICWTPGLVLLLLDVCCPQCDVLAYEKFFLLLAEFNSAMNPIIYSYRDKEMSATFRQILCCQRSENPTGPTEGSDRSASSLNHTILAGVHSNDHSVV

SEQ ID NO: 17216 - DNA, 3259 bp, Homo sapiens
  CDS (446)..(919)
tctttctcgtggcaaatcccaatgtacacgatttcaggtctcagacgccatgcctctccagcccacgcccttaggcaggtgatggcagcagctaggaataaggtgtacatgatccacagccctgcggagccaggtcaagccgctgctatgagagctccagggtgatggggacgattctgcccagtgtcctcagtctgtcccctcaggtcatggtcccaagtgaaatgacagagttcacagccctggtcttggctgaggtccaggtcatagtaagggcatgttcttggggccctcgacctgaactctgaccctccgggcagggaagaggaggttgtcccctttggttgtcctggctttggagtcctttgcaaaaatattttgggccccctgccactggctgcagaaatggctcgacggggtgtgtggggacagacacccagaaggaatgtacttttgtggccttggtgtccgatggggctgggggagagtgctctccactgacccagcagcacacccatgtgcagtgcgcctgcatctgtgtgggggcagccacaccccttggctgctgcttccttgggctgcctttctgggggcatgtgactggacctacgaggtctgcactgagctccatttgaatgatacctttcctatcccatttcccccacggaagcaccgcttcagggttattcagtcctctgcctcatggctgaaattgctcatctcgtctgcagatgtctactatcctgtctacctaatgcactattatgtattgattctccatgagacagagagagagagagactatcagatagtttacacccaaagggtaggtttttgtatatttttccagccttttttattaaggggaaggggagagtttaaaaacccaaaccgttgtggttttaaggtgtttcatttttaaaagggagagagaatctatttaaagctatttcagatcagggattgtcatccttttttgtccaatgtattccttgttctttaaaaaaattttttttagaggaaactaatattagtctttgtgttcactaactcttctggtcacttgtatttatttattcattcattcatcagatatttgttgccatctgaaagaactggcccagtgggtctgaaagctcgcttgagaataggaaacttgagacctggccccctgtgggtaggagaacaaggaccacctgggttctccagtcttgaacgagaatctcactcttatcagaatgtttttcttaacctcagcgtatgatgaggaaatttacttatctctagctaggatttgacaaattccaacatcaaatgatcaaaacatttgccactgaggcttcactggtgagatccgttctccgtcctcgggtgcagtcccttgggggctgctcctcggactgcgccccgcacacctgttatcgagggtgtgagaagcgcctaagctggtgacatgtgatctgggacgccttcatttctcgggccaggagtagcagctgctaaggacagcagcttgcattgcgtggttttagggaagcagggtctggcttttaatatgaactgcaaaaagcagcttctcactgatatttttttgttgttgtttctggggggtttttttgttttgtttttaatgcctttgagtgcatattttcttcctcgtctgaaaccgaactcccaaagtggctttctttagccctggctggaaaaccacctctcaatagccttaagcaataaatagatgagtagagaatgtggcttcaactgggcttattaaagtaagtgtgtctagttttcacttgaacaagtgatagctgcagatggcgaaagaaacccatttaatttttgtagcttacaggtggtagaaacaaaaatgcaattttaaaaccttaaataccaaataccaaccattgcctttttttttttgagatggaattttgctcttgtcacccaggctggagtgcaatggcgcgatctcacctcactgcaacctctgcctcccgggtccaagtgattctcctgcctcagcctcccaagtagctgggattacaggcatgcgccaccacacccagctaattttgtatttttggtagagacagggtatctccatgttggtcaggctggtcttggattcccgacctcaggtgatccgcccacctcggcctcccaaagtgctgggattacaggcgtgagccaccatgcctgcccagcaataccaaccattgtcttttaaattcgtgttggcttctcagacagggagatcactggaataaaataaccgatggtcttattttgtcacacgtaaatcaaaagaaatgtcctctttgaagttgtaagactccaccaatgacagacacccttttcggtggactctgagtggtgtgtagtggttttatagccatggaaactaggagtatctcactttccactgagaacccctgcccccaatccctctaagttggggtgtggcagttgggcagggtcaagtgacccagccctggctgtaggacagccatatacagtgaagagttctagaaccagctaaaaatggaagtttgggtgtttaccaacaaggtacctctttatggatgcagccccagtaagctggctttaactctcagctccttccctgtctcctcctaatccaagcccttttataaaataaagccccttctgtcccactgctcacatacttatgtgctgctagtctctactcgaagttcgtgcaggactaatgcttttaaaatgaggtctaaaaaataattactagtcgagactattattctttaaacagaactgcctttttctactctttatgtaaactctttctattgtgttggtctaacaaggcactattttaaaattttttaatttttcccatagcacttaaaagagattttgtaaagaccttgctgtaaagattttgtaataaaatggtctaagggctctttttccaacattaccatttttaaaaaatgttttaaaagctagaagacaacttatgtatattctgtatatgtatagcagcacatttcatttatggaaatatgttctcagaatatttatttgctaatatatttatcttaagccatgtcttatgttgagagtgtgacattgttggaataatcattgaaaatgactaacacaagaccctgtaaatacatgataattgcacacagattttacatatttgcagaccaaaaatgatttaaaacaagttgtagtcttctatggttttgtaacaaattgtacacatgactgt

SEQ ID NO: 17217 - protein, 158 aa, Homo sapiens
MYFCGLGVRWGWGRVLSTDPAAHPCAVRLHLCGGSHTPWLLLPWAAFLGACDWTYEVCTELHLNDTFPIPFPPRKHRFRVIQSSASWLKLLISSADVYYPVYLMHYYVLILHETERERDYQIVYTQRVGFCIFFQPFLLRGRGEFKNPNRCGFKVFHF

SEQ ID NO: 17218 - DNA, 3024 bp, Homo sapiens
  CDS (484)..(870)
aattaaaggtggaaaagggggaaacgtccctgcaaagttctgagacacatcctcctgaagtggctcttcctcctgtgggggagccgcctgccctggaaaattccactgctctccttgagggagttaatacagttgtggtgacaacttctgccccagaggctttgctggcctcctgggcgagaatttcagccagggcgaggacaccagaggcagtggaatctccacaagaggcctctggtaagcgcaacatgaagagcttattctggtccaatggggaaataagcttagtagatattaatcactggtacattttagggtatatcaaaatccctttgagggccggtgattcctggaccctgcccacagagtttctggtgcaggtctagggcaggacctgagcatttatttgcatttctttttttttttcctttttttttttttgagacagtttctcccttgttgcccaggctagagtgcagtggcatgatctcagctcaccgcaacctccacctcccaggttcaagcaattctcctgcctcagccttcctgagtagctgggattacaggcatgtgccaccatgcccggctaatgttgtgtttttagtagagatggggtttctccatgttggtcaggctggtctcgaactcccgacctcagatgatcctcccaccttggcctcccaaagtgctgggattacaggcgtgagccaccgtacctggcaagagtttgcatctctaacagtttcccaggcagtactaaggatgctggtctggggaccacagtttgagaaccactgctctaaattattgatggcatcagaaggggatagcagtctggttttctttctttaccctttaagcaatttaaattaaaggcaaggtctaaaattaattgcctgcaactgagccacagaatggcattaataagttatttaaaatatttcccagcgttttcattgtaaaatgggtaatacctaccttatatgttggaagaattacagaaagtacaacaaaagaagacaaactgcttagcataatccaatgtgtgttaagagctgagacccctgagcttatttcatgaagccctttccagacactctgggttagtctttctaccatctgcccacctacaactatactacttccaactagatttttaagttttaacaggaactgtcttgtatgctttttgttttgttttgcttttgatatggagtctcgctctgtcacccaggctggagtgcagtggtgcaatcttggctcactgcaagcaccgcctcccgggttcacgccattctcctgcctcagcctcctgagtagctgggactacaggcccccgccaccacgcctggctaattttttgtatttttagtagaaacggggtttcactgtgttagccaggatggtctcgatctcctgacctcgtgatccacccgcctcggcctcccaaagtgctgggattacaagcgtgagccactgcgcccagcttgtatgcttttctaaaggagaacagaatagagaagaggttaagttaggatttcagggttcacatcttggagctggtcaatcaagggtgatgggccataatgcagtcttacatcagtatgtcatcctggtgtgcgggtacctgtctctttcctttgccattgccaggtgtcaggtggtgtgtggtccatgggaaaagtctccctgcagacacagatggttgggttcacctgcagtttcatgctggtcaagcctgggttccagaaaagcaagaagggagagtgagtgcactcttcttgcttcctgcctccagttttccacccccgcaccttgaagacaatatgttgtgccccaaatgtgttcacaggaacaaggtcttaataaaaagcctccaatgggaatagaatatcaggaaaaaggccacatctatggtaattaatggcagaaaagctggagagttggattctgcggtgctgctgacaagtgaactctggtcctctgcacctgtttatgggccatgcagactggcggggtggcagatgttagcctaagacccctagcagtgcctgttgctttgtgagtggagatagagactcttacatttaaaaatggaaaaacatttcacaaattaccataaattgtagttaatatgtagaaaaactcattcatactacttttctaaaatagacatgacttcagcagcagcttttttttgttgtattttgagacagtgtctcactgctgcccaggctggagtgcagtggtgcaatctcagttcagtgcaatctccgcctcctgggttcaaatgattctcctgcctcagcctcttgagtagctaggtacaggcacctgccaccacacccagctaattttttgtatttttagtagagatggggtttcaccatgttggccaggttggtctcaaactcctggactcaagtgatcaccctcctcagcctcccaaaatgctgggactatgggcatgagcccctgcgcctgaccttcaacagctcttttaagtgagttcttcagctaagcattgtgatggacttgagtaaaatggtagttggctcttgtgctcaattttctcttcctctgaacactgactactttaggagctgcttcattccaattgcaatttcataaaacgtaaagtattttaaggcaaagaaaggctgttaattccctccctcccccaaacacatgatttttaatattctaaacaatatttttcaaagttctcttaataacctgagatttctatggtttgactccaggatcaaaacacaagggactttgtattatttcacttataattgttttgtatatttctggagtttaaaatgtttaaggttgcttcccgctcataaatacataatatattgaatttaaaatgtgtttattaaccgattctccataaataaaaataagatgtgtatgtaaaataattcatctgttgtatttagagaaccatattcattgcatgcaaattttattgttagtgttcttaactcaagtaggagtaaaccaaaaagtgtg

SEQ ID NO: 17219 - protein, 129 aa, Homo sapiens [sequence omitted]

SEQ ID NO: 17220 - DNA, 2367 bp, Homo sapiens
  CDS (598)..(2205)
gaacaggacagcttcatcgagccctatgccaccacctcacagctgaggcctcgaccaaattggcagagtgagatgggaagaagatcttctttgccatcctttgaaacactggactatggggacgaagaggacatttaaactcagctgtcatccagcggcaaggaattgggggatgtcagtgcccgggaggacagaggaggccacagtgatgacctgtacgctgtgccacacagaaatcaggtgccattgttacatggggtgaacagtgaagacgatgaaaatatttctcatcaagatgggtttccaggctcccctcctgcaccacagcggacacaacaaaaagatggtaaacaccctgttctgaatttaaaggatgaaaaacctccattatgtgagaaacctccaccctccccaggtcccacattgttacaagatctttggggtgtcgcttttctggtcggaaatgtctgtggtgccagtgtgcctttgcctgagttcttgtcctgcgtccagaaagaatgagatataactggtagagcacgtcaaagatatacagaaataaccagagaaaagtttgaggcattaaaagaagaaaatatggacctaaacaatatgaatcaaagccttacccttgaactaaacacaatgaaacaagcaatgaaagaactacagttaaaacttaagggaatggaaaaagagaagagaaagctcaaagaggctgagaaggcgtcgtcacaggaagttgctgcacctgaattactttatctgcgaaaacaagctcaagaactggtggatgaaaatgatggattgaaaatgactgtccatcgtttgaatgtagaactcagtcgatatcagacaaaattcaggcatttgtccaaggaagagagcttaaatattgaaggcctcccatccaagggccctataccaccctggttgttggatataaagtacctgtcaccattgttgctggcttatgaagatatgatgaaagagaaggacgagctcaatgccaccctcaaggaggaaatgagaatgtttaggatgcgagcccaagaagtggtgaaagaaaatgaagaattgcaccaagagttaaataagagtagtgctgttaccagtgaggaatggcgtcagcttcagactcaagcaaaactggttttagaggaaaacaagttgttgctggagcagttggagattcagcaaaggaaagccaaggacagccaccaggagcgcctccaagaagtttctaagctgactaaacaactaatgctcctggaggcaaaaacccacggccaggaaaaggagctggcggagaacagggaacagctggagattttacgtgccaaatgccaagaactcaaaacacactcggatggcaaaatcgcagtggaagttcataaatcaattgtgaatgaattaaaaagccaattacagaaggaagaagagaaagaaagggctgagatggaggagttgatggagaagctgacagtcctgcaagcgcagaagaagagcctgctgttagagaagaacagtttgacagagcaaaacaaagcactggaagccgaacttgaacgagcacagaaaatcaataggaaatctcaaaagaaaattgaggtcctcaaaaagcaggtggaaaaggccatggggaacgaaatgtctgctcatcagtacctggcaaaccttgttggcctggcagaaaatataacccaggaacgtgacagtcttatgtgtttggcaaaatgtttagaaagtgagaaggatggagtgcttaataaagtcataaaaagcaacattcgcctgggaaagttagaggaaaaagtcaagggctacaagaagcaggcagcactgaagctgggggacatcagtcaccgtctgctggagcagcaggaggacttcgccggcaagacagcccagtaccggcaggagatgcggcacctgcaccaggtgctgaaggacaagcaggaggtgctggaccaggcgctgcagcagaacagagaaatggaaggtgaacttgaagttatttgggaatctaccttcagggaaaaccgaagaatccgagaacttctccaggacacactcacgaggacaggcgtgcaggacaaccccagagctctggttgcccccagcctcaatggcgtctctcaggcagacctgctggacggctgcgatgtctgctcctatgacctgaagtctcatgcccccacctgctagaatctgcgggagcccgtggtgtagcctcctctggcctgaaaggtctgcctcacacaggccttccctgcagggcagcccatggtggcagccggaggtgcgtaagcccactgaacgctgcagggcagggaagaaataaatggtctcatagtttaatccatt

SEQ ID NO: 17221 - protein, 536 aa, Homo sapiens
MDLNNMNQSLTLELNTMKQAMKELQLKLKGMEKEKRKLKEAEKASSQEVAAPELLYLRKQAQELVDENDGLKMTVHRLNVELSRYQTKFRHLSKEESLNIEGLPSKGPIPPWLLDIKYLSPLLLAYEDMMKEKDELNATLKEEMRMFRMRAQEVVKENEELHQELNKSSAVTSEEWRQLQTQAKLVLEENKLLLEQLEIQQRKAKDSHQERLQEVSKLTKQLMLLEAKTHGQEKELAENREQLEILRAKCQELKTHSDGKIAVEVHKSIVNELKSQLQKEEEKERAEMEELMEKLTVLQAQKKSLLLEKNSLTEQNKALEAELERAQKINRKSQKKIEVLKKQVEKAMGNEMSAHQYLANLVGLAENITQERDSLMCLAKCLESEKDGVLNKVIKSNIRLGKLEEKVKGYKKQAALKLGDISHRLLEQQEDFAGKTAQYRQEMRHLHQVLKDKQEVLDQALQQNREMEGELEVIWESTFRENRRIRELLQDTLTRTGVQDNPRALVAPSLNGVSQADLLDGCDVCSYDLKSHAPTC

SEQ ID NO: 17222 - DNA, 2396 bp, Homo sapiens
  CDS (304)..(873)
atcactcaagatggctgcccccatcaagatgaccggggtgtgccggggggaaaggggcagcatgatggtctgagatggtgtagcgtcggaccatgtggaagtttctgaggctggggagccggataatggggggtggggcccgttggggggtaaaggggcaatagcgtcctttcacaggctaacctcggctcttcccagtcctctggactaaaatggggaacacattgggcctggcaccaatggggactttgccccgccggagcccccgccgagaggaacccctgcccaaccctgggagcttcgatgagctgcaccgtctatgcaaagacgcagcaggccaagttcctgacatggcagtttgatggcgagtatcggggagatgactacacagccactctgaccctaggaaatcctgacctgattggggagtcggtgatcatggttgctcacttcctgcagagcctcactcatcggctggtgctgggaggagagctagtttatcaccggcggccaggcgaagagggggccatcttgacactggctgggaagtactcggctgtacactgggtagctacattgaatgtgggatcaggcggggcccatgcgagttactaccacagggcaaatgaacaggttcaggttggagtggagtttgaggcaaacacaaggctacaagacacaacattctcctttggttaccacctgactctgccccaggccaacatggtatttagaggcttggtggatagtaactggtgtgtaggtgctgtgctggagaagaagatgccccctctgcctgtcaccctagcccttggagccttcctcaatcactggcgcaacagattccattgtggcttcagcatcactgtgggctgaggttgtccagagccagcccccacagcagctggaacctctgagtcaggtgccctagggccaaagactaggcccctcttcagagcccaccttgctgggtgatctctaggacccaggagcagagtggtggacaggaccatgccctcctcagaactggagctgccacaggggcagttgatgaggcagaggtttgaggatcccccctctgctaccagccccagtatcaccttccccatgctcttgtggctgtggactaagggagaaggattaaggggtatggctgaattcccccggcaccccttgccctcaggcttccttcttcctttccctttggttaatcctgcatgggattagctgaccatcctgttttccatcccagagcctcccaaggcagggaaagtagggctgaagggctagatgtttggtctcaggaagtggggcccacccattcccagaaggagcttctttacctcttagccctgaggtttcctccttcccatcttctgtgcttccagagaacaactttgttcctatggtcacccccactatccccatgaccgcatgaagaggcagttattgctttagtctttcattgcaaccactgggctccctttgaacccggcccaatctttggtcccagcattttcccactccagtgtatccagggtgttccaggtgagctggggaaggaagtgagcatggcctcagctgcagatctcctggagcagcggcatcatggcagacaggccctggatgtgctggatttggtacccgtaggcctcattaatgctccggagctcagccagcaggcctagcaacttcgcatacagaaacctttggaggaagtagtggggttgccaggaaaacaggagggaaataaggcagttgggagtcttgtctctaggccctgatcccctgaactattcctcagtgaagccaggtctgaacattagagaaaatcatgctctggtatgacagactatcagaggttccaaaggtcctccagggggcctcggtctgacactgtcttctctcaccatgctcagttttttctgaacccagagctctgagagccgagtgtgaagaaagctccagacttggccagaactccaaccatgtggaatctgagggcctggccttctagagcaggttctagaaggtggatgtgttctatggtataaagcatcccctttctggccaaactagctcttggaggaacgagcaaaacagaagcggtgcatacctcagagcctggataaatcacagactattgaacctggaactggctttgaccatgaaactgtgaatggccctaacttcaagggaaatgagaaatcgaaggaattggcccaatggcgaggagaggaaaggccaagggaagagaaaagtctgcgttagtctggagaagttggactagtgaggtaatggatgtcatcaatctcaggaatgctattacccagagcctctgagctactactttgcatctgtactgaataaaaaaaaaatctggaaaaagtgagatg

SEQ ID NO: 17223 - protein, 190 aa, Homo sapiens
MSCTVYAKTQQAKFLTWQFDGEYRGDDYTATLTLGNPDLIGESVIMVAHFLQSLTHRLVLGGELVYHRRPGEEGAILTLAGKYSAVHWVATLNVGSGGAHASYYHRANEQVQVGVEFEANTRLQDTTFSFGYHLTLPQANMVFRGLVDSNWCVGAVLEKKMPPLPVTLALGAFLNHWRNRFHCGFSITVG

SEQ ID NO: 17224 - DNA, 2488 bp, Homo sapiens
  CDS (686)..(2287)
cctgtcgccgccgcctcgggcgggtgggctgactggcggcaggctcgccgcggcgcggagtcccggctgcgggatagaccgagggccatggccgcctctcccggacccgccggcgttggcggcgccggagcagtctacggctccggctcttcgggcttcgccctcgactcgggactggagatcaaaactcgctcggtggagcagacgctactcccgctggtttctcagatcaccacgcttattaatcataaagataataccaaaaagtctgataaaactctgcaagcaattcagcgtgtaggacaagctgtcaacttggcagttggaagatttgttaaagtaggagaagctatagccaatgaaaactgggatttgaaagaagaaataaatattgcttgtattgaagctaaacaagcaggagaaacaattgcagcacttacagacataaccaacttgaaccatctggaatctgatgggcagatcacaatttttacagacaaaacaggagtgataaaggctgcaagattacttctttcttcagtgacaaaagtgttgttgctggcagaccgagtagtcattaaacagataataacatcaagaaataaggttctcgcaactatggaaagactagagaaagtgaatagctttcaagagtttgtccaaatattcagaatttggaaatgaaatggtggagtttgcacatctgagtggagatagacaaaatgatttgaaagatgaaaagaaaaaggcaaaaatggcagcagctagggcagttcttgaaaagtgtacaatgatgcttctcacagcttcaaagacatgtctgaggcatcctaactgcgaatcagcccataaaaacaaagaaggagtatttgaccgtatgaaagtggcattggataaggtcattgaaattgtgactgactgtaaaccgaatggagagactgacatttcatctatcagtatttttactggaattaaggaattcaagatgaatattgaagctcttcgggagaatctttattttcagtccaaagagaacctttctgtgacattggaagtcatcttggagcgtatggaggactttactgattctgcctacaccagccatgagcacagagaacgcatcttggaactgtcaactcaggcgagaatggaactgcagcagttaatttctgtgtggattcaagctcaaagcaagaaaacaaaaagcatcgctgaagaactggaactcagtattttgaaaatcagtcacagtcttaatgaacttaagaaagaacctcatagtacagcgacacagctggcagcagatctattaaaataccatgctgatcatgtggttctaaaagcattaaaacttactggagtagaaggaaatttagaagctttggctgaatatgcctgtaaactctctgaacagaaagagcagcttgttgagacctgtcgattgttacgacacatatctgggacagaacctctggaaataacctgtatacatgcagaggagacatttcaggtgattggccaacagataatttctgctgctgaaacattgacattgcatccatctagtaaaattgctaaagaaaacctagatgtattttgtgaagcttgggaatcccaaattagtgacatgtcaacactgctgagagaaatcaatgacgtgtttgaaggaagacgaggagagaagtatggctacctttcacttccaaagccaatgaagaataatgcaaacctgaaatcattaaagccagacaagcctgactctgaggagcaagccaagatagcaaagcttggacttaagctgggtttgctcacctctgacgctgactgcgaaattgagaagtgggaagatcaggagaatgggattgttcaatatggacggaacatgtccagtatggcctattctctgtatttatttactagaggagaggggccactgaaaacttcccaggatttaattcatcaactagaggtttttgctgcagagggtttaaagcttacttccagtgttcaagctttttcaaaacagctgaaagacgatgacaagcttatgcttctcctggaaataaacaagctaattcctctatgccaccagctccagacagtaactaagacttctttgcagaataaagtatttctaaaggttgacaagtgtattacgaagacaagatccatgatggctctcttagtccaacttctttcactttgttataaactgctgaagaagcttcagatggaaaataacggatgggtctcagttacaaataaggacactatggatagtaaaacttgagaagcttttggggtcagatctctggaacatcatgtgatgaagctgacatttttaaaaatcaaatgatcctttatcttttcagaaattcatcaattttataaagaaaacaatattgaaattttgctctattttctgatcatgaaactgattgtaaagctttttgacaactaataaatgtcttggtaattgctagattct

SEQ ID NO: 17225 - protein, 534 aa, Homo sapiens
MVEFAHLSGDRQNDLKDEKKKAKMAAARAVLEKCTMMLLTASKTCLRHPNCESAHKNKEGVFDRMKVALDKVIEIVTDCKPNGETDISSISIFTGIKEFKMNIEALRENLYFQSKENLSVTLEVILERMEDFTDSAYTSHEHRERILELSTQARMELQQLISVWIQAQSKKTKSIAEELELSILKISHSLNELKKEPHSTATQLAADLLKYHADHVVLKALKLTGVEGNLEALAEYACKLSEQKEQLVETCRLLRHISGTEPLEITCIHAEETFQVIGQQIISAAETLTLHPSSKIAKENLDVFCEAWESQISDMSTLLREINDVFEGRRGEKYGYLSLPKPMKNNANLKSLKPDKPDSEEQAKIAKLGLKLGLLTSDADCEIEKWEDQENGIVQYGRNMSSMAYSLYLFTRGEGPLKTSQDLIHQLEVFAAEGLKLTSSVQAFSKQLKDDDKLMLLLEINKLIPLCHQLQTVTKTSLQNKVFLKVDKCITKTRSMMALLVQLLSLCYKLLKKLQMENNGWVSVTNKDTMDSKT

SEQ ID NO: 17226 - DNA, 2454 bp, Homo sapiens
  CDS (90)..(1481)
tcattgaagaaatagttaaggatggacaaccggaaattttctacacattttggaattcagttactcaggcactttcttctcaatttcatatggcaacaaactcttcgatgtttttgaagcaggcatttgaaggagaataccctaaattattacgtctttataatgacttatggaagcgtcttcaacaatacagtcagcatatccaagggaattttaatgcaagtggaactacagacctctatgttgacctacaacacatggaagatgatgcacaagatatattcataccaaaaaagccagattatgatccagaaaaggctttgaaagactcactacaaccctatgaggctgcttatctatcaaaatccttatctcgactcttcgatcctatcaacttggtttttcccccgggtggtcgtaatcctccttcctctgatgaacttgatggtattattaaaactatagcaagtgaactaaatgttgctgctgttgatacaaacctcacattagctgtgtcaaaaaatgtggcaaagaccatccagttatacagtgtaaaatcagagcagcttctctccacacaaggagatgcaagtcaggtgattgggcctcttactgaaggacagagaagaaatgtggcagtagtgaattcattgtataagttgcaccaatcagtaacaaaggttgtttccagtcagagctcattcccactggcagctgagcaaactataatttcagctctaaaggctattcatgctcttatggaaaatgctgtgcaacccttactcacttctgtgggagatgctatagaggccataatcatcaccatgcatcaagaagacttttctgggtcattatccagctcaggaaaacctgatgttccttgttctctgtacatgaaggagctacaaggtttcattgccagagttatgagtgactattttaaacactttgaatgcttggattttgtctttgacaacactgaggctattgcccaaagagctgttgaactttttatccgccatgccagtctcataagacctcttggtgaaggtgggaaaatgcgacttgctgctgattttgcacagatggagttggctgtgggtccattctgtagacgagtatctgatttaggaaagtcctatcggatgctgagatcattcagacctctgctcttccaggcaagtgaacatgtagccagtagtcctgcattgggggatgtgattccgttcagcatcattattcagtttttgttcacgagagcacccgctgaactgaaatctcctttccagagggcagagtggtcccacacacgcttctctcagtggctggatgaccatccatctgaaaaggacaggctcctcctcatcaggggagccctggaagcttatgttcaatcagtgagaagtagagaaggcaaagaatttgcaccagtttatcccataatggttcagctgcttcaaaaggctatgtctgctcttcagtaatgacatgaaatctttgttcatctccactttgtgctaacccattcatagttggcagttaaacacatactccaaaagactgctactatctactattttaagaatgtaattgattgttcggtatttcctatcgacgtttatttacctctttagcacttatactttagcataaaaaatgttgagttatcaccacctttcaattccatggacctgatttttccagaaagatgttttcctctttcagatttttgtacaaggctaaaatgtctttcccatccataaccaagtcctcctatgggtacataaacccaaagtccccactccttttaaagggatatgatcaagttataacatgtaccctgcttcccccaaccctgccttcttcactaaataagcatgtagctcagtggtttccaaatttggctgcacattcataccaatcaccaggggatttttttaaaatcctgatgcccaacttgcactccacattaattaacatgtctaggagtgggagcctgacagacaccactattaaaaaaaaaaaaaatccccaaaatgattccaatagacaacaaagttaaggaaccactggcacatcccaagctaagatacaaggttaaatggcctttttaagtatgtcatactggatctttaaataaagcaaggcttttgttacactttgtcatgttattaaaagcagacctttgggctgtttaaccgtgtaacaaaaatgccacgtgaaaaataaaaatttttattgtatagcaattctctataaatagtagataatctaagtccttattttctgatggctcttgttccactattaacattgtttttaatttttaaaatcctatcagcagcctcctaattagcagtgttaggaatttgccttatgttttccatctcatctcctgaacctgttattctgagaactcataaataaaattcagccaagattaatcaatcaatc

SEQ ID NO: 17227 - protein, 464 aa, Homo sapiens
MATNSSMFLKQAFEGEYPKLLRLYNDLWKRLQQYSQHIQGNFNASGTTDLYVDLQHMEDDAQDIFIPKKPDYDPEKALKDSLQPYEAAYLSKSLSRLFDPINLVFPPGGRNPPSSDELDGIIKTIASELNVAAVDTNLTLAVSKNVAKTIQLYSVKSEQLLSTQGDASQVIGPLTEGQRRNVAVVNSLYKLHQSVTKVVSSQSSFPLAAEQTIISALKAIHALMENAVQPLLTSVGDAIEAIIITMHQEDFSGSLSSSGKPDVPCSLYMKELQGFIARVMSDYFKHFECLDFVFDNTEAIAQRAVELFIRHASLIRPLGEGGKMRLAADFAQMELAVGPFCRRVSDLGKSYRMLRSFRPLLFQASEHVASSPALGDVIPFSIIIQFLFTRAPAELKSPFQRAEWSHTRFSQWLDDHPSEKDRLLLIRGALEAYVQSVRSREGKEFAPVYPIMVQLLQKAMSALQ

SEQ ID NO: 17228 - DNA, 2566 bp, Homo sapiens
  CDS (756)..(1454)
aaccactaccacgtccccaagtgcaacgggacccacggaactacaggtgtggggcagggtgagcgtggaagaagggacgcggatgggggtgcgctttgcagacgatctggagactgctgtgtgttgagggaagatacgaagtcgcgggagcagttggggactcaatgtgtgggcaacaagggtcctgctgagctcaggagctgcacggaatggtggcagtcaccttgccagtgcagcaggcatggatcagactgcaagctaggggcacgaggcatcagttgggaagaggggacgcacagctaggcttgaggcctcttcatcgggatgtccccaggccccccagcccaggcccagcataaaggccgtgttggggggcccccctgacccaaggggggcttcatgcgccacgtgcaggcggagccgtctccatcctcagagccggaggctggcccttcacagcctccagtcaggcagggggccctccagggtggcctgctcatgggctacagcccagcagggggggcgacatcccccggggtctaccaggcccctgccccaccaagcgaaggctgcttcctgctggagaagccccagatgtcagctctgaggaagaggggccagcccctcggaggcgccggggatccctgggccaccctactgctgccaacagttctgatgccaaagccacacccttctggagccacctgctgcctgggcccaaagagcctgttttggacccaacagactgcggtcccatggggcggaggctgaaaggagcccgtcgcctgaagctgagcccccttcgaagcctccggaaggggccaggcctgctgagcccccccagtgcctcccctgttcctacccctgctgtcagccgtaccctgctgggcaactttgaggaatcattgctgcgaggacgttttgcaccatctggccacattgagggcttcacagcagaaattggagctagtgggtcatactgcccccagcacgtcacgctgcctgtcactgtcacattctttgatgtttctgagcaaaatgccccggctcccttcctgggcatcgtggatctgaaccccttggggaggaagggttacagcgtgcccaaggtgggcaccgtccaagtgaccttatttaaccccaaccagactgtggtaaagatgttccttgtgacctttgacttctcggacatgcctgctgcccacatgaccttcctgcgccatcgcctctttttggtgcctgtgggtgaggagggaaatgctaaccccacccaccgcctcctctgctacttgctgcacctcaggttccggagctcccgctcaggccgcttaagcctgcatggagatatccgcctgcttttttcccgccggagcctggagctggacacagggctcccctacgaactgcaggctgtgaccgaggcccctcataatccacgttattcacctttgccctgattgccagcactctgaacccatgcgggctaatgacctgcccatcctgctccatcttagagaacatatatggagagacagcaagagacccttcaggcttgaattaaagccctcaccatgctcacgcccaaatggattatttgggtgtttaaagcttctgattcttactacaccctgccctacttcgggtactccatgtgcctgtcccctcccttgggtttcccaggccagcttaggtagtagggaggaactggagctaccctgagattttctcaagttcccaggcaagttatgccagcgttgcctccctgtcctgggcaggggccacttgttattttatttatttttaatttataatttattcaaattggattgccttggtaacctcccacacctgataattggcatcactcctccccgcttcccactctcagatattgctccaacctcaggagttgaagaggcttatgcggtgggggcaggaggagaactgctttccctcagctgagggaagaggggctattccagagggactgagtcagtagccaaagactcagcttcccctgtccttccccagtcccttcacttcccctaccctctgacctatctctgaaagccaagttatgcgtatgtgtgtgtgcacaagcttgtctttgtgtggtatgtgtgtgtgagtgtgcatgtatgcacacacacaggggttaaccacccctcacctagggctccagactccagttgtccctctcctcctacctgtgtctccttgttttggggtcctgactgaagaaggtgtccagggggcagagtcagggccaagcactggggtgcctcctctcacctggccagactctgacccacctacctcagctggggtgaggggcacccctcaaactcagtcatgtggttccaaactaccccattccccactccagactctgacccagcctcagtcctaactcctggggctgggctgaggggaacaagcatttgctgaaacttgaaaaaacaaagcaaatcaaaaacaggaaaaaattgtacctggtacttttttttagaaaaaaagattaaaaaagaaagaataaattcttgtttggaaacttgaactaagctct

SEQ ID NO: 17229 - protein, 233 aa, Homo sapiens
MGRRLKGARRLKLSPLRSLRKGPGLLSPPSASPVPTPAVSRTLLGNFEESLLRGRFAPSGHIEGFTAEIGASGSYCPQHVTLPVTVTFFDVSEQNAPAPFLGIVDLNPLGRKGYSVPKVGTVQVTLFNPNQTVVKMFLVTFDFSDMPAAHMTFLRHRLFLVPVGEEGNANPTHRLLCYLLHLRFRSSRSGRLSLHGDIRLLFSRRSLELDTGLPYELQAVTEAPHNPRYSPLP

SEQ ID NO: 17230 - DNA, 2629 bp, Homo sapiens
  CDS (180)..(497)
aaaagaaaaaagagagtattaaaatttctcattgtaaaatctatattttagaatcactctacaatataagcaaataatgtgttttttactgattacatgccttttttttggggggggggggttctttttttttgagacagggtcttgctctgtcgcccaggctggagtgcagtggcgtgatgagacttcaatgcagccttgatctcccgggctcaagtgattctcccgcctcagcctcccaagcaactgggaccacaaggtgtgtgccaccatgcctgggtaattttttgtttttttgtggagatgcgggtctcactgttttccaggctggtctcaaattcctgggctcaagtgatcctcccacttcagcctcacattgttgggattacagtcacgagccactgtacccatccatatgtcattctttagacacactacttactaaatttctctttttaaaggatatactgaatttccggttgagccaacttaactgctaattttctattttagctttaaaacattgataagcaacatgaagcaatctagaacttaacctttaaatggctttattaaagaaatccagctatgaaaatcatgcagaaatgattatttacaaacaatcctaccagcacataagaaattcttcctctattctgaaataccatcttctcacaatatactttgatgttatgaatcaatgtctgttctcgaacattatttgtctttctccattaaacaataccaaaataaaatttccagcacaactaagtattgttgacgataaggggatttaaaaaaaaattcttttaaaacagaagcttatatacaacttagaatctaaaaccaatagatttatggtaaaccttaagactgaaccaaaacaaacaaaaaccaaagttttaatcatttaaaaatcatgtttattgaggtacaacttacttatagtaaaacctgcccttttcagcatatagcactgagtcttgacaaatgcacagttacgtaccaccaccgaccaaggcctggcacattttcacctcctcaaagttctccctggctgcttctcccactccttggcaaccgctaacctgttttctgtccttatagttctgcttttttcagagtgtcatataagtagaatcacactgtacatagtattttgagtctgacctctgtcaactggcataaggcatttgagaattatccatgttgctgtactggcagtgcattcttttttattgctgagcagtattcaattgcatggctgtaccagtttattcatttgccagttgaaggataactgagatcttcctcgtttttagcaattttaaagaaagtttctatgaataattgtgtacaggtttttaattaaatgttttggagatataattcatataccacataattcacctttttaaagtgcataagtcactggtttttaatatattcacaaggtttgtgcataggtttttgtgtgaatactggttttcattcctcttggataaagatttaatttggtattatccttccagacacctttctgtgttttcatacgtatatatgtatgacagtttgaccttaggcagagtagcattttcaaaattttacatggggaaattttctagagttaaagccattttatttttgtgttctgtctggttttatctgcgtgttatttacaatctgctgcgtaacaaattacaaagttagtaccttaacacatatttatttcacagtttctgtgggtcaggagatcagaaatggttctatttcaaggtctctcacagggctgcaatcaagatgttggcatggctggggtctcatctgaaggctggactggagaagaatctacttccaaacttatgtggtagttggaagaatttagttcctcaaggccgctaaactgatggcctgtgttccttgcctatgggatggtagcttgcttcaacaaagtgtgcaagcagagaagacagagagtccgctagcaagatagaagccacaatctcttgtaatctatcatttttgctgtattctactggttaaaaataactcattaggttagcctactggctctcaaggggaagagattatacaaaggcatgaatttctggaggagggaatgagggcaaagaattctgagaagtctgtcttccacaatctgaagaacttctagaaagtaggaggaagcgatattgcttagggatggacaacttggcactggttatgtatttcaagtgaggtaaccttgttcccaagaataaagagaaccagacgactgtaaacatttccctaaactgaaatgcagactgttgtatgttcccctgaaatgaatggtgtaagctgaatataagatttttgacaaaaattttgctgtgttctcagatctggcaggcccctgcccttgtgcaaacaatgttcctggcagctattcatctccttaggtaaagaagaattggagaaaagctgtgctaagataggatgcatttgctcttgccttggaaggttgttttctgataaggttctatatcctctgcaaatcaaatcaggcacttacagtgtgagtatgcattctcttcctgccagtctggagatgatcaaaaagcctataacaggcttggcctattttcct

SEQ ID NO: 17231 - protein, 106 aa, Homo sapiens [sequence omitted]

SEQ ID NO: 17232 - DNA, 2529 bp, Homo sapiens
  CDS (1517)..(2188)
atcagtgggccagagctcgccgggtggccgcaagtacgccggcccagcccgcagcgcgcccagccggaaggcggggaatccggctgacaccgcgccccgggttcccaggccacctcctctgttctgaggctgggctgggagaccgtggggctgtgaggagcgcatagaaccgtggtggagggcgaggctgggccaccggttcttcaagctcggaatggagggggaagagcgcagagggctggctgggaggaactcgggtgggcgtgaaggagacgagggcaagaaaagaaacttcccttcttccaggagggtcttcgaaaccctctccccacagcccctctcgtcattagcatggcaatgaggagtttctgtaattcgacttggaggggcggatgagccctggaaactcagagctcgccggaaaaggccgggggcggccgggctcttcttccccaccttccctctctcgtcgctctccgcccctttctctttcccactcagttttgcaccgggagccctccgggatgcggagctactcgaccgccggatttttaggggtaggaggcgggggagagagatgacgctggcggacgtggccagcgcgggggccgggcggtgcgctgcaggccatctgccggcgccctgagacccaggagcctccgcgctcccgcgtgggcctcagagggccggtccacagctccaacatagtagctgaactcccttcgttgcgttcctctttttctggaggggaatgttagaagagagagagagcttccttttataaccttcctcattctgctgcacgtctagagtgggtgtgggggctggcaggtgggaggggcggtggacaaatggctgatggtggacgggacactttaccccaacgacacctcctcccctttccaactggctgtgtagttgcttatgagaaccttcaagtccttccctagagagacacatgcaaatctgagcctcatcccaggccaggggtcctgttcctcatcacccttcttccctgaggctgctgaggtcgttaaattgttgtttactattaggtttcacgtcaaccctgggcttgtagagagaaaaagccaaacggagaccaagaattgatgcagtcttgggtaggagaaatcgagagcttgtccaggaagctttgctgtataaattataagcaatgctgtataaattttactccaaccatgtgtacaatgttggaatcagatgaaatttatagtgaatgaatgtatgtgggtttggggtttccactcctcttcagcctttcctcccgttagaacaaggaaggttttttttttttcaaggaaggtacatttcaaatatgttagtcaccctttcagtcttctgtattctgttctccacgtaccgaagttcccccaaacctgtcctctcaagagaaaaaacccatgctgactctggactccctcagtaacaatgaaacattctccccaaacatttcctttcagaatagtatttgtgactttgatccatcccaagcatggttaagagggagcacgggcaggaaaggcccactttctggggttgggcagccacccctgccccagtttcggctcctgggaatcctccgactggagaaggggaaaggcaaggcagtcctcctggaggcggcttccttgggagcaccagcttccagcggcggggagagaaggagctcctgtgggagagggggcaggatgtgagtaggtcggtgctggctatgcgagcaatcctccctccaagcctgagcaagtcggtacattttcccccgctgcctcattcctgtaccttggttgccctcctcagcctgggtttgcaggaccccctcggctgcagggcgcctgccacaaagccgaccccggcaggagccactctctctgctagttcgctgcctcggccctgctctccctcagcctctcttcttctctcctggcctcttttctggggcatcctgggtggagtgtttttcttgggatcacgagcttgcactcgcacacaggcccgcagacacacaggcccggcggccgcccttctccgcttactgttcccggctccccgcaggccgggtgctcgcagccgggctggctatgcctcgcctggcagcccagagcgccgctccccgggaacagcacacaaaggcagcctcccctggcctctagcccttaggcttctgtagctcagttctttccccacacccctcccccaagaaattctgggggccgttccaccgagtaggagatccttggccctctaggcaagtaggtcagcgccccaagactggagctggtctctttcaacgccttgggagactgggtgaaaggcgagcttggttacgcttaaaatgatcgcctacaagcggttctcttggctcaaaacgcctctttcagggctcttatgctagaaaggaaaggaataaggaggagataaaatgacgccgaggccctgaactgttcatggcatccgcggctcagccaagctgttgttttaaaagagcaataaaaatgaattatgact

SEQ ID NO: 17233 - protein, 224 aa, Homo sapiens
MVKREHGQERPTFWGWAATPAPVSAPGNPPTGEGERQGSPPGGGFLGSTSFQRRGEKELLWERGQDVSRSVLAMRAILPPSLSKSVHFPPLPHSCTLVALLSLGLQDPLGCRAPATKPTPAGATLSASSLPRPCSPSASLLLSWPLFWGILGGVFFLGSRACTRTQARRHTGPAAALLRLLFPAPRRPGARSRAGYASPGSPERRSPGTAHKGSLPWPLALRLL

SEQ ID NO: 17234 - DNA, 4650 bp, Homo sapiens
  CDS (1457)..(3634)
gtcacttttgaagaatggtgggacagtagatggtggcagttgatttttcattttctaactttgcagaataaaaattgaatgatcctgtattggtcccccaagtatttcagagctcccggagtctgggaagtgccatggtaaatagtcacacaggccagatgagagactgaggtgtgcatgttctgtgggaggggaagtgtagcctgcgggtgtggaatggtctgggtggccgtgggaaacgtggagagagccctggaaacagccccgctttgtgccagtgaggagtcggggaagcagctggggagacggggctggagagcctggggagaggggaagctcttctggagggagtgggtgcaccggcgcactgcgcagcctcctagtaaagggcctgcagacccagctggcctcatgcctggaggccttaggcgactctgaggaaggcagttccagagcagtgagtcaggaccagatgcagtgggttgcaagtagaaccaggagcagagactggatgtggtgtattgtttcagaaccttccagcgtgagtagctaccatatggatacgtaggcgtgggaggcgccaggcagccccgggtccgggtgagaagaggccccagagctcagagtgcctcagatcccagttagtgagcggtgcgggggacatgaatgagggcagggctcctgaccccgaagcccacgtctgactccgctgtcctctctgagacgggtgcagagccggggagatttggtcctgtttgtgcctttgttcccacccccacccctcttcccagattggggaccagctgtctgtgaccagcagagaagtggaagggtgggctgggtgggcgccctagctcagggggatgtttggcctcccgcctcactctagatttgggtacttactttttattgagaccaaaaagaaaaggcaacactgggtgaggatacacgtacatttctcggggcttttattttctgtgaagtgggtggcagtgggcattgtgaaggtttgaaatggctactgtgggtagtggggccctgaggaggtcagagctctgcagagagactgccaggcagcgtgggctgaggatggaggttaagggtctgtggtgactcgggtggggggtggagtttcccagcctcacgctgagcttgtgactggtgggcatggggctgctgggatggggccatccctcgtgtcatcttgctgagcccttcccttaaaggctggggtctccttttcaggttggatcgtcaaacgcaggctactaccttggtccatcaaatttttggagggtatctcagatcacgcgtgaagtgctccgtgtgcaagagcgtctcggacacctacgacccctacttggacgtcgcgctggagatccggcaagctgcgaatattgtgcgtgctctggaactttttgtgaaagcagatgtcctgagtggagagaatgcctacatgtgtgctaaatgcaagaagaaggttccagccagcaagcgcttcaccatccacagaacatccaacgtcttaaccctttccctcaagcgttttgccaacttcagcggggggaagatcaccaaggatgtaggctatccggaattcctcaacatacgtccgtatatgtcccagaataatggtgatcctgtcatgtatggactctatgctgtcctggtgcactcgggctacagctgccatgccgggcactattactgctacgtgaaggcaagcaatggacagtggtaccagatgaatgattccttggtccattccagcaacgtcaaggtggttctgaaccagcaggcctacgtgctgttctatctgcgaattccaggctctaagaaaagtcccgagggcctcatctccaggacaggctcctcctcccttcccggccgcccgagtgtgattccagatcactccaagaagaacatcggcaatgggattatttcctccccactgactggaaagcgacaagactctgggacgatgaagaagccgcacaccactgaagagattggtgtgcccatatccaggaatggctccaccctgggcctgaagtcccagaacggctgcattcctccaaagctgccctcggggtccccttcccccaaactctcccagacacccacacacatgccaaccatcctagacgaccctggaaagaaggtgaagaagccagctcctccacagcacttttcccccagaactgctcaggggctgcctgggaccagcaactcgaatagcagcagatctgggagccaaaggcagggctcctgggacagcagggatgttgtcctctctacctcacctaagctcctggctacagccactgccaacgggcatgggctgaaggggaacgacgagagcgctggcctcgacaggaggggctccagcagctccagcccagagcactcggccagcagcgactccaccaaggccccccagacccccaggagtggagcggcccatctctgcgattctcaggaaacgaactgttccaccgctggccactccaaaacgccgccaagtggagcagattctaagacggtgaagctgaagtcccctgtcctgagcaacaccaccactgagcctgcaagcaccatgtctcctccaccagccaaaaaactggccctttctgccaagaaggccagcaccctgtggagggcgaccggcaatgacctccgtccacctcccccctcaccatcctccgacctcacccaccccatgaaaacctctcaccccgtcgttgcctccacttggcccgtccatagagccagggctgtgtcacctgctccccaatcatccagccgcctgcaaccccccttcagcccccaccccacagctgccagcgccctgcaggaggggcagacacagagacagcctgggagccccatgtacaggagggagggccaggcacagctgcccgctgtcagacggcaggaagatggcacacagccacaggtgaatggccagcaggtgggatgtgttacggacggccaccacgcgagcagcaggaagcggaggaggaaaggagcagaaggtcttggtgaagaaggcggcctgcaccaggacccacttcggcacagctgctctcccatgggtgatggtgatccagaggccatggaagagtctccaaggaaaaagaaaaaaagaaagcaggagacacagcgggcagtagaagaggatgggcatctcaaatgcccaaggagtgccaagccccaagatgctgttgtccccgagtccagcagctgcgcaccatccgcgaatggctggtgtcctggggaccgcatggggctgagccaggcccctcctgtgtcttggaatggagagcgggagtctgatgtggtccaggaactgctcaaatactcatctgataaagcttacgggagaaaagttctgacctgggatggcaagatgtcggcggtcagtcaggatgctattgaagacagcagacaggcccggactgagaccgtggttgatgactgggacgaagagtttgaccgagggaaggaaaagaaaattaaaaaatttaagagagagaagaggagaaacttcaacgccttccagaaacttcagactcgacggaacttctggtctgtgactcacccagcaaaggctgccagcctcagctatcgccgctgactgtgcccctgtggaaggagcctcctggagacaaggcgtcccttcccgggagctgtcggtctggatctgagggagctctctgtgtgggctctgctgtgctgggagcctgtcacggtaggagctctcccggtaccagtgtccacagaccgcccaacatagaggctttgaggcttctctagatcgggacctctttggtgacattcccgaccagccctgcaagagaaacgacagtgtgtgtgtgagcagaggtggctgcacacctgctggacatctttgccaggctgtgccttctcatgtttcatagacagtggtctgtgctggcagaggctgctgcccctggttggggctatcaggagagtgggggatggtggccacatgtcctccaggtggtctcccggtgcatagctggtggctctgggcaagccatcccttgcttctcggggctgacgccaccgttgtgtccgagcccgccctcccctgcttcctcagcgggaccccttcatctgttggccttacctgtcctcagaaaggaagaggtgaccccacccagccacctctcccttttatggaactcgagagggtggccctactgtgcaccccttccttgtgagtagctctcaactgtcctggagagcagaggctatttggggtcggaggagccctcgatacctgcgaatacatctgctttccaggctgctgtttattctgagacgactgtgctgtagcttcccttgcagctgcaataacccgcaggtcttcactgaggtggaggctttggggtagaattctccatttattttactacttaatacaaaacatttatttttgaccagtcctgtggcttccattagcaatatgtttcctttcccaaatatgcaaatagtggctttgtttgctcaattttgtgagtgctttggaatttaaatgattgtataactcaagaagattacttttctatgttgctcaagctgtgcctaccaacttgtaacttaataaatacaggaaatcctcag

SEQ ID NO: 17235 - protein, 726 aa, Homo sapiens
MCAKCKKKVPASKRFTIHRTSNVLTLSLKRFANFSGGKITKDVGYPEFLNIRPYMSQNNGDPVMYGLYAVLVHSGYSCHAGHYYCYVKASNGQWYQMNDSLVHSSNVKVVLNQQAYVLFYLRIPGSKKSPEGLISRTGSSSLPGRPSVIPDHSKKNIGNGIISSPLTGKRQDSGTMKKPHTTEEIGVPISRNGSTLGLKSQNGCIPPKLPSGSPSPKLSQTPTHMPTILDDPGKKVKKPAPPQHFSPRTAQGLPGTSNSNSSRSGSQRQGSWDSRDVVLSTSPKLLATATANGHGLKGNDESAGLDRRGSSSSSPEHSASSDSTKAPQTPRSGAAHLCDSQETNCSTAGHSKTPPSGADSKTVKLKSPVLSNTTTEPASTMSPPPAKKLALSAKKASTLWRATGNDLRPPPPSPSSDLTHPMKTSHPVVASTWPVHRARAVSPAPQSSSRLQPPFSPHPTAASALQEGQTQRQPGSPMYRREGQAQLPAVRRQEDGTQPQVNGQQVGCVTDGHHASSRKRRRKGAEGLGEEGGLHQDPLRHSCSPMGDGDPEAMEESPRKKKKRKQETQRAVEEDGHLKCPRSAKPQDAVVPESSSCAPSANGWCPGDRMGLSQAPPVSWNGERESDVVQELLKYSSDKAYGRKVLTWDGKMSAVSQDAIEDSRQARTETVVDDWDEEFDRGKEKKIKKFKREKRRNFNAFQKLQTRRNFWSVTHPAKAASLSYRR

SEQ ID NO: 17236 - DNA, 2348 bp, Homo sapiens
  CDS (142)..(1599)
ctcaagtgctcatactgtgacaagtcattcaccaaaaactttgacctgcagcagcacatccgaagccacaccggtgagaagcccttccagtgcattgcatgtggccgtgcctttgcccagaagtctaatgttaagaaacacatgcagacccacaaggtgtggcctccaggacacagtggtggcaccgtgtctcgaaactctgtgaccgtacaggtcatggccctgaaccccagcaggcaggaggacgaggaaagcacagggttgggccagcccctgccgggtgcgccacagccccaggccttgtccacagctggtgaggaagagggggacaagccggagtccaagcaggtggtcctcatcgacagctcctacctgtgccaattctgccccagcaaattcagcacctacttccagctcaagtctcacatgacccagcataagaatgagcaggtgtacaagtgtgtggtcaaaagctgtgcccagacgttcccaaagctcgacacatttctggagcacatcaagagccaccaggaggagctgagctaccgctgccacctctgcggcaaggacttcccctcgctgtacgacctgggcgtgcaccagtactcccacagcctcctgccacagcacagccccaagaaggacaatgccgtctacaagtgtgtcaaatgtgtcaacaaatactccacccctgaggccctggagcaccacctgcagaccgccactcacaacttcccctgcccacactgccagaaggtgtttccttgtgaacgctacctgcggcgtcatctgcccacccacggcagcgggggcaggttcaagtgccaagtgtgcaagaagttcttccggcgggagcattatctcaaactgcatgctcacatccactcgggtgagaagccctacaaatgctcagtgtgcgagtctgcgttcaaccgcaaggacaaactgaagagacacatgttgatccacgagcccttcaagaaatacaaatgccctttctcgacgcacacagactgcagtaaggagttcaaccggccggacaagctgaaggcccacatcctctcccactctggcatgaagctccacaaatgcgccctgtgcagcaagtccttcagccgccgtgcccacctcgccgagcatcagcgcgcccacatgggcaactacaagttccgctgtgctggctgcgccaagggcttttcccgccacaaatacctcaaagatcaccgctgtcgtctcggcccccaaaaggacaaggacctgcaaacccggcggcccccccagaggagggcagccccccgcagttgcggcagtggtgggcgcaaggtgctgacccccttgcctgacccgctggggctggaggagctgaaggacacaggggctgggctggtgcccgaggctgtccccggcaagccgcccttcgcagagccggacgcggtgctgtccatcgttgtgggtggtgcggtgggcgcggaaactgagctggtggtacctggacacgctgaggggctgggctccaacctggctctggcggagctgcaggccggggccgagggcccatgtgccatgctcgctgtgcccgtctacatccaggcctccgagtgacggacctgaggtgtctgtttcctgggcaggcctgatgctcctgtttgggtccagggcccctgggggcagaccggtgatccttaccagtggaagcgagccatcgagccattggcagaaatcctgctgaatgtcattcagaaacctcagcccatggtcgccctcctgtgcccctctcctgccggaaagccctgcaacattctagggttgggggcagggccatccacggtttctgggcagagccatggtggcaggagagagatggctgaagcctgagcagcccagagtcccgctggtctaggctggtggtcggggcccctgggagaggagacagggcattcctccccactctgtctccaggctgcctctgggtagcctctagtctgctgttcttcaggaggcctgccataaactcttcggagtttacgtgttgcaccttttcacagacggttccccacagcatcctcagacagctctgtgatgtagcttttaggaggcactcaggtgtcacggctagactgcagctatgagacagatctggcttcaaatccaagagttgccatgcacttgctgtgtgaccttgggcaagtcacttcacttctctgagccccgtgttcctcatctgtacaatggggcttacgatactactacctcatagggttgtcctggggatccagtatgatgaagtgcgccaggggcttggcatggtgcccggcacgcagaaagtgctcaataaatgtttttgtcat

SEQ ID NO: 17237 - protein, 486 aa, Homo sapiens
MQTHKVWPPGHSGGTVSRNSVTVQVMALNPSRQEDEESTGLGQPLPGAPQPQALSTAGEEEGDKPESKQVVLIDSSYLCQFCPSKFSTYFQLKSHMTQHKNEQVYKCVVKSCAQTFPKLDTFLEHIKSHQEELSYRCHLCGKDFPSLYDLGVHQYSHSLLPQHSPKKDNAVYKCVKCVNKYSTPEALEHHLQTATHNFPCPHCQKVFPCERYLRRHLPTHGSGGRFKCQVCKKFFRREHYLKLHAHIHSGEKPYKCSVCESAFNRKDKLKRHMLIHEPFKKYKCPFSTHTDCSKEFNRPDKLKAHILSHSGMKLHKCALCSKSFSRRAHLAEHQRAHMGNYKFRCAGCAKGFSRHKYLKDHRCRLGPQKDKDLQTRRPPQRRAAPRSCGSGGRKVLTPLPDPLGLEELKDTGAGLVPEAVPGKPPFAEPDAVLSIVVGGAVGAETELVVPGHAEGLGSNLALAELQAGAEGPCAMLAVPVYIQASE

SEQ ID NO: 17238 - DNA, 2574 bp, Homo sapiens
  CDS (23)..(2290)
attcttgcatagcagtgtgaaaatggtgcatggaaatatcactcctgaaaatataattttgaataagagtggagcctggaaaataatgggttttgatttttgtgtatcatcaaccaatccttctgaacaagagcctaaatttccttgtaaagaatgggacccaaatttaccttcattgtgtcttccaaatcctgaatatttggctcctgaatacatactttctgtgagctgtgaaacagccagtgatatgtattctttaggaactgttatgtatgctgtatttaataaagggaaacctatatttgaagtcaacaagcaagatatttacaagagtttcagtaggcagttggatcagttgagtcgtttaggatctagttcacttacaaatatacctgaggaagttcgtgaacatgtaaagctactgttaaatgtaactccgactgtaagaccagacgcagatcaaatgacaaagattcccttctttgatgatgttggtgcagtaacactgcaatattttgataccttattccaaagagataatcttcagaaatcacagtttttcaaaggactgctaaaggttctaccaaaactgcccaagcgtgtcattgtgcagagaattttgccttgtttgacttcagaatttgtaaaccctgacatggtaccttttgttttgcccaatgttctacttattgctgaggaatgcaccaaagaagaatatgtcaaattaattcttcctgaacttggccctgtgtttaagcagcaggagccaatccagattttgttaattttcctacaaaaaatggatttgctactaaccaaaacccctcctgatgagataaagaacagtgttctacccatggtttacagagcactagaagctccttccattcagatccaggagctgtgtctaaacatcattccaacctttgcaaatcttatagactacccatccatgaaaaacgctttgataccaagaattaaaaatgcttgtctacaaacatcttcccttgcggttcgtgtaaattcattagtgtgcttaggaaagattttggaatacttggataagtggtttgtacttgatgatatcctacccttcttacaacaaattccatccaaggaacctgcggtcctcatgggaattttaggtatttacaaatgtacttttactcataagaagttgggaatcaccaaagagcagctggccggaaaagtgttgcctcatcttattcccctgagtattgaaaacaatcttaatcttaatcagttcaattctttcatttccgtcataaaagaaatgcttaatagattggagtctgaacataagactaaactggagcaacttcatataatgcaagaacagcagaaatctttggatataggaaatcaaatgaatgtttctgaggagatgaaagttacaaatattgggaatcagcaaattgacaaagtttttaacaacattggagcagaccttctgactggcagtgagtccgaaaataaagaggacgggttacagaataaacataaaagagcatcacttacacttgaagaaaaacaaaaattagcaaaagaacaagagcaggcacagaagctgaaaagccagcagcctcttaaaccccaagtgcacacacctgttgctactgttaaacagactaaggacttgacagacacactgatggataatatgtcatccttgaccagcctttctgttagtacccctaaatcttctgcttcaagtactttcacttctgttccttccatgggcattggtatgatgttttctacaccaactgataatacaaagagaaatttgacaaatggcctaaatgccaatatgggctttcagacttcaggattcaacatgcccgttaatacaaaccagaacttctacagtagtccaagcacagttggagtgaccaagatgactctgggaacacctcccactttgccaaacttcaatgctttgagtgttcctcctgctggtgcaaagcagacccaacaaagacccacagatatgtctgcccttaataatctctttggccctcagaaacccaaagttagcatgaaccagttatcacaacagaaaccaaatcagtggcttaatcagtttgtacctcctcaaggttctccaactatgggcagttcagtaatggggacacagatgaacgtgataggacaatctgcttttggtatgcagggtaatcctttctttaacccacagaactttgcacagccaccaactactatgaccaatagcagttcagctagcaatgatttaaaagatctttttgggtgaggtgtcttacttctattttgaaggattatttcagtttcaatcatgggtgagctgatttacatctttatatagttggcttggaggaagtactcctatgggaaagtgaacagttctgtgacaggaaacatctctgtccatgccagcatagtagttgtatggacttctaaccagttgagttttttaaagcattgaggattttttcctcttaccaactcctcttcaggtttttaaagccccagcgcctatattaaggcacatttgaataaattctattaccagtt

SEQ ID NO: 17239 - protein, 756 aa, Homo sapiens [sequence omitted]

SEQ ID NO: 17240 - DNA, 2828 bp, Homo sapiens
  CDS (115)..(990)
ttctatgtaagagcaagcgagttccacagcgcggggaggccagtggagaggagcgcggccttgcctggctcatgtcctgtttccagcttgccctgaaaacgaattactaaatccatggaggaagagcttggggcctgcctggtcctcggccacggtggggctggggcctgtgactgcgtgtgcagagggtccgcgcccagggcccgggaaaggggctgcgctgccccgagcgagtccccgggcgcccccagcctgctgcagccacctcgggctccacatttcggccccttctcctctccgctgctctgggctcagccaccaagctccacgctgtgggcagaatccactggggcgcaggaaacctcagcttccgcagcccacctggccttcgcagtcttcctctccagggttttatttcaacatggccttttctgctgcgactcagctgtggtaggggccaagtttgggtgtgtgaggccagggaggtgcgttgtgttctcgcggaagagagagacgcagcgagggagcccgggcacacggacccagctcaccaaccgcagccaaaccaccaattctgtcccgtggcccttggtgaccggtgacagggagggaaggaaacgtggccagcttccgccagaccacaggcgaacacaggtggggcggcccactggcttgggcctaggagctgcaggagcaggggccacggtccagcctgacgcccctctcttggggcaggaagttccctctgtctgccatgagcaggggcacttgggagggcccagcataggacctcaggagctcccggagcagcctcagcagccgcaacccctcgaccttgtccagcatcacgccccggtgccagggagacagaccgaagaatcccaccactgtgcaggagaggaagcctactttaattctgttcttgaagtaatggcaggtgaagattcgtatgtcataattaattcctcacttcttaggaatcgcagcgattagctctgtcattcctttgttatcagagagaactgtgagtcctgttattctcactgcttcgccatctgtgagcatgcgcagccctcggctaagttttctaaaaggaacatcacagcgacttccctgacctcagccaggacaaaagcagggagaagaggaatgaaaagcacaggaaaacaggccagggagttcatggatggaaatggcatcacaggcaacagccactcacgaagatggacgaggacccaagagagaaccagcgctgctctacacctgcctgtcagtttgtagtggagaggggcactgtccgccgagcctccatccgtggaaacgctcctcttcgagcccggccattgctctggctgggcctggtgaggaatggccgtcatcacggacagtggcctttcctagccctgaccctgcagagtgcctctggagcgcatagtgctggcggacaggaagtcagcagatcgaagacagggtcccggcttcacggtgggtgagccgtgtgatgtttgggcaagtccctcagtctctccactgagctgggtgtgaacgtggtgctctgtggcagtggcacgtgatgactcctgcatggagttctcgtctcagcaggggcagtgccttgcaccccgattttcaagcagcaacctgagagtcctgggaggcccgtcttttcccctcggtctttctgttggccccaccactcacatatttcaggcctcaccaagtcctgttaatcccatttccaaaaaatgcctggaagcttctactcctggctctgcagcctccacctttctctgagctctgcggacgcttcctcacatcagccctggatgactccaggagcctccaaagggagcccctgcttcctgttcccctcccctgcgacctgctgcccatgtgctcccaaggggctcgttcctccgtgtggatgggatcgtgttcctgctcccctgccccacaacccactgcccgtgtgcacccgaggggcatgtttttctgtgtgagtgggatcatgagcctctttccttggtagatgttctctttgcgctggaatgaaacctcagctcccctgtgacaggaagctccccatgggccagtgctgggttttggtctgtcggcatgtgctctccacccagagaagactcacagctggctgctcctctcacccctgaggcttcacagtaaacatcgactcacaggaggggaccacgtgattcccaccgcgtgtcctgttccctccacggagcatgagcttgaccatggtacaaagcaccgcacagctgctttaaccctgggagagaagtgtctttatgagattctctgtgtccccagggaatgctgccttctcctgtgaagcagtcagtgggccaggcccagtccttaaagatgcagagaacccaacaggcccctcttctgctcacagcttcaccttatgttatgcaaaatccccacaccactagagcatgctggcactgggtcatgggcgcctgcacttcccgcaagcttgtgactcggggtgcgatacctcagcccgtttccaagcagccccatgagatcagggcttattgtgtttgctccatgtatcatgagggtgcatcctgagaaggagagactcgcaggtgggtgcaaatgatttgcagtcacagaggagccaagagctcctgacgggactaatgaaagcatgcctcactttagccctgggccaggttcacgcctcaccttagccctgggcgggttcacgcctcaccttagccctgggccaggctgctgtgtgccatgtgctgtttcttcatcggggggtttgggtacagaaatactaaaaatgaatcttg

SEQ ID NO: 17241 - protein, 292 aa, Homo sapiens [sequence omitted]

SEQ ID NO: 17242 - DNA, 2206 bp, Homo sapiens
  CDS (441)..(896)
tccggtgctcagtggctagccgaatagccgtgtttgggacctgggctcgggcttcttgcgtccctgctaagaacatgtcacggggccgaatcgtccgtattctctcagcttcaagctcctctacttttcaaccaggtcactagcccttgactcctcttatcaaacttccggaactgccaccccaccagtgactccacaggcaccagggcatgcaacagggctgggacaggaaggctctcttcttcacctcaagcctgctgggctaacacttgcgatttttactagagttaactttgtaatgtatgtctctgactctagaatttcaagagaagttccacttagtgactcctaagtggaagttctaagatggcttcccagtgaggtgatgaagaggtttgagctttagagtgcagttgcaaagctcttctctgacctgaacaatggctgtagctgtggaccaacaaatccagactccttcagtacaagatctccaaatagttaaactggaagaagattcccactgggagcaggaaatttcccttcaagggaattaccctggaccagagacatcctgccagagcttttggcatttccgttaccaagaagcatcacgaccccgagaggccctcctccagctccagaagctctgttgtcagtggctaaggccagagaagtgtacaaaagagcagatcctggagttgctggtcctagaacagttcccgactgtccttctccaggagatccagatctgggtcagacagcagcatccggagagtggagaggaggcagtggccctggtggaagacttacagaaagaacctggaagacagaggctggagccctgcctgatgtggctctgggaattcctgcagagaagagcaggggtggccaggagatagtgagcagctcccaggaggcatggagggatccagaacctggactgaagaaccacctagaaataactcagcagaattctgaaaatgaggtcacgctggattttccaatccataggcccaaagtgaactcccacgtggagtaggatgaaaacccacagcatctagatcttcaaattctggagaaaaagagagtgtgaaagactgctcagtggctggggtgagagtcaagtctggccaggtgctaatctggagaaaagccaagacctggagcgagctggagtggcaggccctggaggatgagaaggtggcaggagtgcactggggatacaaagaaaccaagatttttctgggaattctcagaggcctggatccacgaaaaactccgcacctgccatcgaaaccaccaggtgtaccggattatggctgagcagctgtgagaacatggcttcctgtggaccctggagcaatgttgctatcggttcaaaaacctcctgaccgactactgcaaagccaggagcacctacacaccaggcaccagtgtcttctatgatgagatggatgccctgttgagtcttggggcactttctaacacctttgatgccttagaggtggtaggaggccttctttgggattgagaggattccaaagggaaccagggcatagcactagaagatgtggcgggatggtaatgaaatagtggaggagtctcaagaggaatcctggaggcttggtccccaggccttgaggtggaatcccagtggcaactctcccccacaatggacctcagagcagtgggagcgacgcagtcctgtgggaagcattcaggctcagaatcaggagatgtgattattgtcctggctctgttatgactaatttgggtctggaatggcctcatcgggggaaaaattggtgacaactttaagaaatactgtttatatcccgtcctcaaatattgcttgactcaaccctctaccgaaccagtagtccagggtggctcacaaagaccactttgaggctcttgctctgctctttagccaaggagtctcccttcctgccttcagtaacaacattacaggaagagaggagagaaaggtaggagttaaagatccagtcatttgtttccatctaaagtgccctataagccgggcatggtggcgcaagcctgtagtcccagctactcgggaggctggggcaggagaatcacttgagcccaggagttggaggccgcagtgagctgtgatcatgccactgcattccagcctgggcgacggagtgagacccagactcagctgaaaaataataatattatt

SEQ ID NO: 17243 - protein, 152 aa, Homo sapiens
MAVAVDQQIQTPSVQDLQIVKLEEDSHWEQEISLQGNYPGPETSCQSFWHFRYQEASRPREALLQLQKLCCQWLRPEKCTKEQILELLVLEQFPTVLLQEIQIWVRQQHPESGEEAVALVEDLQKEPGRQRLEPCLMWLWEFLQRRAGVARR

SEQ ID NO: 17244 - DNA, 3375 bp, Homo sapiens
  CDS (100)..(549)
acacgcagctagccggagcccggaccaggcgcctgtgcctcctcctcgtccctcgccgcgtccgcgaagcctggagccggcgggagccccgcgctcgccatgtcgggcgagctcagcaacaggttccaaggagggaaggcgttcggcttgctcaaagcccggcaggagaggaggctggccgagatcaaccgggagcttctgtgtgaccagaagtacagtgatgaagagaaccttccagaaaagctcacagccttcaaagagaagtacatggagtttgacctgaacaatgaaggcgagattgacctgatgtctttaaagaggatgatggagaagcttggtgtccccaagacccacctggagatgaagaagatgatctcagaggtgacaggaggggtcagtgacactatatcctaccgagactttgtgaacatgatgctggggaaacggtcggctgtcctcaagttagtcatgatgtttgaaggaaaagccaacgagagcagccccaagccagttggcccccctccagagagagacattgctagcctgccctgaggaccccgcctggactccccagccttcccaccccatacctccctcccgatcttgctgcccttcttgacacactgtgatctctctctctctcatttgtttggtcattgagggtttgtttgtgttttcatcaatgtctttgtaaagcacaaattatctgccttaaaggggctctgggtcggggaatcctgagccttgggtcccctccctctcttcttccctccttccccgctccctgtgcagaagggctgatatcaaaccaaaaactagagggggcagggccagggcagggaggcttccagcctgtgttcccctcacttggaggaaccagcactctccatcctttcagaaagtctccaagccaagttcaggctcactgacctggctctgacgaggaccccaggccactctgagaagaccttggagtagggacaaggctgcagggcctctttcgggtttccttggacagtgccatggttccagtgctctggtgtcacccaggacacagccactcggggccccgctgccccagctgatccccactcattccacacctcttctcatcctcagtgatgtgaaggtgggaaggaaaggagcttggcattgggagcccttcaagaaggtaccagaaggaaccctccagtcctgctctctggccacacctgtgcaggcagctgagaggcagcgtgcagccctactgtcccttactggggcagcagagggcttcggaggcagaagtgaggcctggggtttggggggaaaggtcagctcagtgctgttccaccttttagggaggatactgaggggaccaggatgggagaatgaggagtaaaatgctcacggcaaagtcagcagcactggtaagccaagactgagaaatacaaggttgcttgtctgaccccaatctgcttgaaacctgactctgcttctctcatttgtcttcctaccctactcacataattcactcattgactcactcattcaccagatatttattgacctgctattataagctatacatcctcccatgttgtcctggcatgtgcagtatacacggtctaactcatctctccccagatctctcagaaccttgagcttgggaattgaactggggtcacctgtgtcctttcttatggactcgcaggattttagaaccctaatgcaccctggagggtagctgggccagacttctcatttcacaggtgaggagactggtgccccacagggattaagtgccttgcccaaggtcaggcttatctccagagggaggtgccctggactggggcccagatgttcagggaccctgcctacacctcatttccagtgtgggctgccttagttagttatgagaacagggaagggctgggaagagacagcctccaaggtcaacacttggagagggtttcacttgctctgaagaccctggtccaggattcgccctctcccatgccttcaagtcagcatcaggcttagggcaaagaccaggcctctgaagctgcctcttgtaattcatgcaggaagatgtcaaagtcagccccatcttggctgatcagggtgttcagccttaaccccacctgtgttctgaagtctcttaccctacctgctcaggactgagacagttattcactgaacatatttattaagcacttgctgtaggccaacagttaagaatccaataatgaaatggacagattcatggaacttagagtccaataggaaagtgagacccagacaatgacaatgagataaatgttaggaagggggaggtatggggtgacttccctgcagtcctgggggcctagatgggcccaagactgggtgagagtcttggcagagcctttgcaacaccttaagtggacaggactgggaggtcttggtggttggagccaacgtgggttccctgcggctccttagtcacctctgatagcagattgagggaggaaaacaggtaaggcatgaggaaatggccaggttgggttaacccactggtttcaaccagttcaggaatgaggttatttggccatgactggctgatcttgagctcaaggatctgcttcaaatgcacacaggcctagttgaagtttaaaccccagcaaaacattcctccctgtaaatggaaaatcctacttctacccccaccctgccctgttttttgttttttttttccccaagatcatcagatgtcctcacccctcctcactgcctctcctctctgggacaggctgggacctttgaggaagataaagccttccttgactacccatcatattcagtgtccctgttcctcactcagagaggaaggcagaaccagtcaggcttatttcagtaagttccacagttctacaagactgcaggaattctccttaagggaggagagcaagcaggtgtggccccagcttctggaaatggcagaagagagggttttctcattgaatgggggtgggggctcgtgtgtcctgggaaaccccatcagtcccttcatttcttgagactcaactcctgggaggagagggtctcaagagttgtccctggaaggagggcgggggcagtctacatctatttcaggttgtggctcttggttctaggactcttacttctctggctaagggctcagcttcttgggacttcaaccatcttctttctgaaagaccaaatctaatgtaaccagtaacgtgaggactgccaagtatggctttgtccctatgactcagaggagggtttgtcgggcaaattcaggtggatgaagtatgtgtgtgcgtgtgcatgggagtgtgcgtggactgggatatcatctctacagcctgcaaataaaccagacaaacttac

SEQ ID NO: 17245 - protein, 150 aa, Homo sapiens [sequence omitted]

SEQ ID NO: 17246 - DNA, 2515 bp, Homo sapiens
  CDS (38)..(2284)
gcggcgggatgaggagcttgaggaagcaggcagggaaatgtctgccgccgccagctctcgggagcgcaacactgcaggtggttctaactttgatggtttgagaccaaatgggaagggagtgcctatggaccaaagctccaggggtcaagataaaccagaaagcttgcaaccaagacagaataaatccaagtccgaaattactgacatggttcgctcctccactatcacagtgtcggacaaggctcatattttatccatgcagaagtttggactgcgagatacaattgtgaaatcacatctactacagaaagaagaggattacacctatatccagaacttcaggttttttgcgggaacatacaatgtaaatgggcagtcccccaaagaatgcctccggctgtggctgagcaatggtatccaggccccagatgtctattgtgtagggttccaggagcttgatctgagtaaggaagcttttttctttcacgataccccaaaggaggaagagtggttcaaagctgtgtcagagggtcttcatccagatgccaaatatgcaaaggtgaagcttatccgactggttgggattatgctgctgttatatgtcaaacaggagcatgcagcttatatctcagaagtggaagccgagactgtggggacaggaatcatggggaggatgggcaacaagggaggcgtggcgatcaggttccagttccacaacaccagcatctgcgttgtgaattctcacttggcagcccacattgaagagtatgagaggaggaaccaggactataaggacatttgttctcgaatgcagttttgtcagcctgacccaagccttccccctctcaccatcagcaaccatgatgtgatcttgtggctgggggacctcaactacaggatagaagagctggatgtggaaaaagtgaaaaagctcatcgaagagaaggattttcaaatgctgtatgcatatgatcagctgaaaattcaggtggccgcaaagactgtctttgaaggcttcacagagggtgagctcacattccagcctacttacaagtatgatacgggctctgacgactgggataccagtgagaagtgccgtgctcctgcctggtgtgatcggattctctggaaagggaagaacatcactcagctgagttaccagagccacatggccctgaagaccagtgaccacaagcctgtcagctcagtgtttgacatcggggtgagggtcgtaaatgacgagctttaccggaagacactggaggaaattgttcgctccctggataagatggaaaatgccaacattccttctgtgtccctgtccaagcgagagttctgttttcagaatgtgaagtacatgcaattgaaagtagaatcctttacaattcataatggacaagtaccctgtcattttgaattcatcaacaagcctgatgaagagtcttactgtaagcagtggctgaatgccaaccccagcagaggcttcctcctgccagattctgatgttgagattgacttggagctcttcgtaaataagacgacagctacaaagctcaactcgggtgaagacaaaattgaggacattctggttctgcacttggacaggggaaaggattactttttgtctgtgtctgggaactacctgcccagctgttttgggtctcccattcatacactgtgttacatgagagagccaatcttggacctaccacttgaaaccattagtgagctgactctgatgccagtatggactggagatgatgggagccagttggatagccccatggaaatccccaaagagctctggatgatggttgattacctgtaccgaaatgctgtccagcaggaagatctgtttcagcaaccaggcctgaggtcagaatttgaacatatcagggactgcttggatactggaatgattgataacctctctgccagcaatcattctgtagccgaagccctgctgcttttcctggagagccttccagagcctgtcatctgttacagcacctaccataactgcttggagtgttctggcaactacacagcaagcaaacaggtcatttctactctccccatattccacaaaaatgtcttccactacttgatggcgtttttgcgagaactgctgaaaaattcagcaaaaaatcatttgcatgagaatattctagctagcatatttggcagcttattgcttcgaaacccagctggtcaccaaaagcttgatatgacagagaagaagaaggctcaagaatttattcaccagttcctctgcaacccactctgagcctatctctcctcctattttacttgaggctgccaattaccagccccacctgtttcagctcaagagatgccttaagataattatgtgaggccacttggtagcaagaatggcagctatttcctgagcctagtaccccaattaagcccaccattggttagcacactcagcgctgtgagtcgtgaagacacgggagaaaatccaccataataaaactgacattcaattttc

SEQ ID NO: 17247 - protein, 749 aa, Homo sapiens [sequence omitted]

SEQ ID NO: 17248 - DNA, 3614 bp, Homo sapiens
atgtagtaattttgcctggatggttttggatataatagccaattcatcacttgtgatttgatgactcttagggtctctagtttttcttaacagcctccaaattgaagtttcagaatccttactgcaaaaagcacaaaagttttcattgccattttgatagtgatatgtagctcgtaaataataattcttacctctgtgttagataaaacatccagtaaaacagcatcaagtttagctttgatagaagggaacaattagagttggtgtagagacagaccagttaggatgagggcatgaaatacagcagaagcagtaggaagagaagagagactgaggatcttgaattagggtctagatgaaaatttaggatgattcctaggtttgggaatggagggagagcttaaacaagatagagaatatagacacagattttggaggaaatgattttctcaagggactgctgagtccaaggaatgtttacaaatcctcaagaagtactccaggctatttgtaagatctgaggctcataggccttttctggctctcaggatttagagtcgtaataggcagtaatgtaaattcactagctaactttgaggttgcaacattcatagcactctgaactttgagggcatcttgttttaattcaaaaaactggtaatccctgcttttgattgtgatgtaagtagcagtacacaagcatgggaataagtaaatccaataaaggagtatttaggctcacctgctaaatactcagtgtgccacccaaaccatctgtaatgggtccccttattgaaaacattctttttccagaatgggcaaggaaggctggatgggcaaaagcaaaataaatgtaccacagacccttgattctgttagtatcagtgataaaacatgattgataaaactaggcatgatacattcttaaggtacagaaaaatgtggaaattgtgtcaagaaaattcacaaattttaaatggttctttaggctgatagtaataaatgggatcattataattttatgtaaaaccttcaaaggcttcctactaaagaaagctgaattccagtaacagattgagcccagactactcagttcatatttgaggccaacttagactatttttgatgccttaaagattccttcaagtcccctttctctttctaccatacccccagtaaagctacttaaaatcctctgtaggaaagagctgagtaattgggggcagagatggaggacaaatttaagggaacagaaagccattgggaagacaaatgaaagccagaatctgaagataattttaaaaccttcagggaaagtaggtgtctaatcataggacttaattcacttgagtagaaatttgtaatttagccataggaatttaggaagtgttagttacaagaggtaacttgaagctgtggacatgatgatagcttttgttgcataattagaatgtgccaaacactttgctaagtgcttatgatagcttttctcttcagaacatcaccatgattatttacagtataacctgtattttacagatggagaaatgtaggcaaaggaaaggggcataacttgcctccagggtcacatagatagcaaatgatgaaatttaattttaaaattagaaactgattccaaagtccttacactcttaaccatgaaactgaagacatctaagtcaccacgcaaaacccagaatctaaatggccatttattagtgcttattcctttatttcctaatattaattaaatgacttaattaccatgagaagataatgtgctttcagttttcgcagtagttagttcagccattgattttcttactaagaacctctaaaaggccaatgggcagttgacaaaaattagggatggattctgcagctgtaagaccaagtgaaagtaaaaggcccatggcggtaaatttgtcccttgcaggcagtttgttctaaatgcttgtgcctagaaataaacttagccttattatcatctggactctgagcaatttttgcatctcagtattcttagatgtggatgattaaaaggccacgtatgaaggcagctaacataagacactttgtgggagtgagataattcattaaaatcaaatattagtgtattaggcaaacaaattcaatcatttcagttatgtaaagctagctgggttctcagttttagcaagttagggaagatatcacattacaggagaaagacgatctaaaagtttttgaagttttaatggatttaaccacttgtaaaatgttataaattgtaggacacttctcccagagagatcctctagcatacatggatgatttacttttcatatttatgatttggcaggaaagtttgagttcatttgaagttaggctttttaatagtttttctcctcccagtgaattgttctgagttgataggtgtaaaatttatagattttattgataataaaagtttgtaagcatctttaatgtagcgattccattgcttattttttattcagcactcagttcacttcctatgtgctggagataattaaagactccacttccaagaaaggatacaacaaggaaaataagaggttgttaaataaaaattatgccaaagataagcctgtagaaagcttctgtggtgcgtatttggtagattttatggatggatttcgtgaaggataaatagcagagtcctgagggggggaaaaaggatagaagtggccaaatacaagagaggaaatgggagaaagaataggatatgaagaagcctggcattgagaggtggtattggcctgttaagaaaacttgtttgcctagcccctaagttctagtctcactcagtattgggttagggctcctctagattctagtacatcatgatagatcatgcagtcagtaaaagtcctgctgattttccccagtaaagtgctttagtccacacaaagcctgatctttaatccatgcctagaattggcaaatgatgccaggaaagaaaacagttggtagtctcagctatgtagaaaagacaaagacttttagtacatctagtcttaagcgcttccacagctctttcgtatctgtaatgtattttgcatttgatccattttttcctagttactgcacctgggagcgactgccagtactaccacatcatttcggtagtggaggtccccattgaaggtttttttcatagcacatagcatgatcacgtctaggaagatcgttctggctgtagatagtataattatctactaatacaaagggggaaaggacgtgagatgatgtgaaaggaagttttgcatcatttacttgaaagatactgttcttctgaatttaatcacattggggattggaaaaagtagattaataaaaattaaaaagaaaaaaacaaatgagttcatgaagttaagcaattaaagaaaaagacaaatctaatacagtactgtaattatttcaaaggttactattttaccctaaactcatttctatacttgaaagttcaaggatcgattgatatttttgaaattctgaactaaatggaaatattaagatggctcatgtgtgcatatataaatgttatttgtatcctcagaataaactaataaatttcaagggtacaaaatagg

SEQ ID NO: 17249 - DNA, 2751 bp, Homo sapiens
  CDS (19)..(873)
tatgttaaagtctgggacatgttaaaaggaggacaattgctagtatctttgaaaaatcatcacaaaaccgtgacatgtttatgtctaagcagctctggacagaggttactttctggctcactggataggaaggtgaaagtatacagcacaacttcctacaaagtagtccacagttttgattatgcagcttcaattttgagtcttgcccttgcacatgaagatgagacaatagttgtaggaatgaccaatggaatactgagtgttaaacatcggaaatctgaagcaaagaaggaatcacttcccagaagaagaaggcctgcatatcgaacctttattaaaggaaaaaattacatgaagcaacgggatgacattttgattaacaggccagcaaagaagcacctagaattgtatgacagggatctgaaacattttcggatctctaaggcactcgatagagttcttggtcccacttgtacaataaagacacccgagattacggtgtccatcataaaggagttaaatcgaagaggagtccttgcaaatgcgcttgcaggtcgggatgagaaggaaatcagtcatgttcttaattttttgataaggaatctttctcagccaagatttgctcctgttttaatcaatgctgctgaaataattattgatatatatctgcctgtaattggtcagtcccctgtagttgataaaaagtttttactacttcaaggacttgtagaaaaagagattgattaccaaagagaattgttagaaaccttggggatgatggatatgctttttgccaccatgagaaggaaggaaggcacttctgtgttggaacacacatctgatggatttccagagaataagaagatagaatcatagtgtctgctaaataagacatataaggactctgaagttggaatagatttgactgtattaaatgttggcgagagactctctttgatacattaaaaaaactgtttgcagaagcagttctgtggaagagactggaataattatggccggaaaacaagtacccgttttaagtaagacatggttttccatgtaatattttgaattatagcatcttcacctagaagatctcaattgtcttagtcacagagtaggtttatctgggatggatattaattttaatacaggagtgttctgtatcaacatttgggttggtattcagatgggaattcaaatatgaatcctctctggagagggtccaactgggaatcctgctaaaggagcaaagccttgtattacctctggaagacaacaaaaacaattggcaacaacaaaaagcctctttcttgactttaatcagtgcctttgggatttctgggcccttgcttagcttgcttcctgtctccttgatatctacacttgtcttagatcacatgccctgcttcagctggtaatgggactgcatcggttccaagtgtggcaagtaagttttcggctctgaagaactgacactagctagatttgtattcagagtgtgagagcaagctctacagatagaccttattggactacttttttttttttcttcatgcagcctttctaccaagttttcaccttgtttcaggtcagaggaatgatagaatttgtcatttttcttacaacagcctttcagactattcttcatatgtttcaagctaatcttgtagctaagctacctaatcctctgaaaactgttttctctgatttgtatttagattcctccccccattattcacaatcatattgtatttcggaaccccaatgcagagcagtttgctttgaaaaatagttgtttttaaaagtttaatgtaaataattattttttagaagttttttttttttttttaaagacagggtctcgctttatcgcccaggctggagtacagtgatgcaatctcagtccactgcaacctctgccctcccgggtttaagcagttctcctgcctcagcctcctgagtagctgggattacaggtgtgccccaccacgcctggctaatttttgtagttttagtagagacggggtttcaccttaccgggctggtctaaaactcctgacctcaagtgatctacctgcctctgcctcccgaagtgcttggattacaggtgtgagccactgtgtccagcctgtaactattatttttttataaagagagattcttattttcttggctttttgatgtatctgttcctgatagataatcattggctagtaactcctagtacactggtttcacagttgctacctctcctgcttttctctaattattacgccaactcaagtagttaaaaatcagtaagaaaaatgtcttgagctagaagaacccatagaggaagattttgtaatgcgaatctcctctcataattttagttctgtaaattcagggtttttttttgtttttttgttttttttaagccgaaaaaatgcttaatatgttccagtaatggtattaagtaaaaattaaataaacgtattaagtttaacatattaaattaatttaacatttagactaacattaacatttaaattaatatgttaagtgaatatacttaatatattctagtacaggtatgcttggaaatagggcgtttccttttcatgaattgatttcgtacagcacagtggcttataaggaaccagcagtgtttttccctgagtaattatgaacttagtcaagatcagaagctgggttttggggttgagaagagttcatttatttaaataaagtttctatttaaaaaccttt

SEQ ID NO: 17250 - protein, 285 aa, Homo sapiens
MLKGGQLLVSLKNHHKTVTCLCLSSSGQRLLSGSLDRKVKVYSTTSYKVVHSFDYAASILSLALAHEDETIVVGMTNGILSVKHRKSEAKKESLPRRRRPAYRTFIKGKNYMKQRDDILINRPAKKHLELYDRDLKHFRISKALDRVLGPTCTIKTPEITVSIIKELNRRGVLANALAGRDEKEISHVLNFLIRNLSQPRFAPVLINAAEIIIDIYLPVIGQSPVVDKKFLLLQGLVEKEIDYQRELLETLGMMDMLFATMRRKEGTSVLEHTSDGFPENKKIES

SEQ ID NO: 17251 - DNA, 2432 bp, Homo sapiens
  CDS (10)..(864)
gtagatgcgatggcgccgattccaaagactgtggggcggatcaagctagactgctctctacggcccagctgcccactggaggtcgctgctgcacccaaactttgcaaggaattcggtccagaggattacggcgaagaggacatagtggattttcttcgacggcttgtggagagtgatccccagggcctgcaccggatccatgtggatgggagcagcgggcggctgcagctgtggcaccatgattacctcctgggccacttggatgatgaagggaaatcaactggacagagtgacaggggcaagggggctgagggactgggcacctactgtggtctccgcaagtccttcctgtatcctccccaagagtctgagccctgccctcaaagcccctctgcctctgccaccttccccagtgtctcagacagcctgcctcaggtggccatgccccagaagctcctggtgacagaagaggaagccaatcgcctggctgaggagctggtggctgaggaggagcgcatgaaacagaaagcagagaaaaagcgactcaagaagaagcgtcaaaaggaacggaagcgacaggagcgtttggagcagtactgtggggagcccaaggccagcactacctcagatggagatgagagccccccatccagccctggaaacccagttcagggacagtgtggtgaagaagaggactcactggatctatctagcacttttgtgtctctggctttgcgcaaggttggggattggcccctcagtgcccgcagagagaagggactgaaccaggagccccaaggcaggggtctggccctccagaagatgggtcaagaggaagagagccctccagccacttccccatgctgagctggcaccctcaggcctacgttccctcaggtgccctcgaagcactgctttgaggtcccctggcctgtctccactcttgcattatccttcatgtcaccgaagccaccccaaccagcccctctcccagactcagagtagaaggccccatcctctcaagccccaggacccttcaaagggctgggacatcctgggacttgggctccagcatctgtctcaggccagatgagggggcaccggtccctcatagggcagggccaagtatatatcccttggtgggggacatagtgtggtgacagttcactgcatattttgagaccttattctctagatccatagttaatgatgccctggcagtcatacctcttgccatggggaagcttctgatgagagaaaggagccccacatccactgaaacatcctttggttctcaagcttcttctggaggcagcaaggaaaaataaaacccaccaaggctcaagaagggaactatagaaaagttcaggtttttaggctatagcagagacagtgagaaagcatctgggcctttctcttcctcttggtccaggggacctcattcaccaactagagcttggtgtacaggaacggggtcacagtgctgagggggcttgagtcccacctttcagcttgatggatgctcacctcttctcagccccagctcgtgccctgtttttctagccatagcccccagattactcacagctcctcatgccatttcctgtccagattgctatgtatgactctgacctctcttgtccagtggtctggtgctcacctcctctcactgctagaatattcaccaagggtttgcatttgggaagtcccttaccagctcctgcttagagctggtagggccatacatgtccacactcccaactggtggctctcccgctgaatggggcctcagcaggtgcccaagctgctacaaccttggccactctgtttctccaccccagcactgggcatggtaattagcctttccccatgttaatttattcagttttttcaagggtcaactgaattccccacttcctgggtaagaagcatgatctccttttaatttcacgtctaagatcctggcagcttcccctagctggttcctctgtagtcctgctgggactgtcagctcatttaaatgtgggtctgcagaaggctttaggtctcccccaacccccttacctttcacagaggaacctttcatcaggataaatgattattgctgccctgtgggtcttgctcaatactgttcatacctggagagagaaggtattgaaacatctcctttatgtgtgactttcccaaatttttaaaaattgtttatggtttaggccccttaaatactgtgtagcaggatgaagtctaccattaccagctgggtcaccttggatgggtctgtcaacatctaagcctcagttccctcacctgtaaaaatgagggtagtccctacctcataagggatattgtgaggatggaaagcgaaagtgtgagaaaatacctcccaagtgcctggtacatagtgggtgctaaataaaccactttttgtctgc

SEQ ID NO: 17252 - protein, 285 aa, Homo sapiens
MAPIPKTVGRIKLDCSLRPSCPLEVAAAPKLCKEFGPEDYGEEDIVDFLRRLVESDPQGLHRIHVDGSSGRLQLWHHDYLLGHLDDEGKSTGQSDRGKGAEGLGTYCGLRKSFLYPPQESEPCPQSPSASATFPSVSDSLPQVAMPQKLLVTEEEANRLAEELVAEEERMKQKAEKKRLKKKRQKERKRQERLEQYCGEPKASTTSDGDESPPSSPGNPVQGQCGEEEDSLDLSSTFVSLALRKVGDWPLSARREKGLNQEPQGRGLALQKMGQEEESPPATSPC

SEQ ID NO: 17253 - DNA, 2766 bp, Homo sapiens
  CDS (423)..(2090)
tagtattaaacattttcaaagttacttgccaacatctagaaagataccaggttttctataaaaaagaaaactggatttctggatgcttcttaaaaatcaggaagtctggcagcctgagcccacatcggctggagctgagccgcacctgcgagttgcatctgggatctccagttcaccggcccctaagctcctgagggttggcctgaccctgaggttgcctgtcaatcaccatttcttccctccactccttgtgttacctgcctggtcctgcggggttggcaacaactcaggagcccacctcgggtggttttggaggtgccgtgcacactgctgattgggaggctggacgctgccagtctgtccggagtttcctttacccctgagtagcccccagactgaactggcagcgagtggaggccacgatgcatggttctcttgaagctttgctcttcctgccccaagtcaccctgtcccttgcccacgcccatttgatctgctcaaatgcacaactggagatgtgtgtctttccccacaggtttcttggcgatctcacaacagaaggaataaacaagccaggattttacaagggcccagccggctcccaggtgaccctgagcagcctggggaaccagacacgagtgctgctggaggagcaggctcggcacctgctgaacgagcaggaacacgccaccatggcctactacctggatgagtaccgtggcggcagcgtctctgtggaggccctcgtcatggccctgttcaagctgctcaacacccacgccaagttctcactcctctctgaggtgagaggcaccatttccccgcaagacctagaacgcttcgaccacctggtgctgaggcgtgagattgagtccatgaaggcgcggcagcccccaggccccggggctggggacacctactccatggtctcctacagtgacacgggttcatccacaggcagccacggcacctccaccaccgtcagctcggccaggaacactctggacctggaggaaactggcgaggctgtccagggcaatatcaacgccctcccagatgtgtccgtggatgatgtcagatccacctcccaggggctgtcaagcttcaagccactgcctcgcccaccacctctggcccaaggcaacgacctcccactaggccagccaaggaagctggggagagaggacctccagccaccttcctccacgccttcctgctcgggcactgtcttctcggctccacagaaccgcagcccgccagcgggcaccgcacccaccccagggacctcctctgcacaggacttgccctcttcccccatctatgcctccgtctcccctgccaaccccagctccaagaggccgctggacgcccatctggccctggtcaaccaacaccccatcggccccttcccacgggtccagtcacccccgcacctgaaaagcccctctgcagaggccacagtggctgggggctgccttctgcccccatcaccctctggccacccagaccagacagtcacaaaccagcactttgtcatggtggaggtccaccgccccgacagcgagccagacgtcaatgaagtgagggcgctgccccagacgcgcacagcctctacgctctcccagctctcggacagcgggcagactctaagcgaggacagtggtgtggatgctggcgaggcagaggccagcgccccaggccgaggaaggcagtcggcgtccaccaagagcaggagtagcaaggagctgcctcggaacgagaggcccacagatggggccaacaaaccgccaggacttctggagcccacgtccactctggtccgtgtgaagaaaagtgcggccaccctgggcatcgccatcgagggtggcgccaacacccgccagcccctgcctaggattgtcactattcagagaggcggctcagctcacaactgtgggcagctcaaggtgggccacgtgattctggaagtgaatgggctgacgcttcggggcaaggagcaccgggaggccgcccgcattatcgccgaggccttcaagactaaggaccgtgactacattgactttctggtcactgagttcaatgtgatgctctagaggccaaggcctgagggcctcccaccactgcccagcccctggtcccagtccctttccaccgttggcttcatcaagctccttgcggggttggggctgcatggccagggtggcaggaagacatcccccctccatcccagcccactggaccagaactgggagaggatgagagcaggacaaggcagacagaaggtcaggtcaggaactggtgctgtactgggtacacagtaggcgcccaggacaagtgggttgcaagacaggaagaaaggaaaaggaagggcagagtgctggtttctccaggttgggttgggggcactgctgtcccccctccagctaggacccagcccatccccagatgcctgagcctttgtccaaagtgaggtcactcgagaattcatggacacggcccccagtcagggggcatcttgcaagacctttagtgccacaaataagcatcgagcacctccccattcacacccccattcctcctggctccttatcccccatggtgtttattatttatttccctccccatgcccctggggaccccaaggccccagcttccctctgcacccccagcctatcccagaggccttgcaggtgaccagcagtgtcattgtatttatatacagagcttatgactttaatttttcaataaagaaatctgaacaaggtt

SEQ ID NO: 17254 - protein, 556 aa, Homo sapiens [sequence omitted]

SEQ ID NO: 17255 - DNA, 2407 bp, Homo sapiens
tagcatcgagtcggccttgttggcttactgggagctctaaattctctttattgtaaaagagatgtaaaggttttatattctaaatcctagtaaaattgacagtgatttttaaatataatgcatcttcctttgtctgcttagtaaaaaatttcatttcataattttggcaagctctgtagtggatccaaagtatctttgagttcttgcaaactacaagttgtttcctttccagaaggcttgatttcattaggagacccctctattgagttctaaatagtttatcttagaaagccttgggtcattcacaggtatccaaccagccattgtttagtttgtttttgaaggggtttgataatgctttttaagttgtacagaatgcttaatccatcttattactgtcctgagccatgtaatatgcctgcatcgtgttggggaaatgtttgggaaatataagccagcataacgtgtaaagctcactctttcaccctggaacagacaagaggtgggcttaatagaggcagagactggggatatacctttgtttccctagcatttttatttatttatttttattttattttattttttgagatggagtttcactcttgttgcccaggctgggggtgcaatggcgcaatctttgctcactgcaacccctgcctcccgggctcaagcgattctcctgcctcagcctctcgagtagctgggattacaggcatgcgtcaccactcccagctaattttgtattttcagtagagacagggtttccccatgttggttaggctggtctcgaactcccaacctcaggtgatccgcccacctcagctctcaaagtgctgggattacaggcgggagccactgcacatggcagcattttttaaaaattcagttttaagatctctggtttaggggagagattttattttactgaaccagttctatagaaatttattttattaggaaatttgtctttggaacaaagtggcagctataaaattatttttgttaagcctcagaaatatgaggaagcctgtaaaactctagtggggagatattaacttggagacctaatgctctgtaaatagtcatttaaactgttggttttagtggttttgtttctaaaatgttttcttttaccgtgatgcaccagtatgagatggtgctgacactttctatgaagtggttatgagcaggtttaataaatcctctatacaagtgtttgaatcaattttaaaacataaaaagtggaaatttccttttttgtagacagtaggaacaaggaattatatgcatttttactaagtagtaattttacactgaattgtaaatgtttttacagtgagttttattaatagaatgcttcaccttaaattggaaaacaataatagtcttggactaagtctttgtactaaagcatttgctataattatttttaaaaaaacaaacagatgaaaacctcagagaaggcatgtggattataagatttgtctagtaaaaattgtaattgaatatgtttaaatatttaatttctcattttggggggtttttatttttttattttttagatggtgtctcacgctatcgcccaggctggagtgcagtggcgcgaactcggctcactgcaacctccgcctcctgggttcaagcaattctccttcctcagcctcccaagtagctgggattacaggcatgcaccaccatgcccagctaatttttgtatttttagtagagatggaattttgccatgttggccaggctggtcttgaactcctgacctcaggggtgatccacccgcctcgggctcccaaagtgctgtgattacaggcatgagccaccatgcctggcctttggggggattttaattacagtattaattatagttctaggatttcccacattttatagtagtagtttgtaggatattatgtgccctaattagcagatatagacattatcaaattataatgatagtataattatccctttttaatattggggaaagaaaaatgaaaattcattagttaattactgctttgtgttgtgtgaatttattaacaaataacattattacatataggtcattgttaacaaacaaacatccctgaaaacctctgtgaaaatttaattttttatatcctgattaatatattgtgactttaggcccatttttcatgtgcttcactttgatagagttaatccataaaattgctctttactttagcttatcaaatgaagtattattttgtggactggaggccaaaaagtcaatgtgagcttctcacaggtttttaaagctccactaaaaataattatccacttgtctttacttttgttgaccagaatagttggtaactctgccagagcctgtacttacctgccaaaaacaattaaatctggttaatgcctg

SEQ ID NO: 17256 - DNA, 3407 bp, Homo sapiens
  CDS (2217)..(2558)
ttgcccaatatgggtcaggagaccctcatccatctttggcatgcacgtactggcatcatgtccaagactgctgtgtaaggggaggagataaatgaggagacacaacaactattaactcccatattctgggaagtgacgtgtatcatttctactcgttggccagaaatggtcagctggccctaaggtaatgcagaaagatttggaaaattaggggagtaaatgaaatatttggaacactttcaatccaagcagttcttaatgtttcccccactatcatgctagcccattccaccacctttgcctgaaatactgcaagtatcctaattaatcttccttatcctaatcatgctccaatatgatctattccttcttccattcttgctacctccaactttttgttttccaactatcagttcaaacggttttgttaaatatgaaacagatttgctccaaaccttcaaaagccaagttacttcccatggcctccaggcctctacacaatctgggccctgaatacttctctgacctcctttctaccacttcctgcctaggtcactttgcattagctacactggccttcaggctcttcttgagcataccaactttatttctactcaaagccttcacatttgtgtttccctctgcctagaatgctctttcctcaaattttcaaataactcatcccttcatttatgcctctgcttggctatcaccctcttagagaggctgtctttgaccactctgtataaaagagtctacttctaaccccatatcatcagctgctaatccttttccctgatttttctttcatgggacttgtctgttcccaacattttattatttatttacttgcttagttgtttattgtctgtctcccttactttaatgaaagctaaaaaaagcacaaggaccttgactttaacccttctgctgttttcccagtatcaagagcagtgcccagcacacagtaggttctctataaatatttgttcaataaataagtgaattaattagtaaattagctaaaatatgccaaaattgagatgacaggctcctggccccagttcccagctgggcactccccaggtcacaggtctggcctctccccagagctgtctggacagcctttcctgtgactccttgaggtttccttgaagcccctgagaatattttgttgagaacacctttcatattggtcctagttctagtcaattttattaatcagatcagccaacaccattcacagaagttggaaactggaacagaaccaatttatgtggcagatttttaatgaaaatataatggcaaccaagagaatctgttctagaccttcaagaccgtctctgcaaatgaagctgtgaactccatggctgagctatgtatcttggaatagggcccatgtttagacagagaggtaaggcctgaaaaagtaaaattcaatcttcactggtaatgaaatattaaattagtgtggacacagtggagagacttttactcttttgctgtcactgcttcagcaagcttggcctattaaatccaaatgaagtgtggagaccagacatactctattgttccattttattcttgcatttttctagctgcagcatgccatttggctttcccacctaaaccttcttgctcttactcttcttccctgcatgggaattgtttgtacacagattgaaatagtgcataacagccagaattttcttatattggactctctaacaataacacaaaattattattatatgttgtcccttagacaatgggttgctctgcactggcatgaagttgtggtaacatggaatgcataagcttgtggttcacactgagtgtacaagatacagtttccctgggacataaatctgctctttattgatgtatccaagctccatctcaagtaagaattgggttaagggaaaaatagacccattcattgtgtacattcacataaaaggttttaagaaatcccactctaaagaagcctattcaactttgcttaatctgatatctcataaaactatgatcactgaatccattttatttttgcctgacaaagtgatactccacctgggccacagtgcctgcctcgttgtgtctgaaaatctgtggggacattttggtcacaatgtctggaggctctattggcatttaaaaggtggggaccagggatactaaacatcatctagtatgaggaccagttcttctacatcatgaaaaattatcccacccaaaatgccagtagtatccctgttgggtacatactaattcacactaggaattctagtatacaccacttttttgttgtacagatggagaaacagtctcagatagaggaaacggtatgtgtaagtctcacaactgtgtccatggtccaagtcagtactggaactcgctctcttttttcctattctgtactcacgcttcagcactgtgttgtctctattatgcatacactagcacacttgaaaagtgaacaaaagctaagttgttcaaaagccttaaagaaaaacctccttagagcctccagagtatctacatgcttgtgggaacattgactgatgaatgaatgaaaaattgaaacaagacaggaggaaaagttcagaactagctttcacttggcaattactacatgccaggccttatgcacgtagtggctcttttactccccacaacggaccaataacagaaagattactaactccttttttcagatgaagaaattgagtcttgaagaacttgcataagattctcaaggtcacagagctcataaaaagtgatagagctgggattcaacctgattttagtgtgacttctaagcctgagcactttccttcaggcctctcaatgaccagccaaggctcttgctctcagaaatgggaaacacgatgaagaagaaaaggaagactttttttttcaacaaaatttgttgttctgttaattacatttctattgttaaaaataacagaaatcagttcaagaatgtttaagaaaaagtgagcatttttggaaggatagtggagctcatgaaatctagaagttgaacaatccagctctacaagggcatgtggcagctgcagtatgtggacacaccctccagaatagcactgttgagactgactcactcccagctcccaatcctgtctcaggtcaatgcttgagagagataataggtctgattcaacttgaatcagatattcactcctgctccaaccagttgtggctgtggagttagagtcacatagcaggaacacagttgctgataagccatttttgtggacagagtgggtatctttaagagttacctatgatcaattcttggtcacattgtgaggcagttgaagtttcttttgtgtcctttatatccccctaacaacagggaagttttatcagtaaatgcctac

SEQ ID NO: 17257 - protein, 114 aa, Homo sapiens [sequence omitted]

SEQ ID NO: 17258 - DNA, 2841 bp, Homo sapiens
ttcacaactttctgcctttaaatctggttcctctcttcagcttcaccaagccactgaatgcttttcagttttattaaccctcacattccccatccttctcagcaagagcctctccttatgccatcagcatgtatatacatttcctaggaaatttgatctttcttgtcattcttttttggttccaatcggccttttcctggttctcaaagctctagtttcttctaatttctggatcatcgcaagtctggccctctttgaactttaaaacataatgtctaattccaccccaattttcagcatttcttcaactaaatcgataaagctgtctccattatgagaaaggccagaataatactccgggtaagcataagaaagctggtcattttacaacttctcccgactctaggaagtaatatgatgccatttgttgagcatctacagtgtgccaagcacatggttcatctctgcaaactgctgctacattctgtaaagcaagtattatccgcattttagggattaggaacagcttcctgatctcttgccaaaagtcacagctagtgagtggtttaggcaagatacaaaccctagttagttaatccttactcagaagtgtataggactatgatacattgtctcagcttaaaaaaaaaaaaaaaaaaaaaaggtatttaatcacccagggtcatagtgccttccatagtgtgaccagatacaactgttttttccttgtatccacaaaagccaggttgtgtcagaacaacctttctacagagtaataaccaatcgaaaaagagaagactaccttatttaaatccacttattcacaggagggattaaggcggctgtaactcatcccttatcatctcctaatttctctcctccaaaaccttccatttatctcagctaaaattgtgtctgaaggctgtttgtacttagagttacattacaaataaggtaggcatggtttctagagtccttttctagtcaagcatttccttattcgacaatgtcttcagaattgcattttatcttttgtaattttctgtagctcccatattccaaacaggaattcattgacttgaaaaagtcaggtgtgtaaacagtaatcctttcttgttaggtctgaagagttcatgattttttatgaatataaactaatttattatttgcattaatgtaggagacagcaaagttaacggagagtcataaaacagaacaagtataagttaggctttggagcacctaagttctaatcttgacaattttgagaatcgtttggtacaaaaattcttaaactgtttctgtgccttctccatccatgaaatgaggataatttttttgtgcaaaatgaaacaatagtactttgaaaacttaagagaaaattcaagtgtaaataatcataatctgaaactcatttgtatgaggctgtgaaagattttacagactctttcttttcaagtcagcctttgcaattatattttgcctttgttgaaatgaaaaatgtttgcatctcccgtacgcatacacaaaaccaatagaagaaagtggttggtaaaagatatagctgaaatggaaacactcatatgttaggtggataaaatcataagagaaaatgggaattgactgtactttcaaagtactaaatttgaagtcatcttactccaatttaagtcatgtatatatatatatatatattggcttttaaagagttaaagagagaatcagatctgtccagcaggatagatgggtgaggagaaaagtacatatttaggatttttctctaaaagatctttttcaagattatggagtattttaatatttctgcaaactattccaaatgaatgcattttatatagggcaacatatactggcacctgattctggtttattcgagttcatatgtagggtttgttgggaagaattatatgattggcttctttttttagaggaaatattttcccttttttcttatccatatactattctgaacagctttgcagatttccttaagttcatagcttgtaagtagttcatggtatatagacatagtcttgacttacaactgaaaaaaaatttatgttacagaagtttattttttctatggaactgtctttaaaaacaaaaatattacaaatcttgaccttgaaatattctgtttcctgttatcacattctggatatctattttgtttgcaaatgaaaattattactgatgattagcaacttgagcctgttaataggaaattgcaaagcctgaatacacacacattgccttagcctatcagtagagtagaggacatatgttaagaaaatgtgtctgcttgttgctgttgttggacaaaattttgtgtctgtgtgtatgatttttttttttctattttcttcaaagatgtgaattaaatgaaagtgtgggagccagttaaattattttgtattatgggtgttctggatcctttcactccgtataccattttcttgtaagggcagcatttgtagacttgctaatggactgtagagctgagctatattaattttatacttgactcaggggatcagttctgtgaatgccattgcacgaagaaagcaaatgtttgccttgattttgaatgtatctttttaatgtcttcttaaaacatatttgtttaataatgtagatttgtttttttttttctagtatcatagtaaatattgcttagtacttgcccccaccccactgggtagtttatatactaccctataggtcatgccaaaaatgaataaaagtttaaatgccaaaatgtttatgaaactgctgtctaaatactgattgattgcacaatttaaataaaagctttccttagtt

SEQ ID NO: 17259 - DNA, 1948 bp, Homo sapiens
  CDS (204)..(1301)
ctagcgatttcgcccgggacacccacttcctgcacctgcgcagcgccagcctcggttcccagcagctcttgggcctgccccgagacccagggagcagcgtcagcggcacctttggctgcctgggtgggaggctcagcatccccggcacaggggtcagcttgctggtgcccaatggagccattccccagggcaagttctacgagatgtatctactcatcaacaaggcagaaagtaccctcccgctttcagaagggacccagacagtattgagcccctcggtgacctgtggacccacaggcctcctgctgtgccgccccgtcatcctcaccatgccccactgtgccgaagtcagtgcccgtgactggatctttcagctcaagacccaggcccaccagggccactgggaggaggtggtgaccctggatgaggagaccctgaacacaccctgctactgccagctggagcccagggcctgtcacatcctgctggaccagctgggcacctacgtgttcacgggcgagtcctattcccgctcagcagtcaagcggctccagctggccgtcttcgcccccgccctctgcacctccctggagtacagcctccgggtctactgcctggaggacacgcctgtagcactgaaggaggtgctggagctggagcggactctgggcggatacttggtggaggagccgaaaccgctaatgttcaaggacagttaccacaacctgcgcctctccctccatgacctcccccatgcccattggaggagcaagctgctggccaaataccaggagatccccttctatcacatttggagtggcagccagaaggccctccactgcactttcaccctggagaggcacagcttggcctccacagagctcacctgcaagatctgcgtgcggcaagtggaaggggagggccagatattccagctgcataccactctggcagagacacctgctggctccctggacactctctgctctgcccctggcagcactgtcaccacccagccgggaccttatgccttcaagatcccactgtccatccgccagaagatatgcaacagcctagatgcccccaactcacggggcaatgactggcggatgttagcacagaagctctctatggaccggtacctgaattactttgccaccaaagcgagccccacgggtgtgatcctggacctctgggaagctctgcagcaggacgatggggacctcaacagcctggcgagtgccttggaggagatgggcaagagtgagatgctggtggctgtggccaccgacggggactgctgagcctcctgggacagcgggctggcagggactggcaggaggcaggtgcagggaggcctggggcagcctcctgatggggatgtttggcctctgcttcctcccagttcacagccagagttgcctctcctcctcctcttccccaacccccagaccatgaccagccttagaaaatccatgtactctgttgttagagggcccagagttccttctccacccccgctctctctctcttggcctgagatctctgtgcaggaaccaagatggggctgaagcctctggaggcagttggttgggggcgggcaggcaggaggccctccctccacccccccaccctcagcccggcaacttctgggttccatgggttttagttccgttctcgttttcttcctccgttattgatttctcctttctccctaagcccccttctgcttccacgcccttttcctctttgaagagtcaagtacaattcagacaaactgctttctcctgtccaaaagcaaaaaggcaaaggaaagaaagaaagcttcagaccgctagtaaggctcaaagaagaagaaaaacaccaaaaccacaagggaaaagaaaaacccagtttcttaggaaacgcaaacgatttattatccagattatttggataagtccttttt

SEQ ID NO: 17260 - protein, 366 aa, Homo sapiens [sequence omitted]

SEQ ID NO: 17261 - DNA, 2914 bp, Homo sapiens
  CDS (348)..(2831)
ggagacaccggaaggagccgcggctgctgcgggaagtggccagttcaggaggcggaccccccgagggcagcgctgcggggccgttttccggccctcctgacgcgacactgcccctctccgagagctgagaaggaaaagaggagcttgcggaggtgcggctgcaggccgttgttggtcgagctggcgggtcccgcgggccaggccgtggagagctcctgaaggaagcactaaacatggaaaggaacaaccggtaccagccactgcaaaaacatgccaaattgtaaagaccatcgatgttaggaagaaactgcctcaactaatgagcaaaataaccagctaacatcgtaatgacaggatcaaattcacacataacgatattaaccttaaaggtgttacctcattttgaaagtcttgggaaacaggaaaaaattcctaacaaaatgtcagcttttcgaaatcattgtccacatttggattcagttggtgaaataacaaaagaagatttgatacaaaaatcccttggtacttgtcaggattgtaaagtccaaggaccaaatctttgggcatgtctggagaatagatgttcatatgttggctgtggtgaatcacaagtagatcacagcaccatacattctcaggagacaaagcattatctaactgtgaaccttaccactcttcgagtatggtgttatgcttgcagcaaagaagtatttttggataggaaattaggaactcagccttcattgcctcatgtaagacaacctcaccaaatacaagaaaacagtgtccaggattttaaaatacccagtaatacaacattaaaaactcctctggttgccgtatttgatgatctggatatagaagcggatgaagaagatgaacttagggcaagaggtcttacaggtttgaaaaatattggaaatacttgttacatgaatgcagctttgcaggctctttctaattgcccacctttgacacagttttttcttgattgtggaggactagctcgaacagataagaaacctgccatttgtaaaagttatctcaaactaatgacagagctgtggcataaaagcaggccaggatctgttgtgcctactactctgtttcaaggaattaaaactgtaaatccaacatttcgggggtattctcagcaggatgctcaagaattccttcgatgtttaatggatttgcttcatgaagaattgaaagagcaagtcatggaagtagaagaagatccgcaaaccataaccactgaggagacaatggaagaagacaagagccagtcggatgtagattttcagtcttgtgaatcttgtagcaacagtgatagagcagaaaatgaaaatggctctagatgcttttctgaagataataatgaaacaacaatgttaattcaggatgatgaaaacaattcagaaatgtcaaaggattggcaaaaagagaagatgtgcaataagattaataaagtaaattctgaaggcgaatttgataaagatagagactctatatctgaaacagtcgacttaaacaaccaggaaactgtcaaagtgcaaatacacagcagagcttcagaatatatcactgatgtccattcgaatgacctgtctacaccacagatccttccattaaatgaaggtgttaatccacgtttatcggcaagccctcctaaatcaggcaatttgtggccaggattggcaccaccacacaaaaaagctcagtctgcatctccaaagagaaaaaaacagcacaagaaatacagaagtgttatttcagacatatttgatggaacaatcattagttcagtgcagtgtctgacttgtgacagggtgtctgtaaccctcgagacctttcaagatctgtccttgccaattcctggcaaggaagaccttgctaagctgcattcatcaagtcatccaacttctatagtcaaagcaggatcatgtggcgaagcatatgctccacaagggtggatagcttttttcatggaatatgtgaagagctggttttggggtccagtagtaaccttgcaagattgtcttgctgccttctttgccagagatgaactaaaaggtgacaatatgtacagttgtgaaaaatgcaaaaagctgagaaatggagtgaagttctgtaaagtacaaaactttcctgagattttgtgcatccaccttagaagattcagacatgaactaatgttttccaccaaaatcagtacccatgtttcatttccgctagaaggcttggatcttcagccatttcttgctaaggatagtccagctcaaattgtgacatatgatcttctgtcagtcatttgccatcatggaactgcaagtagtggacactatatagcctactgccgaaacaatctaaataatctctggtatgaatttgatgatcagagtgtcactgaagtttcagaatctactgtacaaaatgcagaagcttacgttcttttctataggaagagcagcgaagaggcacaaaaagagaggagaaggatatcaaatttattgaacataatggaaccaagcctccttcagttttatatttctcgacagtggcttaataaatttaagacctttgccgaacctggccctatttcaaataatgactttctttgtattcatggaggtgttcctccaagaaaagctggttatattgaagacctggttttgatgctgcctcagaacatttgggataacctatatagcaggtatggtggaggaccagctgtcaaccatctgtacatttgtcatacttgccaaattgaggcggagaaaattgaaaaaagaagaaaaactgaattggaaatttttattcgggtaaaaaagtgatgcttttcaaattgatctaggataaagatgaagacctgacaattatcagagttatatgatattaataaaatgattagatg

SEQ ID NO: 17262 - protein, 828 aa, Homo sapiens [sequence omitted]

SEQ ID NO: 17263 - DNA, 1634 bp, Homo sapiens
gttaaatcatcggaatttttgatgataccttttctatatggattacaatttgatcgctgggaattctccaccttaaagaagtaccctcaggtgactacagatgtgttaacacccagcatgttccggtaggagactttctggatggggaagatttccaggaattggcaacaagctcatttcactggtgggtttgctgaagcattatcacaagacagtcagaatgactgatgagtgctcttcaggtgtgaatcatggcaatacagtgaaagacagtgatttactgcttttgagggcgtgcatgtatatgattaacggatggaagtgcaggactccaagatttacttccttccctttccagcagaattacctgagacgagtaaaatctactggcggagtcactccattattcttatctgtggagatctagatcttgatttgaaagtttctgagaaaatcttcagctcagacttgagggtcaactttaccagctgaaggatctgcatttactgctcaaccacatctaatttgatgtcctctgcagatttaaaatgtgtgccttcttttccgtcaccaagtcatccctgggttactactgaacatccttctcaattccccccgacccatggatggctgttctccattgtctgtttcaccagatgtcctcaaaacaaacagacagaagaaggaagtggctaatggagctgtggagtccaagtgtgactgccaagaggaatccagcaaagccaaaaagcccaagcatgtagccctgcccgaagcacgccacacgcatggaaaacccagaggaaatgagtgaggatcaatgggaagaagagagccagccaggaagttgaagatttgtccaggagcagatagctgaagagagagagagagaagagagaacggcttacagctcaggtcctctctccatgcttaggaaccactacaaatgctactgccttgagtctcattttgtttccctctggaaaccacatgtgtaccttgtttgcaacagtatggttctcgatctacacataggctggaatgcagtggtgttggtgtgataagggtcagtgcagtctcaacctcctgggctcaagtgatcctcctgcctcagccttttgagtagctgggaccacaggctcacaggcagaaggaattttccttgtcttggatgagacttttgacttggacttttgggttaagttctggagaccagaaggccaaaatcaaaagtatgggcaggcttgatttctttagaagactccagcggagaactgtgtctccttgcttctgattctacatctccatccatgggccactgtttcagcaacctcagccagtgcaacacaacctcagccaagaagagtaagcagagaaaggagtcccctacctgccacaaaactgttgtctgaaaactgtctcatattgtctcaagttgtcattcattgtgaattagacctgtttaacatgtaatctgcaacatgcttcactgtctaattttccagagcccctcatataaggaactgtattattggtataatcatcatggtgaagaagttggtatgtgggggagagatgacagaaacagagagtaagtcagagctggctgcctgacagataaaaaggaaatgacc

SEQ ID NO: 17264 - DNA, 2537 bp, Homo sapiens
atttacacaagtattgttgagggagtgattttttcttgatatgcgtctgttttcatttattattaatttgaaagataaacagttgtgatccataatggatcatttcttatgtcttttacatagctaataatgttctctgtttatttctcatgaattcccattttgtggctaaagaccagacctttgcactatttcatcaagattattttattgaggtttggcttacatatagtagaggcaatacatagagatacgcaactttgtttttgcagctacaatacactttctcaatctcatatgtttttgtcttgtagagacagagacaagttcagcatgttgcagattgggaatagtgagctatgagaagagatttagagcctagatgagcttaggatagagagtgggctcattggcctaaataaaaagagaagaccagaagtctttgaggtctctgtctctattcatgcgcctcgtggaaaattaccttggtacaatggtagcctctaaatagactgcctcgcaagctattccagaggtcatggaacagaaagccttataaaccaaataaaaattctcaaaatacgttggtttattgaaccaatttgcaatacacagtgaggaacaaggagaaagcaatgatagattaacactgttagtgtaacgtgccagtggagtggaaggaccgcaacacctgaatcctgggttttgtaatgtttttatgtcctgactcacattctgtcacatacgctttcccctaatagtcgggttacaaaaaggaccagagtggccgcttgagccagatgactcaatcagatgaaatgtgcctgaggccaacgatgtacacttgctctatagaagggtgtcaggggcaagtacacttcaccacagcaatagcttgcctattagtctgctgagcagtcatgaatcttattgtatttcttgggtaaggacaggccagaatgagtgtcaccagtgggtaattgaatcaacttctcacacatactgaaggctttatatgtctcatgcatacttagtgtatcatgaatatttggtatctttgtggcttttcatatttctagtgcttcatgaatatttggtatctcttgctcctttctatctgtggtcacacatacacgctctattaactttgcctaataagtctcctaggttactaacttacttacctaaatgtaacacaatgaattccagctttctcatttgttctataccagaatgggaaatttccccaaatcagaaaatcacatcctaacaaagaagtctgtctaagacagtacatctcctgttgaacttgcatctttccacaggactttctgtttttagggatgagactattctctgcttcatcaaggaaagagaaatgttcagggttgtagggatggcacacttattagttctgcctgtctgaaaggttcctgcaggacagtttggtcagagctgcaattcttagtccatggtctaatgcttgagtatctcttctttccctttcctgtctcaggaatcagctgagaattcattcgattgtcatgcctctagccccttactgtgatttgttggttgcactttcatttgctttagttctagaatcacctgttgactcctcagacttcacctaactttggaaactctcttttggaggcttctcatttccccctaattctgtgctgcctgagccctagaattttcccaccaacgaattattccaggtagatcctaagttgctggatctagttgatatttaaacaatatctagttgatatttctcattcagttggatccagaaaccagtatctctaaaaacaacctctcataccttgtggacctaattttgtgtgcgtgtgtgtgtgcgcgcatatgtatatagacaggcacatcttttttacttttgtaaaagcttatgcctctctggtatctatatctgtgaaagttttaatgatctgccataatgtcttggggacctttgtcttctgtgtaaatggtactagagaaaacacctatattatgagtcaatctagttggttttattcgacatgaaggaaatttccagataacaacactaacaaactctcccttgactagggggacaaagaaaagcaaaactgaccataaaaaacaattacctggtgagaagttgcataaacagaattaggtagtatattgaagacagcatcattaaacagttatgttgttctccttgcaaaaaacatgtactgacttcccgttgagtaatgccaagttgttttttttattataaaacttgcccttcattacatgtttcaaagtggtgtggtgggccaaaatattgaaatgatggaactgactgataaagctgtacaaataagcagtgtgcctaacaagcaacacagtaatgttgacatgcttaattcacaaatgctaatttcattataaattgttttgctaaaatacactttgaaactatttttctgtattccaagagctgagatcttagattttatgtagtattaagtgaaaaaatacgaaaataataaacattgaag

SEQ ID NO: 17265 - DNA, 2246 bp, Homo sapiens
  CDS (380)..(1663)
acggcacctggaaatggaaagccagtgaaggctgctttgggccggggcagcgggtgggaccgggcgggagggattccaaagagaccgccgggaaggctagagcttggaattccggctcctcggagtcctggccctcccccaccgccgcctcggagctcagcacaccttggatgggggaggcgggcagctcctagccccgcaccccaggaggcgcgctcggagggaagccgccaccgcgccgcctctgcctcggcgcggaacaaacggttaaagattttgggcagcgcctcgcggggggaggagccaggggcccaatccgcaattaaagatgaactttgggtgaactaattgtctgaccaagcggaggaagttcctgcagatgaagcgcaggaaatacggcttcatctacaagacgcatctgttcgggcggcccaccgtacgggtgatgggcgcggacaatgtgcggcgcatcttgctcggagagcaccggctggtgtcggtccactggccagcgtcggtgcgcaccattctgggatctggctgcctctctaacctgcacgactcctcgcacaagcagggcaagaaggtgattatgcgggccttcagccgcgaggcactcgaatgctacgtgccggtgatcaccgaggaagtgggcagcagcctggagcagtggctgagctgcggcgagcgcggcctcctggtctaccccgaggtgaagcgcctcatgttccgaatcgccatgcgcatcctactgggctgcgaaccccaactggcgggcgacggggactccgagcagcagcttgtggaggccttcgaggaaatgacccgcaatctcttctcgctgcccatcgacgtgcccttcagcgggctgtaccggggcatgaaggcgcggaacctcattcacgcgcgcatcgagcagaacattcgcgccaagatctgcgggctgcgggcatccgaggcgggccagggctgcaaagacgcgctgcagctgttgatcgagcactcgtgggagaggggagagcggctggacatgcaggcactaaagcaatcttcaaccgaactcctctttggaggacacgaaaccacggccagtgcagccacatctctgatcacttacctggggctctacccacatgttctccagaaagtgcgagaagagctgaagagtaagggtttactttgcaagagcaatcaagacaacaagttggacatggaaattttggaacaacttaaatacatcgggtgtgttattaaggagacccttcgactgaatcccccagttccaggagggtttcgggttgctctgaagacttttgaattaaatggataccagattcccaagggctggaatgttatctacagtatctgtgatactcatgatgtggcagagatcttcaccaacaaggaagaatttaatcctgaccgattcatgctgcctcacccagaggatgcatccaggttcagcttcattccatttggaggaggccttaggagctgtgtaggcaaagaatttgcaaaaattcttctcaaaatatttacagtggagctggccaggcattgtgactggcagcttctaaatggacctcctacaatgaaaaccagtcccaccgtgtatcctgtggacaatctccctgcaagattcacccatttccatggggaaatctgatgagcttgaatgttcaaacctgagacttattggaagtgtacatatgagtttttaaggagtgttgtgttgactttatatttaatttctaaatgtatattataatatttatgtgttttgactatactaccacaatctttaaatattaaaataatgaatttgtatcatttccaaataaagtaaaatttgaaggtacttttctggtattttaagattcctgttgggtaaaactcaccagtttagtattttcttagtgtatttaaccagattttacaatgcctacctggacttatttgtcatctttgcatctgttttctgtgagaagaaatcttagctgttttttatgttaacagttattagaaaatatatgtctgtgtgtgttattccagacgtatctctgtaaattcttctatagtcacttagattccctatttggaaaattgatccaagttaatttaatttttttttggtttgctgtactttagggaaagatgaacctgaaaaggtaacactgagaactgtcactctaacctctccagcttatctaacatgtcataaacataataaatctgtgttgtccaat

SEQ ID NO: 17266 - protein, 428 aa, Homo sapiens [sequence omitted]

SEQ ID NO: 17267 - DNA, 2697 bp, Homo sapiens
tcaacatcaattattcaggcccctacagttgtggtattgaggcccctaaaggcttctgcctttcaccaattagtgctgccagttactgaggcttctcccaaaaggtatcagtccagtcttaaagatatttcattgtgaaagaagaaactaaactatcaggcctcttttacaaaatgagagattgaatttaagcttgtcaagcacgtactggaaggtatgaattacactaccatgtgttttgtatcttccctttcaagtgatgatgttaaatgaaggtaagtttttcatccttttttaatttttgttttttataaatcatttcagctttttctggtttatagaggtgtcttatttctaatgcaacagacccccaactttaacagatttgatatggatgcatttattcacaagcaaccccaaaagtccaaaaatgtaataattttgacaaggcccaaagttgagatgctatgaagcttgtgtgtgtgaaaagtcagttatgattgtctggagagaagctgtggtgtgtatgctgtagagtttccacatttcacatgcagtgtactccaaaaagcgggtttgggtcaaccatttcccatctctttttaagaagtgactgctgttggggccaggggacatcatgggaggtggggctgtccagttagctgtgccctgcaccttcagcccaggaaagatttgaacagagcaaaggcttcaagagagggcagaatgtattcggcagaaaagggactcaggtaagcccagcctgggatgagagcagaaaagcattcaagatttgcaggccttgctatggatgcgcttaatcaccatggaggccagcaatacccatctcagcatggctttgatattctctacttcctggcctttaaaaatgacctataatttttcagtttgctttactatattttataaagaaaattctatcttatggttgattgagcattgagacttatgaaggcattaggatagatagctcaggaatgtaaaggttcagaaaaggtctgttttctcagattaacaaatatgatggattccatggctgaccttggtgcttaaaccaggaggtttcaatctagtcctagagttgtgtccctctgaaaggcccaatgccatgtaactaactttaaactggatatatactttgagccttacttaattcacagataagttgacttaactcagtatttttatttcaattaatgaaaacagtcctcttttcaaccccaggttgcttacattttgctggtctccccaagtgaccattggtggagaccaattaatgaaggaatgaaattcactttattgggactgtggtattcaacagagccacacttaaccactttttccaatgaagaatctccagaatgataatgcccaaatatggatggccaagaagaatttgtatctacggtgtgctttatgtgtttttgacactgctgtattctgtgtgatcaagtgatttgcagctggttccaatgtgactgagtgttctcaaagatttctagtaactaagtcaacttaattttcttaagcctggtattactatcagcctcacatttaccactttgattctagttttttaactgttcataacagggcataccgagggttgggatgagagcctacttcctacctcttaaggcactttcctcattattttgccatataatcttgaactgcatgataagctgtttaaatgtccatgacttctcccagagcaactagcaaagtatatgacattttgaatagagattagtggaaaggaaaatgtagagatttaagttcagaggtacaaacctcaataaaacctccttagagcacataccatgagtagagtatatgtaaacgtatatgagaagagagtcgctataatagtcctctctaagtagattagttcattgtctaatggaagtgaacatctttactcctgttatcaccatagtactgaatgaactgtataatgagtttttcaaacaagtatttaaaatagaactttcacgtacaaagcaagggcataaagattttggtttgtgtttctgtaagtgtagtttaccatctaaagctttggtttttaattttaaaaaaagcttcaaggtattgccattccttagcatccttattgattatgggtgatgagtttttaactcttaaaatcatatacgtgtattagtttatcttaactgttgccctaagcaaaagggaaggtatacacctaagggatgtacttattttgcatttttggtcatgggtgggaatggggtgggtgcctacttaaatagtttttaaaaaagaaaaaaatcacaaatatttttctactgttatatatgatcttcctttatactagtttctctctagtaaggcatgccagaagcccaagataccatatcatgaattcttacatattgtaccttttgttggtggttaaatcgcatcagatgcttggcattgctgccataattataaaatgcttgtaaaggatcaaatatcactaaatactttaaattgttttacttaagagtctaatctgggaagttttcaaatcatactattaatgtgtaatctaagctcttcagatgtatccatgaataatcctggaacaatattgcttgtattcctgtcatagaacaggttttgtaatctttaaaagaaatgaaaatttatataataaagtttcaaatc

SEQ ID NO: 17268 - DNA, 2253 bp, Homo sapiens
  CDS (229)..(1101)
tttgatgatgcccaacaggaggaccggaagagactggcggagctgctggtctccgtcctggaacagggcttgccaccctcccaccgtgtcatctggctgcagagtgtccgaatcctgtcccgggaccgcaactgcctggacccgttcaccagccgccagagcctgcaggcactagcctgctatgctgacatctctgtctctgaggggtccgtcccagagtccgcagacatggatgttgtactggagtccctcaagtgcctgtgcaacctcgtgctcagcagccctgtggcacagatgctggcagcagaggcccgcctagtggtgaagctcacagagcgtgtggggctgtaccgtgagaggagcttcccccacgatgtccagttctttgacttgcggctcctcttcctgctaacggcactccgcaccgatgtgcgccagcagctgtttcaggagctgaaaggagtgcgcctgctaactgacacactggagctgacgctgggggtgactcctgaagggaaccccccacccacgctccttccttcccaagagactgagcgggccatggagatcctcaaagtgctcttcaacatcaccctggactccatcaagggggaggtggacgaggaagacgctgccctttaccgacacctggggacccttctccggcactgtgtgatgatcgctactgctggagaccgcacagaggagttccacggccacgcagtgaacctcctggggaacttgcccctcaagtgtctggatgttctcctcaccctggagccacatggagactccacggagttcatgggagtgaatatggatgtgattcgtgccctcctcatcttcctagagaagcgtttgcacaagacacacaggctgaaggagagtgtagctcccgtgctgagcgtgctgactgaatgtgcccggatgcaccgcccagccaggaagttcctgaaggcccaggtgctgccccctctgcgggatgtgaggacacggcctgaggttggggagatgctgcggaacaagcttgtccgcctcatgacacacctggacacagatgtgaagagggtggctgccgagtttcttgtttgtcctgtgctctgagagtgtgccccgattcatcaagtacacaggctatgggaatgctgctggccttctggctgccaggggcctcatggcaggaggccggcccgagggccagtactcagaggatgaggacacagacacagatgagtacaaggaagccaaagccagcataaaccctgtgaccgggagggtggaggagaagccgcctaaccctatggagggcatgacagaggagcagaaggagcacgaggccatgaagctggtgaccatgtttgacaagctctccaggaacagagtcatccagccaatggggatgagtccccggggtcatcttacgtccctgcaggatgccatgtgcgagactatggagcagcagctctcctcggaccctgactcggaccctgactgaggatggcagctcttctgctcccccatcaggactggtgctgcttccagagacttccttggggttgcaacctcgggaagccacatcccactggatccacacccgcccccacttctccaccttagaaaccccttctcttgactcccgttctgttcatgatttgcctctggtccagtttctcatctctggactgcaacggtcttcttgtgctagaactcaggctcagcctcgaattccacagacgaagtactttcttttgtctgcgccaagaggaatgtgttcagaagctgctgcctgagggcagggcctacctgggcacacagaagagcatatgggagggcaggggtttgggtgtgggtgcacacaaagcaagcaccatctgggattggcacactggcagagccagtgtgttggggtatgtgctgcacttcccagggagaaaacctgtcagaactttccatatgagtatatcagaacacacccttccaaggtatgtatgctctgttgttcctgtcctgtcttcactgagcgcagggctggaggcctcttagacattctccttggtcctcgttcagctgcccactgtagtatccacagtgcccgagttctcgctggttttggcaattaaacctccttcctactggtttagactacacttacaacaaggaaaatgcccctcgtgtgaccatagattgagatttataccacataccacacatagccacagaaacatcatcttgaaataaagaagagttttggac

SEQ ID NO: 17269 - protein, 291 aa, Homo sapiens
MDVVLESLKCLCNLVLSSPVAQMLAAEARLVVKLTERVGLYRERSFPHDVQFFDLRLLFLLTALRTDVRQQLFQELKGVRLLTDTLELTLGVTPEGNPPPTLLPSQETERAMEILKVLFNITLDSIKGEVDEEDAALYRHLGTLLRHCVMIATAGDRTEEFHGHAVNLLGNLPLKCLDVLLTLEPHGDSTEFMGVNMDVIRALLIFLEKRLHKTHRLKESVAPVLSVLTECARMHRPARKFLKAQVLPPLRDVRTRPEVGEMLRNKLVRLMTHLDTDVKRVAAEFLVCPVL

SEQ ID NO: 17270 - DNA, 1938 bp, Homo sapiens
  CDS (617)..(919)
tgggggtcacgtccaggtgatggacccggagcccgtccccccaatccctcaccccccacacctcagccactggagactgatgatccaaccacaggatccctactctttggccacgagatcccagtacccagatcctggatcctagactcctatgccccaaccattgggtcatgggatcccagcacccagatcctggatcctagactcctatgccccaaccactgggtcatgcgatccccacccttcagccactagatcccagatccccctgtaaccataactgtggatcccttacttcagcaactcaagtctgctaccctaaccacaagattcaagattatccacaccccagcccttaatccccatcccccaaatcactggatcctgcagccccacatcctaaggtggatcccacgcttccctgtgccccctactggatcctggacctctacgtcttaaccactggatcccacacaaatcagtgaatggatcccaacaccccaaccacaggagcacggattccctgtacctcaacacccagaccctgcctccctcaggcaccagatccagtgtcctagtgaaacgctggatcctagatccccaaccccagatccccatgcctcgagccctggatctccaagctcagctgctggattctggatgtcaacaaacctcaccactggatcctgacaaccacaatgcctggatcctggggcccccatcactggatcccagatcccctcactccacccactggattcctgcattggtttttggttttttgtttttttttaacctcgacactgggtctcagatccttctgctgactgccagatccctgcatttcaagcactacgccttccacccccaggcactggatcccagattcccaagccttcacccaccagattctggctcctaaaacaagtgcgggggccccagtggcacagcaagtggatcctggcaactgcagctgctggattccagattctgggtccccaatccctctgcccagtccctcaatgttgaaacctcatctcttgaaggcagatcctgatattccaaggcactgaatcccaagccctgaatccccggtttctgatctgaatcttccaggcgccgggtcccaaatgttcaggccccaagtctagatcctggcagcccagtcacagagtatcccacacacactggtgcccagagccggcttctcatgacatgaaattgcatggtcgagggagtctgtggggaaggaagcccaggtcctggctgcaacctgcacggatgctggattccccctcaccccacctctgcatggccaccccctcccagccctgtggggaaactgttccctggaaccactccactccctgcatccccacacttcacagcatcttccatccccctcccaccttctaggcgaatagtccccagagctgtgttcctccaaggggtccgaggaatcactcactcctggaggctggcaaggagacagtctgaggccagggacacatgaagggatgtccccaccccagcactatcagggcctccccaggcttccagagttgaaagccaggagaaaatcggcaaagaccacccttccctaaacccaagcacccaatgatgcaaaaaacaaaaacaaaaaaaaaccaccaaatccccaaattcattccagatctatttttctaccagagagaggagcaaagtcctcctcccctgcgcccttacattctgcacttcatagttggattctgagcttaggatcatctggagaccccatggagggacttggaaaggggaactgggatttggggaggggctggaggacttccgcacgcttccacctccttcgacctccactgcgccccacctccctgcctgtgtgtgttatttcaaaggaaaagaacaaaaggaataaattttctaagctcaaaaaaaaac

SEQ ID NO: 17271 - protein, 101 aa, Homo sapiens
MPRALDLQAQLLDSGCQQTSPLDPDNHNAWILGPPSLDPRSPHSTHWIPALVFGFLFFFNLDTGSQILLLTARSLHFKHYAFHPQALDPRFPSLHPPDSGS

SEQ ID NO: 17272 - DNA, 2564 bp, Homo sapiens
  CDS (120)..(1748)
gagatcagaacaatggcctagggtcaggcccagccccaggcccagtggtattactgaattcactgaatgtggatgcagtatgtgagaagctgaaacaaatagaagggctggaccagagtatgctgcctcagtattgtaccacgatcaaaaaggcaaacataaatggccgtgtgttagctcagtgtaacattgatgagctgaagaaagagatgaatatgaattttggagactggcaccttttcagaagcacagtactagaaatgagaaacgcagaaagccacgtggtccctgaagacccacgtttcctcagtgagagcagcagtggcccagccccgcacggtgagcctgctcgccgcgcttcccacaacgagctgcctcacaccgagctctccagccagacgccctacacactcaacttcagcttcgaagagctgaacacgcttggcctggatgaaggtgcccctcgtcacagtaatctaagttggcagtcacaaactcgcagaaccccaagtctttcgagtctcaattcccaggattccagtattgaaatttcaaagcttactgataaggtgcaggccgagtatagagatgcctatagagaatacattgctcagatgtcccagttagaagggggccccgggtctacaaccattagtggcagatcttctccacatagcacatattacatgggtcagagttcatcagggggctctattcattcaaacctagagcaagaaaaggggaaggatagtgaaccaaagcccgatgatgggaggaagtcctttctaatgaagaggggagatgttatcgattattcatcatcaggggtttccaccaacgatgcttcccccctggatcctatcactgaagaagatgaaaaatcagatcagtcaggcagtaagcttctcccaggcaagaaatcttccgaaaggtcaagcctcttccagacagatttgaagcttaagggaagtgggctgcgctatcaaaaactcccaagtgacgaggatgaatctggcacagaagaatcagataacactccactgctcaaagatgacaaagacagaaaagccgaagggaaagtagagagagtgccgaagtctccagaacacagtgctgagccgatcagaaccttcattaaagccaaagagtatttatcggatgcgctccttgacaaaaaggattcatcggattcaggagtgagatccagtgaaagttctcccaatcactctctgcacaatgaagtggcggatgactcccatcttgaaaaggcagatctcatagagctggaagatgacagtcacagcggaaagcggggaatcccacatagcctgagtggcctgcaagatccaattatagctcggatgtccatttgttcagaagacaagaaaagcccttccgaatgcagcttgatagccagcagccctgaagaaaactggcctgcatgccagaaagcctacaacctgaaccgaactcccagcaccgtgactctgaacaacaatagtgctccagccaacagagccaatcaaaatttcgatgagatggagggaattagggagacttctcaagtcattttgaggcctagttccagtcccaacccaaccactattcagaatgagaatctaaaaagcatgacacataagcgaagccaacgttcaagttacacaaggctctccaaagatcctccggagctccatgcagcagcctcttctgagagcacaggctttggagaagaaagagaaagcattctttgagaaaaacaagcaaaggagaagagtgttactgtacccttatgacagaattgtcctggattttgactccatccacgcccatcacctttctacattttgctgacagataactaaccgatgatgaggccgaggtaaaagagacatctgcagtgtgacagaagggagcatgagaagcatggctcaccagccagcctctgtggtctttgtaattagaagcttcagaactcactaatactactgtacctttcattggcgcattaccccataaaactttttgagacgaggtgagatctgagtataaagataggtcagaagtattttaaagggcttaatgtgccaaaaagaaaaaaagctagagaccctttttgcaaacatttggtgaccacacatttgagggaagacgtggcgttaggtgaagcagaagcaaaccctgctcttaggggctcacctaggtgagtgcacagcctgtgacgctacagggagaggctgagtaaaccgagatccagcgttctgtatggcaggggtattgcttatcacagaggttctgaagagtaggaagtacataatgaagagggctttaaaaattgccaacaaagtgagtcaccagggctggcagtagtgtgacggggctgtcctgagctgttaggagagtagatgcggggagggctggtgacctccgtgggtttatatgtcggaaactcttctctccaaatcccaggcctggcttccagcaccatccagctgtgcccaagaagccaccctggtctgttctccaactcttttaaatggtgcccaacttttctaagtgagcttagc

SEQ ID NO: 17273 - protein, 543 aa, Homo sapiens [sequence omitted]

SEQ ID NO: 17274 - DNA, 2267 bp, Homo sapiens
ccatagaaaggcaatcaagcttactccctgcaatcggagtcaatatcaattcttgctcaagcaaacatgttttacagtgttggcgcaatggcaggaactagtcaagggcactttcagatctggaaagaggaaagagaaaatcactcttttgtgtttcttaaacatgccaatcaagcaagaaaatttattccaccccttcatatttgctctaaaatctggggccagtagttgaaatgtgatcttgttctttctcagccttttggcaatttaatgccaaatattccaaatgttagatgaatggcagtaataaaatgattcaaatgtttgataaatacaagctgagagcaaaatctggactctgaaaaatcggaactattttatcatgttgctaaaatgagagcatcattttcttccctctctgtaagtgcggtagtttaatttcctagaaaaagttgctagtgccttgtttaagatgatcatgttatcatttcatgtggatattattggtctaattagaaggagaagattgattggatttactttaaagaaaattattctcctatgtctctttgaactcaggaatagaaaatgaccaagaagcacatcatcttcagatatgatttttgccctcactggggatgtagaaccagaataggtacaacatatgctcagaagagaggtgacttcagtattagccttctagaaactaacatcactttaatttttacatgttccaaaaaaaatcatagtgattgttctgtaataagaatgttaacgtgatgcctatagaagttagaggtttttgtttctgtttctcttcaggcaagtccatagatagaggaaaatcagacacaggctggtgacaactggtatagatacagtgagcatggaatgagaaccacctacaacattgcctgattatttttaagtttatatcaaaactgcttcacaagttcacaaaagttgtcactcttaatttgggttaagaaaagtaatagtattatctctgctgaagttgattgtttttctcttttaccatgactgttggccaaaagcaagctgaacctctgcactttgaaacaaagcacagtatgaatctttaacccaagcacttagtttcaccactgagattctacatcatctgcaagaaaatgcacaaacttttggtccaatgttggattcttcaaaagtgcatagcaaaacttttgtgctatgccgcttgatgtaacttttaaagatgttatcaaatgttaaatgcctcattctgcgttaatttgctgttggctgttttgtgaacacaaaataaacttgagatttttttttttttttttttttttttgtgaaactcctccaaagccaatttcagcccttggtaagcttgcagacagttactgatcttaaatttaattttaaaagacaatgtatcttaattataatttagctttttaaaacaatgagatagctttacatttcccctttgtttgaatgagaaaatggatcttgggttgctatgctagaacacttgtagattgctgggtcctttgtaagggggccatggacacaccacactttctttcaatccttacatttgaagcattgatattcttcaaaaccttcttgttacatgtgcgcaatagaaatttctaatgttcatgacttttatctttcctgtccatcaattcactggttgtaaatgcttcctgagagctgtctaggtctgtatcccagattgttgcttaatgacatctgacagatgcattgttttctgaaatcagcttaagacaccaattgtggcaactggaaactcattacctgctgcattggatcaactatggaagttggagcaggggtgggcggaggtcacctaaccaatcaatggaaggcaactcacacctgctccaagcctcagctttgagaaacaaacacgtttataagaaaaaatatatagctattattacagaagtgaatatgttgtgctctcttactgctcttggtgcattgacagtttctgtatctcaaccctattcatctttatgaaaaagcattctgaagatctatcctcagcactgctgagtgtgcagtcacactttcctaccaacccccttcttaccatctctagctgccatttgtggggggaacaaaacaagggaatcctgattgtgtacagtataaattgtattatattttttgtacttatgttttatgtaaatagtttgtctcattcaattgtatgtgagcattgaaataaatcctaccatttaggggac

SEQ ID NO: 17275 - DNA, 2225 bp, Homo sapiens
  CDS (465)..(2207)
ctcggccgccgtaggccggcttggaggctgggggagggcccagaagtggaataattcaggaaagtgcaggttctgggaagtctcggtgggttccccgcaaaatcaggcttgagtgcagtggcgcaatcgtggctcactgcagcctccatctcccggggctcaggtgattttcccacctcagctttcccgagtagctgggactacagagatggcatctcactatgttgcccaggctgatcttgaactcctgacctcaagtgatcctctctccttggcctcctaaagtgctgggattccaggtgtgagccacttcacccagccacatttatccatcttgtaaaatattgctttgttttttggtgcatttcaaagaatcactgaccctggaggatgtggctgtggagttcacttgggaggagtggcagctcctcggccctgctcagaaggacctgtaccgagacgtgatgttggagaactatagcaacctcgtgtcagtggggtatcaagccagcaaaccagatgcactcttcaagttggaacaaggagagccatggacagtagaaaatgaaatccacagccaaatctgtccagaaatcaagaaagttgacaatcatctacagatgcactcacaaaagcaaagatgtctgaagagagtggaacaatgccataaacataatgcatttggaaacatcattcatcagaggaaaagtgattttcctttaaggcaaaatcatgatacatttgacttacatgggaaaatactgaaatcaaatttaagtttagtcaaccagaacaaaaggtatgaaatcaagaattctgtgggggttaatggagatgggaaatccttccttcatgccaagcatgaacaatttcataatgaaatgaacttccccgaaggtggaaattctgtgaatacaaattcacaattcattaagcatcagcgaactcaaaacatagataaaccccatgtatgcactgagtgtgggaaggctttcctcaagaagtctcgcctcatctatcatcagagagttcacactggggagaaacctcatggatgcagtatatgtgggaaagccttctccagaaagtccgggctcactgaacaccagagaaaccacacaggagagaaaccctatgaatgcactgaatgtgacaaagcattccgctggaaatcacagctcaatgcacaccagaaaattcatacaggagagaagtcatatatatgcagtgattgtggaaaaggcttcatcaagaagtctcggctcattaatcatcagagagttcatacaggagagaaaccacatggatgcagcctgtgtgggaaggccttctccaaaaggtccaggctcactgaacaccagagaactcatacaggagagaaaccctatgaatgcactgaatgtgacaaagcattccgctggaaatcacagctcaatgcacatcagaaagctcacacaggagagaagtcatatatatgccgtgattgtggaaaaggcttcattcagaagggaaatctcattgtacatcagcgaattcatactggagaaaaaccctatatatgcaatgaatgtggaaaaggcttcatccaaaagggcaacctccttattcatcgacgtactcacactggagagaaaccctatgtatgcaatgaatgtgggaaaggcttcagccagaagacatgtttaatatcccatcagagatttcacacaggaaagacaccctttgtatgtactgagtgtggaaaatcctgctcacacaagtcaggtctcattaaccaccagagaattcacacaggagagaaaccctatacatgcagtgactgtgggaaagctttcagagataaatcatgtctcaacagacatcggagaactcatacaggggagagaccgtatggatgctctgattgtgggaaagctttctcccacttgtcatgccttgtttatcataagggaatgctgcatgcaagagagaaatgtgtaggttcagtcaaattggaaaatccttgctcagagagtcatagcttatcacatacacgtgatctcatacaggataaagactctgttaacatggtgactctgcagatgccttctgtggcagctcagacctcattaactaacagtgcgttccaagcagagagcaaagtagccattgtgagccagcctgttgccagaagttcagtctcagcagatagtagaatttgcacagaataaaaaccatatgaatgc

SEQ ID NO: 17276 - protein, 581 aa, Homo sapiens
MLENYSNLVSVGYQASKPDALFKLEQGEPWTVENEIHSQICPEIKKVDNHLQMHSQKQRCLKRVEQCHKHNAFGNIIHQRKSDFPLRQNHDTFDLHGKILKSNLSLVNQNKRYEIKNSVGVNGDGKSFLHAKHEQFHNEMNFPEGGNSVNTNSQFIKHQRTQNIDKPHVCTECGKAFLKKSRLIYHQRVHTGEKPHGCSICGKAFSRKSGLTEHQRNHTGEKPYECTECDKAFRWKSQLNAHQKIHTGEKSYICSDCGKGFIKKSRLINHQRVHTGEKPHGCSLCGKAFSKRSRLTEHQRTHTGEKPYECTECDKAFRWKSQLNAHQKAHTGEKSYICRDCGKGFIQKGNLIVHQRIHTGEKPYICNECGKGFIQKGNLLIHRRTHTGEKPYVCNECGKGFSQKTCLISHQRFHTGKTPFVCTECGKSCSHKSGLINHQRIHTGEKPYTCSDCGKAFRDKSCLNRHRRTHTGERPYGCSDCGKAFSHLSCLVYHKGMLHAREKCVGSVKLENPCSESHSLSHTRDLIQDKDSVNMVTLQMPSVAAQTSLTNSAFQAESKVAIVSQPVARSSVSADSRICTE

SEQ ID NO: 17277 - DNA, 2748 bp, Homo sapiens
  CDS (250)..(1011)
agactgctgtgctagcaatcagcgagattccgtgggcgtaggaccctctgagccaggtgtgggatatagtctcgtggtgcgccgtttcttaagccggtctgaaaagcgcaatattcggatgggagtgacccgattttccaggaactgaagttaaaagatgaagaatgtgagaggctttcaaaagtgcgagatcaacttggacaggaattggaagaactcacagctagtctatttgaggaagctcataaaatggtgagagaagcaaatatcaagcaggcaacagcagaaaaacagctaaaagaagcacaaggaaaaattgatgtacttcaagctgaagtagctgcattgaagacacttgtattgtccagttctccaacatcacctacgcaggagcctttgccaggtggaaagacaccttttaaaaaggggcatacaagaaataaaagcacaagcagtgctatgagtggcagtcatcaggacctcagtgtgatacagccaattgtaaaagactgcaaagaggctgacttatccttgtataatgaattccgattgtggaaggatgagcccacaatggacaggacgtgtcctttcttagacaaaatctaccaggaagatatctttccatgtttaacattctcaaaaagtgagttggcttcagctgttctggaggctgtggaaaacaatactctaagcattgaaccagtgggattacaacctatccggtttgtgaaagcttctgcagttgaatgcggaggaccaaaaaaatgtgctctcactggccagagtaagtcctgtaaacacagaattaaattaggggactcaagcaactattattatatttctcctttttgcagatacaggatcacttctgtatgtaacttttttacatacattcgatacattcagcagggactcgtgaaacagcaggatgttgatcagatgttttgggaggttatgcagttgagaaaagagatgtcattggcaaagctgggttatttcaaagaggaactctgatgctctgcgtgggaccatgcctgaactccccgaataactgaaaaatggctgaatatttttatggttacttgatatttatttccaaggagtgagcctaagacttttttccccttttgcaaattgctctaagaagtaccatgatttcttttaaactgatctatgctgtgtttgcttattctttagttgaacacactatgaagaattccaggtgtactagtgaatgtaatttatagttgccaaaaaaaaacaaacctgaaataaataaatgttagattgaatgtgtgtacattttctcttctagctctgacatggcatttagggttagcagaatgtattaaatagtaattttcaaactacacagtagcttccttccttgtgagaggcaagaaagaagtctgagtggatagtactcactttccaaggcccccacctctagaatggctttatttttatctgttttctatattgggtttcaaaaaagattttatttgaagaaatacttctgctgctacaaagtttgaaagttactattttaattattctgctctctgtaactgaaagaatccctttattttggttattcattaaaatataatagaaggcagtcagattttatcccagagatgtattcctgagtgtcttgatatagtgtattcatgttttatatgtgttgaccactatattgtcattggagggacatagatgtaaatgagtttgacgtgtgtcaaaggggtttaaaggggtgtggattgaatgaatggtacgtgcgaagtatatgctgattatagaaccacttgatctctgcattccaaattgtaaaactgactcaactggagaaattataacaaagaggtttgtggtagaaatgtaataagtatagaaaagcaaaaagaaaagagaaactgctttagtttctgtttagagaaagctgctgttaatatttttggatagtagcctttcagctttcagatattttctacttacatatgcatatttttgaaacaaaaagtaggctttttttttgctttttaaacctaaacattaaatatattttcccttgggtaaacctacacatcctaatccctgtttatagaattttaacataatttaattgtgtttggagatgaggtggttttcagtttatttttcatattataatgctgtgacgagtatccttatctgtacacttctgaacattgtggagttctttcatgtggatgcctggagataaaattgtgtcgagatatatatgtatttttaaatgtttgatctgcattgctagattgccatccagaaaagttaatcaatttgtattcacagcagcagtgtacaagagggctggttttctgaagataacatttttttcagtcctgttcagaggtttggtcaatcttacctgtagatgacttcagccaccaggctggatgggagcccacagacaaaaggacattggtgtatgttatggtgaaaaccatcagtaccatgcctagctcaagaatgtgaaattgaacctgaaaaaaactttgaacctacaattttatgttctgaaaatagttattctaatgtgagggcattaataagaatatgtaccatcaaagcatcagaagattttccatacaaactaaaatcacttttggagaaagtacctaaataaaaagagaaacaaatccaggagatactgtacggtttgaaagaaaggtaatcaaatactcagaaaaagtttgttgatgactt

SEQ ID NO: 17278 - protein, 254 aa, Homo sapiens
MVREANIKQATAEKQLKEAQGKIDVLQAEVAALKTLVLSSSPTSPTQEPLPGGKTPFKKGHTRNKSTSSAMSGSHQDLSVIQPIVKDCKEADLSLYNEFRLWKDEPTMDRTCPFLDKIYQEDIFPCLTFSKSELASAVLEAVENNTLSIEPVGLQPIRFVKASAVECGGPKKCALTGQSKSCKHRIKLGDSSNYYYISPFCRYRITSVCNFFTYIRYIQQGLVKQQDVDQMFWEVMQLRKEMSLAKLGYFKEEL

SEQ ID NO: 17279 - DNA, 2556 bp, Homo sapiens
  CDS (1125)..(1457)
tcttcaccactgctctcccagaggtccaggtccgggagatgacagtggctcccagaaagcccaggattcaatcgctgagagagtgcttaggcccgaatgccggcccaaatcgttctactcaccgtgtcggaggccgagagcgatgagagtacagggaagtgaggaagagggggtggccgccaggctcctccgcttccctgggtccaccgcggatccctcccgcttgtcaggaggcggccagcgggtaagccgactggcggaaatgcgagagaggagaagggaaaggtggagggctaaaggggcaaactgagaggaggcggatcccgcaaccgacactgggatcgtttcccctcgcaaagcgaacccaaaatggcggcggcagcggcggcagcagagtggccgcggcagctcctccagagggagggtgctaagggcgcctagcgacacccccaacctcccactcctccctcctcgcgttcttccccacggtcccccgcttcgcccgactccggccatgtagcgcgcacgtcagcccgcacgcgtacgagtgtctacgggctcgtcgctggctgctcccaccaaccaccaccttcggccgtcctgcgagccagccatcccgtacgcgctcacccacgggaacctcctcgcccagttctccactccccctcagaccctgtcaagccggctccagcgcaggccctcacgcgtaccttcagcggcgcgagcccaagccttctccacctccccttctctcctccccctccctccccgcccgcacggccaccaaccgccgccaaagcagccgccgccagcacccccaccctacactcctcgcgcgtgcgcctcccacagtccccaccgcgggactgttccattcctggcggctgcaggggcaggagaggaagggaccggcaaagcgagtctggcttgccgtttgactggaattgccagggtggccggccgagtcccatgacaacctacctccctgggttcgtcgccgcggcgctgcggctcgcctcctcctccatgggaccgcggcgaggggatcgagggcggcctagcgcccctctgccggccggtggttggaggccgcggcggctgcgcgttgagtcgtttcctgccggatgacccgacccttttttgcagtctcaggacgggcgctttggagccggccccaggcagcgtgtgtcggtcgcctagtctggagaactagtcctcgactcacggtgagggaatggaccgacacgggtattgtaccgctgagggaaaggagcgggactccggacctccaggaggtagggagtgaggccggtagaccggcgcgcctccgggggggattcctcccgggcgttgagttgccaacctgggacccgaggaggttcggcgtggtggtgtgctttttgttgttgttaaccctcctcggatttctcgaatttcacaccactgtccatatgcgatgatgtttgtttgcccttgacgcacttactcatggatggtacttcagcctcgttagacagcctggtgatggaggatgaagaaaccatgtgcttctcattcagttctggactcagtttcccttgtcttcagcaagttatttttgttagttccttatcaaaaagtgtacataaaaattaggcaactccaaacatgcctccagggttggtgtgtgaaataataagatagggctgggcgcggtggctcacgcctgtaatcccagcactttgggaggccgaggcaggtggatgacaaggtgaagagatcgagacaatcctggccaacatggtgaaaccccgtctctactaaaaatacaaatattagccggccgtggtggcgggcgcctgtagccccagctactcgggaggctgaggcaggagaattgcttgaacccgggcggcggaagttgcagtgagccgagatcgcgccactgcactccagcctggcgacaaagcgagactccgtcacacacacacacacacacgaaataataatatatgtaaagtggaattagctccaagtcgttaataaaacaaagcaggccgggcgtcttgttaaatagttgtatcaatgacttgatttagattaatgaggatatatttttcaaatttatgccttttacaaaatttttaaagagtaggtaatgtcggtgatagatataaagaaaggaaaagatctccagatgtggaatcttctactggatcctgtaacagaaagaagacattaggctgggcgcagtggctcacacctgtaatctcagcactttgggaggcggaggagggcgcattgcttgagcctaggagttcgagaccagcttaggcaacacggtgaaaccccatctctacaaaaagacacaaaaattagacaggtgtggcacacgcttgtagtctgagctacttgggaggctgaagcaggaggattgaggaagaggttgcaaagttagccgagatcacgccatcacactgcagcctaggtgacagagcgagaccctgtctcaaaaaaagaaagaagacattagcagaaaagctgaggaaatgcaaataaagtctgcaatttttaaat

SEQ ID NO: 17280 - protein, 111 aa, Homo sapiens
MTRPFFAVSGRALWSRPQAACVGRLVWRTSPRLTVREWTDTGIVPLRERSGTPDLQEVGSEAGRPARLRGGFLPGVELPTWDPRRFGVVVCFLLLLTLLGFLEFHTTVHMR

SEQ ID NO: 17281 - DNA, 2119 bp, Homo sapiens
  CDS (69)..(749)
ggcagccctccccagtggagccccgaggacccttttatttctgcaggttattgcttgatgacttgggaatgaattcttgggacagaaggaagaattttcatctattgaagaaaaattcaaaattattgagagagctgaaaaatttggactcccgccagtgccgtgagacacacaaaatcgcagtgttttacattgctgaaggtcaagaagacaagtgttcaatcctctctaatgaaagaggaagccaagcatatgaagactttgttgctggacttggatgggaggtggatctctccacccactgtgggttcatgggtggccttcagcgcaatggcagcaccgggcagacggccccttactatgctacctcaactgtggaagtgattttccatgtttccactcgaatgccgtcagactcagatgattccctcaccaaaaagcttcgtcacttggggaatgacgaggtccatatcgtctggtctgaacactccagagactaccgcaggggtattatcccaactgcctttggagatgtttcaatcattatttacccaatgaagaatcacatgttcttcatcgcgataacgaagaaacctgaggttccattttttgggcctctgtttgatggagccatagtgagtgggaagctgctgccaagccttgtatgtgccacgtgcatcaacgccagcagggctgtgaagtgcctcatcccactctaccagagcttgtatctttttgctttaaatgtgtaacttactaaccatcccagaatcaagattcctggcagtttttcataagaggtaagtattcaaaactgaattgaagagggaagagaatttttttcaacctctgttaaaaataacatagtggtttttcatagcatttgttaatttatattaaatataataattttatgctgcattaaacttagagtttactttcataatttactcacatacgtttgtgtctgagaagctgtgaccattatgagatgctcatatcttcttaggtattttgccccacgttcagtctcatcctgtatccctcttatttgtggcagtccattgtatataaggtgggatgctgagcaaaacgtatcgctcattcagagtgcctaccagaaaccaaagcaaatgaaatgaccctaataaatcaaagaatgtggcaggtaccacctgagaagtgcaagtaggtttctggaagatcagaggagatagaaattgcatttggttgagggtagagggaaagatgtcctgaattaagttgcatttggacttatcaataggaatagctagaaattcttttgtaattttcccaaatcattgatattttctctagttcctgattttgtttccaaaaacagaataaatttcactcctaaaattttttcctcaaacattaattggcctgctgtagtccttaaattcaagcatgatctcaagttataagaaaaagagattaagatgggtgaccttataaaattgatgcaaaaaaagtgacctcctaataaaacttagaatctctttgtttctaattggtattgataataatttgaaacatattgtgtttgacctctatatatacttctcccaacctgatagtaagtgatgtgttgctatagcaagtgagagttgggggtagatgaaaactatcccatgtgaatagatacggttcatgaaaaaatacctttcattaaaatcctggtcacttcattgactgatattctgcctttagattaaaaaaaaatacatatgccatgtggcaacttaaaattatcatagaaatgagtagtagaaaagagctattaggtcccatctggtccctcccctgggggccagggcaggattattcccttcagtgtactctctcgtgctttgtccaggctggtggtgagtgttttggagatggcattctttgcagtgatttccacaacactgtagacgtaatcttgtggctggtgtcaatttggccttcagcatggagtttttatttcacatactattaaaaagagcctcttggcagaaatgagaaagaactattcagcgattagtttgtcagtttgcatgtcaactaggacgagctgggcacgcatcagtcaagtatgttggaccaaggcagc

SEQ ID NO: 17282 - protein, 227 aa, Homo sapiens
MNSWDRRKNFHLLKKNSKLLRELKNLDSRQCRETHKIAVFYIAEGQEDKCSILSNERGSQAYEDFVAGLGWEVDLSTHCGFMGGLQRNGSTGQTAPYYATSTVEVIFHVSTRMPSDSDDSLTKKLRHLGNDEVHIVWSEHSRDYRRGIIPTAFGDVSIIIYPMKNHMFFIAITKKPEVPFFGPLFDGAIVSGKLLPSLVCATCINASRAVKCLIPLYQSLYLFALNV

SEQ ID NO: 17283 - DNA, 2401 bp, Homo sapiens
  CDS (157)..(1449)
gattggaagcagaggaagctgaagaaaagtaatgtagtttccttaaaggcatacaaaggactggcagaagtcgctgtgaagagcttgtgtgagctgttggtggcactacctcattttaactttcacaacaacatcatcgtattgattgtccctctcatgaatgacatgtcaaaattgatatctgaaatgtgttgtgaagctgtgaagaaactctttaagcaagataaattaggccaagcttctcttggtgtaattaaagtgatttctggttttgtgaagggcagaaattacgaagttaggccagagatgttaaaaacatttttatgcctaagaatcaaggaagtagaagtgaaaaaagatacagaagacattaataaaccaaaaaaatttatgactttcaaagaaaagagaaaatctctatcaagaatgcagagaaagtggaagaaagcagaagagaaactagcgcgagagcttcgagaggcagaagcttcagagagtactgagaaaaaacttaaactgcacacagagactctgaatattgtgtttgtaacctacttcagaatattgaagaaggcccagaggtcacctctcctgccagcagttctagaaggtcttgccaagtttgctcaccttataaatgtggaattttttgatgatctgttagtagttcttcatactctcattgagtctggtgacctaagctatcaagaaagtcttcactgtgtccagactgcttttcatattctttctggacaaggtgatgttctgaatattgatccattgaaattctacacacatctctacaaaacactgttcaaattacatgcaggtgctaccaatgaaggtgttgagattgtactccagtgccttgatgtcatgctaactaagcgcagaaagcaagtttctcagcagcgagctcttgccttcatcaaacgcctttgtacccttgctcttcatgttcttccaaattcaagtattggcattttagcaactaccagaatattaatgcatactttccccaaaacagatctactgcttgacagtgaatctcagggaagtggagttttccttcctgaactggatgagcctgagtactgcaatgctcagaacactgctctgtgggaactgcatgctctgcggaggcattatcatcccatagtgcagagatttgcagcccacctgatcgctggagcaccttctgaaggctctggagcactcaaaccagagttgagtcgaagatctgctactgaactttttgaggcatatagcatggcagaaatgacattcaatcctcctgttgaatcttcaaaccccaaaataaagggtaaatttttacaaggggattcatttttgaatgaagatttaaatcagctaatcaaaagatactccagtgaagttgctactgaatcgcctctggatttcacgaaatatttgaaaacatcactacactagtagaggaatgaagtcagtggactttcttgtatatttgtgtgtgcagatgtacataaagatgagttgttaacttaggatcttttctttttatacaaggaaagcttcctaagaatgtctaggaagaagaggaagaatgaccctttgcatggcacagggttctgcccctattctgaatatgtcattccatcaaggagatcaaaagcctttttttctccccagtatttggaaattactttcttgatgatgctgccttttaaaagcttcacgtacattatagttttttaaaaaaatctttggactggatcttactgaagtgcagttgctatattaaaattagggcatagagcacagaaaaatcaagaccatgagaagacattttaccatttagctactttttataactaaatactctttaaatatttttatttcaatactgtggatggaaatgagaagcattctaaatttgagttaatatatttttatgaagatatttgagaaaagaaaaaaatagcttgtattcaggttcattggcttttgctggatgatccacctaaagaagttacctaatttggccttttaaaaaaggtgttagtgtttattatagctactttcaaggaaagtttgaatatgattctagtctctaaagttcttcacgttttctgacattccctggagggtgactggggaagaattgctccagggtagaagaaccaggcccaagactttaccattctgatctagagacaaaggatactcaatgaggagcttttttcccctcttggaacaggtaaaatgctttttcttattaatataattataaaacagtattttatgtaacagctattcccatattctaggagtggcctaagaaatgcgtgtttcagtgactagattataaatattctctattgtgaatagttgaataaaacagctgtttttttctgcttct

SEQ ID NO: 17284 - protein, 431 aa, Homo sapiens [sequence omitted]

SEQ ID NO: 17285 - DNA, 2460 bp, Homo sapiens
  CDS (1220)..(1522)
gcagcagcatatctccctattatagaccagaatacaggaatatcgagcacttaagtaacttagctgactttacacaggtaataataaagagttgaggttcataaccaggctgttgactccaaaggccataattttactctcagctaccaacatagcctgcgtcttagctagttcactcagttacaccaacccatatctgcatagatgcagtcttttttaggagggaaatactcagtaatttcttttattctaaccaaagtctttgcatcttttaatctggagtctatattttacatacactgtgagtgaagagatctctcaatattagaattgtaaatgtttgctgatctttgcatttttatttccataatccaaatgagtcataatccatatgggttttggttttaaaatggattagtaaatggttaaattaatagacccaatttcaaaataaggttttttttgaattctactctcttgatgttgcacctgaatacacaagtaaatatggcctgctatggcaggctaaaagtgaccaagtttttgaaactaaatccacattggagcagttttggacagacagacccacttcaagtgctggtagaaataacattatcctgaggggatagtcaaactagagagtagctctgttaaaattagcatccagaaaatctctagagagtaagggcaaatttagcaacctgtagcctaaggcacaatgaagggaagtctgtgaagcactgaggaatttttagttgatagatgatttccatacaggaattctgcagcagggtcccaggtttgaaagaactatctaaaggaatgcatgatatatggcagattgagaagacttgataagacaggaatttggacctgcaaaacatcaagggttaattatcaaaattgggcataaggtgggaactaaagactagaatgatggcagaagcctgtttctttaggtttgggagactagagagagacaagcatgggtaatttgatactgtatcccacagaatgttgggttagctagaggtcttaaaatcattcctgccttagtttagggttaatttaagaagttagcagaactgaacctgccattgggagttagggacccatagggacccatctgtggggatggagagttgaagaaactagagaaacagatggggcctaaccctagattcaaaagatgcttttgaaaaagttgtaaactttttgcatggagacttggttctgtcttctttgctgccttacctcttgcaaaattctacaactggtccatgtagataattcatctagtacactggtgccctgtttcctaaatctccttaacagcccacccttcactgccactgttagctatcagctgtgtcacagagtgagttttgccattgctccaaatcagcaagttaaaacttttttattaccatgctttttgatcttttgctcagagccttttcatagtctcataactacactcttgatacatgtgttctttgagctcatggagacttctagttcctgatttttccattttctcctggtctgtcagtctccttgtgtgggcttcattgttcacttgaagtatttttttcacattgcattcctttgaggccttttgccccttccatgtaatgagagcaaaagcacccgagaaactacgtaacctttacatttatttgttttggtaaaatattttggcttttactactaacatttagtttgctaaatcagtctttcaagataatactttgtgtgtgtgtgtgtgatttagaacgtaggagtgaggtacctgtatatcctagaattacacaaatgaattaccaacaattaaatggcaacttttaaaattgtattttaaacatcaagtaaccagagatggaaaaatcttcctataccctcttcagattaccctgtacattattttgatggacgaaaacggatgatcttgagcactatttcatggatgggaggaaaaaatccatttttggggattgcttacatcgctgttggatccatctccttccttctgggagttgtactgctagtaattaatcataaatatagaaacagtagtaatacagctgacattaccatttaattttatattatgaaagcaaatcatctgcatgtgcatcaaggccagtcctattcaacctagctttcgaatgctgatatctggttagtatgtcattttgaagttggcacataacttttctaaaaaaaagcagtctttgttgtttgcttcttccctacggatgacttctaaaaatatatgacgggtataaaaaaattagctatattgatcatatcaacactgtaactgctgaaatggcattctaatgtttgctttttattcggacaggccacatgatgcatagagcctctttcatgtgacttgtgtctactgcttaaatctttatgctgtgttgatgatattatattgacatatgaagctgt

SEQ ID NO: 17286 - protein, 101 aa, Homo sapiens
METWFCLLCCLTSCKILQLVHVDNSSSTLVPCFLNLLNSPPFTATVSYQLCHRVSFAIAPNQQVKTFLLPCFLIFCSEPFHSLITTLLIHVFFELMETSSS

SEQ ID NO: 17287 - DNA, 2489 bp, Homo sapiens
  CDS (188)..(1411)
gaagtcagatgaaaaaattgtgattcaccataagccattgagatccacatggagccaactctctgcggtgaaaagaaagggattatctcagacagtaagccaggaggaaagaaagagacaagaggctatctttgaagtcatatcctctgaacattcatatttactcagcttggagatcttgatacgaatgtttaaaaattctaaagaactgagtgatacaatgactaaaaccgagaggcaccatcttttctccaatattacagatgtctgtgaggcaagcaaaaagttctttatagagttggaagcaagacatcagaataatatcttcatagatgacataagtgacattgtggaaaaacacacagcatccacatttgacccatatgtgaaatactgcacaaatgaagtctaccaacaacgaacactacaaaaattgttagctaccaatccttcctttaaggaagtattgtcaaggattgagtcccatgaagactgtaggaacttacccatgatctcttttctcattctccccatgcagagggtgacccgccttcccctgctgatggatactatctgtcaaaaaacacctaaggactctccgaagtatgaagtctgcaaaagagccttgaaggaagttagcaagttggttcgactatgcaatgagggcgcccggaagatggaaaggactgagatgatgtacacaattaactcccagctggaatttaaaattaagccttttcctttagtctcctcttcccggtggttggtaaaaagaggtgaattgacagcctatgttgaagacactgtgcttttctcaagaaggacatccaaacagcaagtctacttctttctctttaacgatgtgctcattatcaccaagaagaagagtgaagaaagttacaacgtcaatgattattccttaagagatcagctattggtggaatcttgtgacaatgaagagcttaattcttctccagggaagaacagctccacaatgctctattcaagacagagctctgccagtcacctctttactctgacagtccttagtaaccacgcgaatgagaaagtggagatgctactaggagctgagacgcagagcgagcgagcccgctggataactgccctgggacacagcagcgggaagccgcctgcagaccgaacctcactgacccaggtggaaatcgttaggtcatttactgctaagcagccagatgaactctccctgcaggtggctgacgtcgtcctcatctatcaacgtgtcagcgatggctggtatgagggggaacgactacgagatggagaaagaggctggtttcctatggaatgtgccaaggagataacatgtcaagctacaattgataagaatgtggagagaatgggacgcttgctaggactggagaccaacgtgtagtctctcagatggtcttttgttactgcaagatttgcacgacacttaccgggctggttggttctgggctagttttattgttaattttgtcacagcctatttaattaaaagaacgaaaacacttgcctttaagcttgccaggttgttctgctctctcatgagaagagcttggatacagtgagtttgcacagctcagtttttacctaaccacacacttgcagacctcctgaggtacacagagtagctgagcagttcacttcagggatcaggtcatctctgctcctcctagtttcaccatgttctggcaataaaaaacacatattatatcctggttttctctatccttgcattactaaggtgactgtctctctttatacatccttgtatggttctcccagtattagcaagattgtatatctgtaaagaatgtccagttttgtaaatatttccctgcctttttttttctttttttacatctgattttaatgcttcgttaacttcaaaaggaactggtagagttcagaaggtgagctgttgtttttctaaacctcttcccaggaaggggacattgacacttgaatttttgtcacctttttcctcattagaaggaaagtagaaagccttactgtaggatttttaaaaaaaaatccatctcaccccatattggtcttaaataagtatagactaattaacctaagctacctttaacaacgtagaatttagatgggttcatatatgtgagaaaaacctgaatataggacaggggtcctacttttttccccacctctgtcgcccaggctagagtatagtggtgtgatcttggcccactgcaacctctgcttcctaggttcaagtgattctcctgcctcagcctcccaagtagctgggattgtaagagtatgccaccacgcccagctactttttgtatttttagtagagacagggtttcatcatgttggccaggatggtctcttaactcctgccctcaagtgatccaccagagaggagatcctcggcctccccaagtgctgggattataggcatgagccaccgtgcccagcctactttctaattaatt

SEQ ID NO: 17288 - protein, 408 aa, Homo sapiens
MFKNSKELSDTMTKTERHHLFSNITDVCEASKKFFIELEARHQNNIFIDDISDIVEKHTASTFDPYVKYCTNEVYQQRTLQKLLATNPSFKEVLSRIESHEDCRNLPMISFLILPMQRVTRLPLLMDTICQKTPKDSPKYEVCKRALKEVSKLVRLCNEGARKMERTEMMYTINSQLEFKIKPFPLVSSSRWLVKRGELTAYVEDTVLFSRRTSKQQVYFFLFNDVLIITKKKSEESYNVNDYSLRDQLLVESCDNEELNSSPGKNSSTMLYSRQSSASHLFTLTVLSNHANEKVEMLLGAETQSERARWITALGHSSGKPPADRTSLTQVEIVRSFTAKQPDELSLQVADVVLIYQRVSDGWYEGERLRDGERGWFPMECAKEITCQATIDKNVERMGRLLGLETNV

SEQ ID NO: 17289 - DNA, 2857 bp, Homo sapiens
aatgcggaaaaaaaaaaaaaaaaaaaggaaaatccttagcaggttctagcatgcaagagttcagtaaatggttatcgtcattattatctttggtatagtaaagattggcatgttaacatacactgaggatttagtaaatgtggtgtaagtatggtgcatgctctttgttttgtttggcgtaacagctttattgagctatacaacttacccatttaaactgtacagttcagtaggctttagtgtattcccagggttgtacatccatcacaatagtttcaggtagctctgcattgggcaatgctgttgggagcatcaggaagagcttcccaggaggtcacattaagtggatgttggcagacaggacttagaacagtggggaggagggtggtgtcccaggcagaagcaaaggcttggaactgggaagtacccttgacacagataaagcctggcctggaggggtgtggggcacctgcctccccaattcctcctcctagcctgtatcccaggacacagagttcgaaatattgataataatgaccatccactaagtacttgctgtggccagatcctgtctgaacttttttttttttttgagtcggagtcttgctctgttgcccaggctggagtacagtggcgtgatcttggctcactgcaacctccgccttctgggttcaagcgattctcatgcctcagcctcccgagtagctgggactacagacgcctgccaccacgcctggctaatttttatacatctttagtagagacaatgtttcaccacgtcggctaggctggtctcgaactcctgacctcaggtgatccacccgccttggcttcccaaagtactgggattacaggcgtgagccaccacaccggccactgtctgaactcttgatatgtttgaatcctcacaaccttttttattttcccttttttccagaaaggtacaacttgctggggtaaagcagagctgaaattcaaacccaagtgaccctgacccccaagtccaatcctgagtttcggctgttaccaacctggaggaccctgggcaggttccttccttctgaggcctcggtttccctagctatataccatgagggggttggactttaagatgcagccgatttcccaggacgctgtcgtctgtgagggtggctggctctaggcaacgggtgccctttcccagaacacaggcacatatgcacccataacccagatacgctcctccagctcctccaccggctgcttcccccttggtctcaagctggcagctgagtgtatgtgagtcatgggctggctcagaactgggtcccgcagtgggcacaggcccagaccttgagtcctcagggacactgtgttgctgagcagggcagctctggagtggccgtggaggggagggagtgatggtttctagtggagaccagggaaggcttcttggaggaggcattttgagctggtccttgaagggctgttgtggttgaggcattctaggttgcagggatagttgagcaatggcggagaggctggaaagtcagaggcttcattcattcactcactcagtcattcaacaaatgcttatcgcaaaactgtgagggcaccagggagccagcagcgaacacaggaccgttcatctttcatggggaaacataacagcactcagataagcacagcagtcaatcctggagagaaggtcgtggagggctgaggagggctaggggctcagcatagaggcctgatccagtctggggcattgggtgggctcccggtggtgacatccatactgagacttgaaggatgagtgggactcatccaggaggagagaagggaaggaagatgggaggaccctgcaccttccaggcagagacagcagcatgttcaaagggcctgaggtaggtaaaggcaggtgtgagagaggaaaggaagaggcagggaggcagggctagctaggaggcaggggctggagactccgctgggtgttttatcctgagggagccacagaagggctggcgaacagggcccatctggggacagaggccttgaatgcccaactcaggaatgtgggctctggccactaagcagctgctgcaggaagtgcagagacttggcatctggcaggacttcccatgtaggacactggctcgccaccctatgaccaccctaaccctagaaaaaaggatgcagtactaaagtgtcattcattcaaagccactcctcttttggtattccacccattttccagacggtgacactgaggctcaggaagcagtagggacttgcacaaagccctttgggaagcaggctgggaaacagtggagggagggtgtccattagccccaaggagacacaggatctgggctctgtctttcgccttcctcccagaatacgctgccatcaactccatgctggaccagatcaactcctgtctggaccacctggaggagaagaatgaccacctccacgcccgcctccaggagctgctggagtccaaccggcagacacgcctggagttccagcagcagctcggggaggcccccagtgatgccagcccctaggctccaagagcccccaaccgggacccaaccctgcctccctgggctaggctctggcctgggcactcaccccctggcttagacaccttctcaagggctggccttcagggacccctggtgggtctgcctgcctgggccacccttcctgcctgggcctccccttggcctacctgggccagcccccaccacctggcatgccctcctggggccaagagtgggcctgcaacccacccacttgcctgcccacccaactcctgggcgctccccactctgcccaggccttgagtgtccacattaaatgggtctcccac

SEQ ID NO: 17290 - DNA, 2812 bp, Homo sapiens
  CDS (605)..(1714)
gtcaccgtggtcggcggcggcggcggcggcggcacagagccggtggtggagccgccgaggccacctcgtgtatgcagagaccatgtgtgtctgatctgctgggatcctagagctggaacaggagggtcacgcagcacaatgccagctctgcccctggaccaactccagatcacccacaaggacccgaagacaggaaagctgaggacttcaccagcgctgatttgtacctgtaactccatgatacaaatttgatttaaatgggagggggtcctgcagacccacatgagaggtggccttgaagaatccttgtggtacccacaggctctacagtttggaaactcgccaccccgagcagaaggcagaccggtattttgtgttatacaaaccgccccctaaagacaacattcccgccctagtggaggagtacctggaacgcgccaccttcgtagccaatgacctcgactggctcctggccttgcctcacgataaattctggtgccaggtgatctttgacgagactctacagaagtgcctggactcctacctgcgctatgtcccccgcaaattcgacgagggggtggcctcagcccctgaggttgttgacatgcagaagcgcctccatcgaagtgtttttctcaccttcctccgcatgtccactcacaaggaatccaaagatcacttcatttccccttctgcgtttggagaaatcctctacaataacttcctctttgacattccaaagatcctggacctctgcgtgctctttggaaaaggcaactcaccactgctccagaagatgataggaaacatctttacacagcagccaagttactacagtgacctggatgaaaccctgcctaccatccttcaggtcttcagcaatatcctccagcactgtggtttgcaaggggacggggccaataccacaccccagaagcttgaggagaggggccgattgacccccagtgacatgcctctcctggaattaaaggacattgttctctacctttgtgatacctgcaccacactttgggcctttctggatatcttccctttggcttgccagaccttccagaagcacgacttttgttacagactagcttccttctacgaagcagcaattcccgaaatggagtctgcaattaagaagaggaggcttgaagatagcaagcttcttggtgacctgtggcagaggctctcccattccaggaagaagctaatggagattttccacatcatcctgaaccagatctgcctccttcccatcctagaaagcagctgtgacaacattcagggcttcatcgaagagttccttcagatcttcagctccttgctgcaggagaagaggttcctccgggactatgatgcactcttccccgtggccgaagacatcagcttgctgcagcaggcctcatcagtcttggacgagacgcggactgcctacatcctccaggcagtcgagagtgcatgggaaggggtggacagacggaaagccacagatgctaaagacccatcggtgattgaggagcctaatggggagcctaacggggtcacggtgacagcagaggcagtcagtcaagcatcatcacatccggagaactcggaggaagaggagtgcatgggagcagccgcggctgtgggccctgccatgtgtggggtggaactggactctctcatctcccaagtgaaggacctgctgccagaccttgagaaatgaaaccagaccctacacccctgctgacgtctcgccacaacgtcttccagaatgacgagtttgatgtgttcagcagggactcagtagacctgagccgggtgcacaagggcaagagcaccaggaaggaggaaaacacgcggagtttgctgaacgacaagcgtgcagtggcggcacagcggcagcgctacgagcagtacagcgtggtggtggaggaggtgccactgcagccaggcgagagcctgccctaccacagtgtctactacgaggatgagtacgatgacacatacgatggcaaccaggtgggcgccaatgatgcagactctgatgacgagctcatcagccgcaggccattcaccatccctcaggtgctgagaaccaaagtgcctagagaagggcaggaggaggatgacgacgatgaggaagacgatgctgacgaggaggctcccaagcccgaccattttgttcaggaccctgcagtgctgagagagaaggcagaagccaggcgcatggcctttctcgccaagaaagggtaccggcatgacagctcaacagcagtggccggcagcccccgaggccatgggcagagccgcgagacaacccaggaacgcaggaagaaggaagccaacaaggcgacaagagccaaccacaaccggagaaccatggccgaccgcaagaggagcaaaggcatgatcccatcctgagacctggtgcagggccagtggggaggcagcggcaccagactcaccaggccgcgctcccatcgcctggggcctcctcactaggggccccaagttcaactcaacccctcaacagcctcagctttgcagcccctgagaaggccgcctctcatctaccagccagccatgagcgccttcctgcagaacacacagtgccttatgccacagccgaagaatccgtggggccggcaagcaggcaccttcccccagctgcgctagcgggaaagagatggggatggagtcccaaggcaagcgccccaaacctcgggccacaagacaccacttcccctttaccctggacagcaggaaacctgtatattcaaaaacacaaaaagtcctgctaataaaatttttgaccctt

SEQ ID NO: 17291 - protein, 370 aa, Homo sapiens
MQKRLHRSVFLTFLRMSTHKESKDHFISPSAFGEILYNNFLFDIPKILDLCVLFGKGNSPLLQKMIGNIFTQQPSYYSDLDETLPTILQVFSNILQHCGLQGDGANTTPQKLEERGRLTPSDMPLLELKDIVLYLCDTCTTLWAFLDIFPLACQTFQKHDFCYRLASFYEAAIPEMESAIKKRRLEDSKLLGDLWQRLSHSRKKLMEIFHIILNQICLLPILESSCDNIQGFIEEFLQIFSSLLQEKRFLRDYDALFPVAEDISLLQQASSVLDETRTAYILQAVESAWEGVDRRKATDAKDPSVIEEPNGEPNGVTVTAEAVSQASSHPENSEEEECMGAAAAVGPAMCGVELDSLISQVKDLLPDLEK

SEQ ID NO: 17292 - DNA, 2048 bp, Homo sapiens
  CDS (259)..(1071)
acctcccggaggctctgctggtgcaggccccgcattggagggctcgattggctgcccggctggcactgacgtccccttggagctgggtggcagaggagataaacagccatgtgcaactctctacactatatttaacagctgcggcggagaaggcagggaggcagccacggtggcggctctgggggcagctcttgtcttcggggagaaggcccttggagccgggctggcatcggccttctcgcggtgagcgaggtcaccatgccagcttcccagagccgggcccgtgcccgggaccgcaacaacgtcctcaaccgggctgagttcctgtccctgaaccagccccccaaggggggcccggagccccgcagctcgggcagaaaggcctcgggcccatcagcacagcccccacctgctggtgacggggccagagagcgacgccagtcacagcagctgccagaggaggactgcatgcagctgaacccctccttcaagggcatcgccttcaactccctgctggccatcgatatctgtatgtccaagcggctgggggtgtgcgctggccgggcggcgtcctgggccagtgcccgctccatggtcaagctcatcggcatcacgggccacggcatcccctggatcggaggcaccatcctctgcctggtgaagagcagcacactggccggccaggaggtgctcatgaatctgctcctggccctgctcctggacatcatgacggtggccggcgtgcagaagctcatcaagcggcgcggcccgtacgagacgagccccagcctcctggactacctcaccatggacatctacgccttcccggccgggcacgccagccgcgccgccatggtgtccaagtacttcctcagccacctggtgctggcggtgcccctgcgtgtgctgctggtgctctgggccctctgcgtgggcctgtcccgcgtgatgatcggccgccaccacgtcacggacgtcctctccggctttgtcatcggctacctccagttccgtctggtggagctggtctggatgccctccagcacctgccagatgctcatctctgcctggtgaagcgcccgccggcccacacaagcctctgggggcagggctggccctagagaaggggcagggggtggcgaggtggcgggcgtgggtggaacagagcggccaggagtcagagcggccacccccacctcatcttcccctcctggctggaggctggcgaacccaggccacccctcccggagacaagcgtgtttggcagtgccaggcctcttgcccctttgcttggactccaagtctcctctctaggcagccaggacccacccatggggacagccctatttagcttctgctctgggaacagcaaaaatcaggatggtgggaggggccgagtcttgtcttgtcctttcatcatcatgactgttgagttcttggctgtgcccatcacgccacagcacgacgcctgccaaaatgcccccaacctactgcctgatgcaggtgccattgccattagcggtcatcgacagcttagggcagcactttccaacgggtgcccatgggacaccagcctgcgagatgcttttgggggaaaggggttttgtggttcaataactttcggaagtgctgcacactctgtccccaagttggacattcacaaaggccgttattgccgtaaaggctctgacaagccctatagaaaagcttcttgctaaaccttctttaacccatgttttctaaacttatttgaccacagaacccttttcttggggaacagctattaacccccaaggaattattggttcctcaagtgcgttttgggagctgctgccagagagctaaagggcctggggtgtgagctgactctcctctggggaggccgggtgcacacgccacagcccgaggaaagtgctggccaccgcccgtgggcatcgatgaggctttggcccccaggggccggactccgtgtgacctaataggtcgtttccaagtcacccgttttggatgtgcatttcatgtgacaatacagatgacatgcaaatggc

SEQ ID NO: 17293 - protein, 271 aa, Homo sapiens [sequence omitted]

SEQ ID NO: 17294 - DNA, 2382 bp, Homo sapiens
  CDS (984)..(1694)
tgtacaaagagaaatacatcattatttaaaagcatcatcttttttttttatattgtaagataaataccattctgatgtatttctcttggaaagggatgctggtatcctgggaggtttatgatttttgatgtttttactcaggtgattggcttgtatagctgaaatgctgatgaaaaggagttttcccttctccctttttcttttcttttccttttttttttttttttgagatggagtctcgcactgttgcaggggctggtgtgcagtggcacagtctcggctcactgcaacctccgcctctcgggttcaagtgatgctcctgcctcagcctcctgaatagctaggattacaggtgcccaccaccacgcccagctaattttttgtatttttagtagagatggggtttcactatgttgggcagtctggtcttgaactcctgacctggtgatcctcctgcctcagcctcccaaagtgctgggattataggcgtgagccactgcgcccagcctgtccctttttcttaaatgacctttttggtgaggaccattataggtttgtaccaggataaggttgtagagttaatcataatattctcttatataaattctaaaaattgatgttctaagaagagaggtagaatttgaatgactgggttacttcctagactcttcctccttctcttaagtacagtatagttctttctctgaaaatcttcagtctcttagttccagatgggttctctatggtaagaatacaggacatgtagaaggccctaggggaatgctttcttccccagatctttgccctgtagtaggtttcagctgagcaaggacgagtagtttttctggtgtttggcctcctctgttgggtggaaaaagactttcttctctattttcctagttatatatgctatcatatgtctgtttttctcctcttgaagtttccctgaaacctgggctcttgaagacgcatcactggagcagatggataatggagactggggctatatgatgactgacccagtcacattaaatgtaggtggacacttgtatacaacgtctctcaccacattgacgcgttacccggattccatgcttggagctatgtttgggggggacttccccacagctcgagaccctcaaggcaattactttattgatcgagatggacctcttttccgatatgtcctcaacttcttaagaacttcagaattgaccttaccgttggattttaaggaatttgatctgcttcggaaagaagcagatttttaccagattgagcccttgattcagtgtctcaatgatcctaagcctttgtatcccatggatacttttgaagaagttgtggagctgtctagtactcggaagctttctaagtactccaacccagtggctgtcatcataacgcaactaaccatcaccactaaggtccattccttactagaaggcatctcaaattattttaccaagtggaataagcacatgatggacaccagagactgccaggtttcctttacttttggaccctgtgattatcaccaggaagtttctcttagggtccacctgatggaatacattacaaaacaaggtttcacgatccgcaacacccgggtgcatcacatgagtgagcgggccaatgaaaacacagtggagcacaactggactttctgtaggctagcccggaagacagacgactgatctccgaccctgccacaggttcctggaaagactctccaggaaatggaagatactgatttttttttttaaatcacagtgtgagatattttttttcttttaaatagttgtatttatttgaaggcagtgaggaccagaaggaagttttgtgctttggcagactcctccatgttttgttcccttccccctgagtatgcatgtgcctgttcagagtctccagataccttttttataaaaagaagtctgaaaatcattatggtatataatctacccttaacagagcttttcttattacagtgctaaaatgatttctgataaaatggtccctaactcaactagaaggctaaaaatacaagaatgaaagaataagcagagtactcatgatgcctttgagaaaaatcaaaacatcatgtagggtgacctagtttccaaaccaataaataagtagtattgtaatattaaaggaaaactgttccaatcatttaaaagtacttattaagtactgctttttacagttatgacaactgtttctttctatgcatataaatcaaggaaccaaatatctgtagccatggaaatgtctgactagaaatatttatattgaattctgaatacaaaatgtccctgtggtagaaaacttactctttatgcctggtgcagtataattcccaagtgtactgtctaccag

SEQ ID NO: 17295 - protein, 237 aa, Homo sapiens
MDNGDWGYMMTDPVTLNVGGHLYTTSLTTLTRYPDSMLGAMFGGDFPTARDPQGNYFIDRDGPLFRYVLNFLRTSELTLPLDFKEFDLLRKEADFYQIEPLIQCLNDPKPLYPMDTFEEVVELSSTRKLSKYSNPVAVIITQLTITTKVHSLLEGISNYFTKWNKHMMDTRDCQVSFTFGPCDYHQEVSLRVHLMEYITKQGFTIRNTRVHHMSERANENTVEHNWTFCRLARKTDD

SEQ ID NO: 17296 - DNA, 2976 bp, Homo sapiens
gacgattaacagaacaatagccaagaccacagacatctcaactggttcaaaattgaagttgagcaagctttccactcgatgggtgccaaaaccgttgtgcccagatcagctgcagacaagagcagagctttcaatggaaattttaaacaagtggcatcaagaccctgaagcatttccttgaattataacaggagatggaacaggactttaccagtaccatcctgaagacaaaccacaatcaaagcaatggctaccaagaggtagaagtggcctagtcaaggcaaatgtggacaagtcaaagtaaggtcatggcaacagtttcttgggatgctcaatgcattttgcttgttgactttctggagggccaaagaacatttttttttttttttgagatggagtctcgctctgtcgcccaggctggagtgcagtggcacaatctcagctagctgcaagctctgcctcccaggttcacgccattctcctgcctcagccttccgagtagctggagtagctgggactagaggtgcctgccaccacgcccagctaattttttgtatttttagtggagacgggacggggtttcaccatgttagccaggatggtctcgatttcctgacctcgtgatctgcccacctcagcctcccaaagtgctgggattacaggcgtgagccaccgcatctggccacaataacatcttattatgagagtgttttgagaaagttagccgaagctttagcaaaaacacacccaggaaagcctcaccagtgtctttctccacgatgacaatgctcctggctcattcttctcatcaaataagggcaattcttcaagagttttgttgggaaatcattaggcatccaccttacagtcccgattttgctccttctgactttgtttcctcattttaaaaaatctttaaaagcactcattttttcttccgttaataatgttaaaaaggctgcactgacatggttaaattcccagagcccgcaattctttagaggtggactaaatggctggtgtcacagcttacaaaagtatcttgaccttgatggagcttacattgagaaataaaaatgttgttttgttgttgtcattgttggtggttttaagagagaggatcttgctctgttgtccaggctagagtgcagtggtgtgatcacagctcactgcaacctcaaactcctgggctcaagtaatcctcctccctctgcctcccaagtagctgggactacaggcatgcactaccaaacctggctaatttcttgaactcctggcctcaagcagtcctcccacctcagcctcccaaagtactgggattacaaacataagccactgtgcccagccaagaaatgaagtttttatttttttatcatcttttacttcagtatttccacaaattttttaaagtcccttcgtataatgactggtaatttcattcactgaagagacagttctgaggctcatacaaagagctttttattatctgagacagacctgagaaattaaggaacctgcctaaaacatcatttccaggcagggaaacaaacagctcgcagctggggttctgaacggagaggcaaggtgggaatggctaagaatcaacatattttctagttgcacccacagtcccctcattcaagtagtgagagtcgtgtgactgtcagcactgggcctcttgtccatcttcctgcaggactgtcagcaactggagggcacagacggtttgaccattgagtgccggtttcaacaaatgtccaccaacgaaatgaagggaatgtatgagataaaatgactctcctagtgtcattcaggaagggccatattttctgttgagtaaagcaagccctcatttttttctgcaatccccttttatacactgactgttactcagaacacttcaactaaaaatacagcagcatgaagctgaaagcttaaaaaaacaaacaaaaaaaaccccataaaggcaggctagctcaagggccagcaaacttgctattctggaaagggccaaacagtgagtattttcagccctgtttgtccctttcagtgggcctgtggtctctgtcacaactattcaattctcccgtcgcagcctgaaagtagccaagacaccatgttaaaaaaacagctgtgactgtattccaagaaaatttcacttagaaaaatgggcagagtgccggactgggtctgtggttgcagcttgccaatcgtggactagactatatgctctgtgagactagagactgtgtccacggaaatctctgttgcattccaggaactagcccaggccctggaaaagggagggcacttcatctcagttgaatgaatgagtggatacaattctgctacagttagttgtgctggcttgttttggagagaaaatccatgaagctcaatatcccaaaattctaaggatattaccattccaaatacaatcttaagaaacacaggactgcaagccggtcgtgagcacagctaagcaagaactgtggctccctcctatcctgtgcgcaaccctttctacaccaggatgacactggccagggctgctggcgagggagagatgggtgggccatggaccccacctcctctgcagcctcacgggcactgtccctgaccagcactcctgggcactctggaagcaggctgttctcacgggaacaagcgcacagctaccgggtaagaggacaccaggaagagcgtgcacagaggctgcggccaaggcaacccctcagggctgcccaccggctcctgcattctggcaccacttgaacacgagacctggaaagtcatcaccatggccatgatcagaactgttgttgtaagaattacatctccacttccctggagccctgtctgtggttaaggtgaaatttcaaatgctgcccaagtatgggctctagataatggaccacaaagaatatgcctgttttcttatcctaaaaataaaaagccagtgtctgccagcactag

SEQ ID NO: 17297 - DNA, 3050 bp, Homo sapiens
  CDS (378)..(2090)
agagagctaccagctgccctgttggcttcgctggtcggatcgtcctcctggccccgccaaacaggcggggggagcggccccgactgtggggccatggcagtagtctcctcgttctccgccgccgctagcctagctgagtcgccggcttctgcgctaggggctcccaccgcctccgcaggctaaggagccgctgccaccaacgagctgtgagggttactatgctccctctttgccgccgtctcctcctcttgcccgcgcaggcacccctctggctgctcagtcctgcctcagtgtcaaaccagaagagaagtaaaattcaacaaaaatttatgtgtggagttccttcttaaaagaagaaaaaagtgattatttagactatggatcggagcaaacggaattcaattgcaggatttcctccacgtgtggagcgtcttgaagagtttgaaggaggtggtggaggagaaggaaatgtgagccaggtgggaagagtttggccatcttcgtatcgagctcttataagtgccttttccagactgacgcgtttggatgatttcacctgtgaaaaaatagggtctggcttcttttctgaagtgttcaaggtacgacaccgagcttctggtcaggtgatggctcttaagatgaacacattgagcagtaaccgggcaaacatgctgaaagaagtacagctcatgaatagactctcccatcccaacatccttaggttcatgggtgtatgtgttcatcaaggacaattgcatgcacttacagagtatatcaactccgggaacctggaacagttgctagacagtaacctgcatttgccttggactgtgagggtaaaactggcctatgacatagcagtgggcctcagctaccttcacttcaaaggcatttttcatcgggacctcacatctaagaactgcctgataaagagggatgagaatggttactctgcagtggtagctgactttggcctggctgagaagatccccgatgtcagcatggggagtgagaagctggccgtggtgggttccccattctggatggcacctgaggttctccgagatgagccctataatgaaaaggcagatgtgttctcttatggtatcatcctctgcgagatcatcgcccgcatccaggccgatccggactatcttccccgcacagagaatttcgggctggactatgatgctttccagcacatggtgggagactgtcccccagattttctgcaacttactttcaactgctgtaacatggatcccaaactgcgcccatcttttgtggagattgggaagaccctggaggaaattctgagccgcctacaggaagaagagcaggagagggataggaagctgcagcccacagccaggggactcttggagaaagcacctggggtgaagcgactaagctcactggatgacaagatcccccacaagtcaccatgcccaagacgtaccatctggctgtctcgaagccagtcagatatcttttcccgtaagcccccacgtacagtgagtgtcttggacccatactaccggccacgagatggtgctgcccgcacccccaaagtcaacccttttagtgctcgccaggacctcatggggggcaagatcaagttttttgacctgcccagcaagtctgtcatctctctggtatttgacctggatgcaccagggcccggaactatgcccctggctgactggcaggagcccctggccccacctattcgccggtggcgttccttgcctggttcgcctgagttcttgcatcaagaggcttgtccatttgtgggccgggaagaatcgctatctgatgggcccccaccacgcctaagtagtctcaagtacagagttaaagagatcccaccattccgggcatctgccctaccagctgctcaagcccatgaggctatggactgctccattctccaggaagaaaatggttttgggtccaggccccaggggaccagtccatgccctgcgggtgcttctgaggagatggaggtagaagaaaggccagcaggctcaactccagccaccttctccacctcaggcataggcctgcaaacccagggaaagcaggatgggtgagggggtttagtccctgcctcaccttggggatggaccttcagctgaaaccatatggccccctaggtgcacagccttgattcttccctggagcctacagagcaggcaggctaggccaagccaggctcaacttctgggctcccagtgcccattggctgtgtatgacgggaggcagcagtgagaggccttcctagttagggccaacagctgataccaagcctctgaaatccagcaaggaggtctgcctcccaccagaccctctccagtgtacttccccagataggaccagaggatgtctagttctaggctgagctggcaggcagctattaccccggttctttccccaccccaggtctgtctcttgccttttcttggggcatataagctactgagtggaacatggagctgatcaagaggccgtaacggtcatggctgtttcccagacctgaatattggggtgcttcttgccagtattctaagacatttgagtaattgctgtttgcacttactgcatggtcagaccacgtcactacatttctatgcaaggggacagcaaggcagcgtggtggtcatggctcttagctaacctattcaaagaccttttcctgttgattaatctattttcatatttataaaggagtcttaatgttctgccccataagactttcaaccttgtggttgggagtggggctggttttgtaggccctagggcctgcttctatgtatttatcaacatgtgatacattcaattggttaaatggtttatacagggactgatttgcttcccttcctgccatggctggagctttgggaacagtctgtccttacagagctgcaataagaaataaccaaagatgaagctggtcaaatattttcataacttgcttctgttgatttttttttttgtaaaactttcccaagacattttcagacttaaaaataaagtcagtgttacaggtg

SEQ ID NO: 17298 - protein, 571 aa, Homo sapiens
MDRSKRNSIAGFPPRVERLEEFEGGGGGEGNVSQVGRVWPSSYRALISAFSRLTRLDDFTCEKIGSGFFSEVFKVRHRASGQVMALKMNTLSSNRANMLKEVQLMNRLSHPNILRFMGVCVHQGQLHALTEYINSGNLEQLLDSNLHLPWTVRVKLAYDIAVGLSYLHFKGIFHRDLTSKNCLIKRDENGYSAVVADFGLAEKIPDVSMGSEKLAVVGSPFWMAPEVLRDEPYNEKADVFSYGIILCEIIARIQADPDYLPRTENFGLDYDAFQHMVGDCPPDFLQLTFNCCNMDPKLRPSFVEIGKTLEEILSRLQEEEQERDRKLQPTARGLLEKAPGVKRLSSLDDKIPHKSPCPRRTIWLSRSQSDIFSRKPPRTVSVLDPYYRPRDGAARTPKVNPFSARQDLMGGKIKFFDLPSKSVISLVFDLDAPGPGTMPLADWQEPLAPPIRRWRSLPGSPEFLHQEACPFVGREESLSDGPPPRLSSLKYRVKEIPPFRASALPAAQAHEAMDCSILQEENGFGSRPQGTSPCPAGASEEMEVEERPAGSTPATFSTSGIGLQTQGKQDG

SEQ ID NO: 17299 - DNA, 2786 bp, Homo sapiens
actgcaggctggggctccgctccccggcgggagcccgcgcgtggttcccagcgaagtccccgcgcggctgggcccagcgtgagtattctccgcccgctgtcctccccctggaggcggcagcgcccgtttatttgaggcttctaatgtgaggaaaaacacggaatgacaagtgtgggaaagagcaagcactaaattactgtcagaaaaataaacggagtagcacagtgctgctcggtgatttacgggggcaattagtcaccaccccacggcgctgctgaggacagcacggcagcagacaagtcaggcccgtgaggaagaagaggctttgcactgctctccagacaacttttcaaacaacaagagaggatatttgagcacattaggttttgtgtcttcattctgggtacctactcttcatattattctaccaacttaatacataaacatatttttagcacaatatgaacctgttctatgtgtgtttaaaagcctccagcagcaacttttttctctcccactgtccaaagttgggttttccccatcccttaaaaaacaaaacaaaaaaacctttcttcactccaaattgtccccctggtgtgtggttttggtctttctcattacttcttgcatcttgctacatgttctgcatttgctcagagccactgggtgctaaggaatttggtctgctgctcctctgggaaagtttggtaagctggtacaaggaggtgatgaacaaggctaaatgaaaatcatacataaacttcccaatatttgtgaacatgttctttaacataccatacatagtttctatgtatatgtaacatagcaaaacaaacttgctaaggtataattaattggtatgcatgccttcataaatattcaccatcagaagaaacctagaatgaaaggttgtgaaagaacccaggaatgagaaagactttattgactaaaggccatgtctatgtaggggcaacaatgaagctgtgggtgagcaaatgaagcttcatcaggagtttagtatccttatgtagcattacctaagaatgctaccatagtaaatttctgaagtactttacctgttacaaagaacgtttgtaatctccttttcttatttgatcttgccctggctttagtcaggaacacctgctcagttagaaatgtattcggtgggtatgtacgcagttggagaatgtgccccaacacacgccgcctttggcctgtatgttggagtcctagagaggcagacaatgttgatgagcttggtaccagcatggtgcgccattcatccggacacaatttctgataaagagggtcacaactgggagaaacctcagattctacttgcttctcttctccacgttattagactttttttcccctcttgaattttataagcacactccttttaaaacaattaattaataacgagcactgggatttgatgtagaattgcgtatttgtaactgcaatggcactggttttcaactaccctgtaacaaggaagcaattctaaccagcaaaagaggcagacgtgtttctgtgcaacatcacaggcgtgtgaaattgttcagatattgagatatcaggagtgatataaattggaaatttaaccaaaaatattttccatcagtgaacaaagccgattttaaagtgcctcttgcatttttcagatctttctctttctttttcccaaagtcacattgtagtttctgataaaggaacacactgggaaaactaagcacatatttaatcaatgaaatttaaggtgtaaaaattctgcatttctgacaaatttaatgttcacttttttcttgatttaaatagagcattctaaaaatattacccctataggggataaatttttatatgcatgttatttttctttacaaagtgtgggctagtaaagagtgaaaaagaccttggctattgtacttatttcttgaaagaaataatagcatcttaatgactggattcaaatctctgcttatcacacaacttccgtacagttcaaagagaggacttggattgaatgaaaacagagagctggggcttcctacattcccctgtgtttgtgttcatacagaatatttatgcaatattctgacttggccataatctgtaattcctgcctattattctcagttgcaactataaattctagattaatggttataattttggtaaggcatacatgaaaagttatatgttcctgcttgaaaggaggatcattaaatattcattattaccactcaaattagttgtcatgctctgtgtaatagttacccgttatcatttcactagtttggattcagcagtaagtgaacagcaatatatagctcatagcgccagaggactttttttgtcggggaacagggagagaaatgattttaaaacccatttgacatatttatgttgacaaattatttaaaggaattactgtgttgtaataaacatgtttgtatgttggaataggattgtggctaaatttgcttctagctgtttaattactcttattatgattgtgaaaaacagtgcttcttcaagtagttccaaggaaaaaaatagaaaatggaaaagttgagctatttcagtcttttgcaggtatctaaccttgccatgaaaaagcacttttcatttttgtaagtagatattgaaatcttgctttttcagcgaagctagattgtataatttattagttttctccacctggtaacacatccttaagaaaaaaattgccaaaggtaaagcatgagatggattttaaaataaatgttgtggatgaacac

SEQ ID NO: 17300 - DNA, 2860 bp, Homo sapiens
  CDS (56)..(2644)
ggagtccgcgagcgtcgtcggcaagcggccgcctttccacggtactccgagcactatgtcgtccccggcgtcgaccccgagccgccgcggcagccggcgtggaagggccacccccgcccagacgcctcggagtgaggatgccaggtcatctccctctcagagacgtagaggcgaggattccacctccacgggggagttgcagccgatgccaacctcgcctggagtggacctgcagagccctgctgcgcaggacgtgctgttttccagccctccccaaatgcattcttcagctatccctcttgactttgatgttagttcaccactgacatacggcactcccagctctcgggtagagggaaccccaagaagtggtgttaggggcacacctgtgagacagaggcctgacctgggctctgcacagaagggcctgcaagtggatctgcagtctgacggggcagcagcagaagatatagtggcaagtgagcagtctctaggccaaaaacttgtgatctggggaacagatgtaaatgtggcagcatgcaaagaaaactttcagagatttcttcagcgttttattgaccctctggctaaagaagaagaaaatgttggcatagatattactgaacctctatacatgcaacgacttggggagattaatgttattggtgagccatttttaaatgtgaactgtgaacacatcaaatcatttgacaaaaatttgtacagacaactcatctcttacccacaggaagttattccaacttttgacatggctgtcaatgaaatcttctttgaccgttaccctgactcaatcttagaacatcagattcaagtaagaccattcaacgcattgaagactaagaatatgagaaacctgaatccagaagacattgaccagctcatcaccatcagcggcatggtgatcaggacatcccagctgattcccgagatgcaggaggccttcttccagtgccaagtgtgtgcccacacgacccgggtggagatggaccgcggccgcattgcagagcccagtgtgtgcgggcgctgccacaccacccacagcatggcactcatccacaaccgctccctcttctctgacaagcagatgatcaagcttcaggagtctccggaagacatgcctgcagggcagacaccacacacagttatcctgtttgctcacaatgatctcgttgacaaggtccagcctggggacagagtgaatgttacaggcatctatcgagctgtgcctattcgagtcaatccaagagtgagtaatgtgaagtctgtctacaaaacccacattgatgtcattcattatcggaaaacggatgcaaaacgtctgcatggccttgatgaagaagcagaacagaaacttttttcagagaaacgtgtggaattgcttaaggaactttccaggaaaccagacatttatgagaggcttgcttcagccttggctccaagcatttatgaacatgaagatataaagaagggaattttgcttcagctctttggcgggacaaggaaggattttagtcacactggaaggggcaaatttcgggctgagatcaacatcttgctgtgtggcgaccctggtaccagcaagtcccagctgctgcagtacgtgtacaacctcgtccccaggggccagtacacgtctgggaagggctccagtgcagttggcctcactgcgtacgtaatgaaagaccctgagacaaggcagctggtcctgcagacaggtgctcttgtcctgagtgacaacggcatctgctgtatcgatgagttcgacaggatgaatgaaagtacaagatcggtattgcatgaagtcatggaacagcagactctgtccattgcaaaggctgggatcatctgtcagctcaatgcgcgcacctctgtcctggcagcagcaaatcccattgagtctcagtggaatcctaaaaaaacaaccattgaaaacatccagctgcctcatactttattatcaaggtttgatttgatcttcctcatgctggaccctcaggacgaagcctatgacaggcgtctggctcaccacctggtcgcactgtactaccagagcgaggagcaggcagaggaggagctcctggacatggcggtgctaaaggactacattgcctacgcgcacagcaccatcatgccgcggctaagtgaggaagccagccaggctctcatcgaggcttatgtagacatgaggaagattggcagtagccggggaatggtttctgcataccctcgacagctagagtcattaatccgcttagcagaagcccatgctaaagtaagattgtctaacaaagttgaagccattgatgtggaagaggccaaacgcctccatcgggaagctctgaagcagtctgcaactgatccccggactggcatcgtggacatatctattcttactacggggatgagtgccacctctcgtaaacggaaagaagaattagctgaagcattgaaaaagcttattttatctaagggcaaaacaccagctctaaaataccagcaactttttgaagatattcggggacaatctgacatagcaattactaaagatatgtttgaagaagcactgcgtgccctggcagatgatgatttcctgacagtgactgggaagaccgtgcgcttgctctgaagccttgtgagcaaggaaggctccctgcatgtcctgcttgctgcacgccacatgggtgtggtctgcatctcagttggccgccatcagtgtaaatagagcttaaagtcatggtttggctgcataaaaattttctaacttgggttcaatatttgtagtgaagtatctgttttcatttttttcacgttataaataaaaatactatgctggccgggc

SEQ ID NO: 17301 - protein, 863 aa, Homo sapiens [sequence omitted]

SEQ ID NO: 17302 - DNA, 2388 bp, Homo sapiens
  CDS (203)..(1072)
attttattacagttggtatggaaatccacaatttgatggtaaatatatacattggaatcatccagtgttagagcattgggaccctagaatagccaagaattatccacaagggagacacaaccctccagatgacattggctccagcttttatcctgaattgggaagttacagttctcgggatccttctgtcatagaaactcacatgagacaaatgcgctcagcttcaattggtgtactagccctctcttggtacccacctgatgtaaatgatgaaaatggagaacctactgataacttggtacccactattttggataaagctcataaatataacctaaaggttacttttcacatagaaccatatagcaatcgagatgatcaaaacatgtacaaaaatgtcaagtatattatagacaaatatggaaatcatccggccttttacaggtacaagacgaagactggcaatgctcttcctatgttttatgtctatgattcctatattaccaagcctgaaaaatgggccaatctgttaaccacctcagggtctcggagtattcgcaattctccttatgatggactgtttattgcccttctggtagaagaaaaacataagtatgatattcttcaaagtggttttgatggaatttacacatattttgccacaaatggctttacttatggctcatcacatcagaattgggctagcctaaaattaatttgtgataaatacaacttaatatttatcccaagtgtgggcccaggatacatagataccagcatccgtccatggaacacgcaaaacactcggaaccgaatcaatgggaagtattatgaaattggtctgagtgccgcacttcagacacgccccagcttaatttctatcacctcttttaatgagtggcatgaaggaactcagattgaaaaagctgttcccaaaagaaccagtaatacagtgtacctagattaccgtcctcataaaccaggtctttacctagaactgactcgcaagtggtctgaaaaatacagtaaggaaagagcaacttatgcattagatcgccagctgcctgtttcttaatgcattgattaaagtttaatagttatcaaaatcacctaatttttaaaaatagctttcgttttgagttctggaaagaaaactgtcaaaatcagtatatactattagttatatttaaaaatatttttttaaattctttacagataatattatacttgttacccttcacaataccacatgagaaaatatctgagacaaaatgtatacaaatatattccttatggcataatttattgcatttctgactgaaatcaaaattctgatttgatggcaattgaattttcattttacaatagataaatgcttgtgttacctaaagcacttagcacacagttaaattatatttacatcctagacccaaataaataggattgtgtgtatatttgggatatctattgaagaaaaaaagaaaaccccttaaagataatgtacatgcttcatgtcatgtctttaaaataatttaatcaactttattgtcttagtatttagactctggataactctacaataatgaggaaattcttaagaataacaaaatcactgtaccttcctctcaattttgctgtgaacctgaaatggctttaaattaatactcttattttttatttaatttaattacataaattaaaccttaccatgaccaaattgtgttaggaaggcctgctatctacagcacagtgtgtcatttgcagatttgtggttacctataccacgctaggtgttttgacatgtttagtgtttctgctttacagtgctgaattccatattttagaagctatgaaagtccttttatgaaaaagttactgattgcttctcagttattaggaaaacagttgtttcacaattattatgtagatatgatgcccaaatatcatttttagtatatcttgtcgatctttaagttgttactattgtgttattcatgtctttaaatcagataccaaatattttttaggaaagaaaaatgttattactgtcattaggttgtcttttaatactttaagttattttgacgaaaagtaatagagaaaatttacttagcattttagattctagagacatggaaatgaaaattattttatgtctagagtaggtcctgaagtttggctttacattaagtttagcactgtatcagaatgaagaaactaatattttacataaaaactaatactttcaattttttatatagtaatatccccattttgtaaatgttagacttttatcatacctgtaagttaaaatacttgttatcaataacttgtcatattgtgacaaattgatcacttgtgtacgaaaaataaatctccttaaaaact

SEQ ID NO: 17303 - protein, 290 aa, Homo sapiens
MRQMRSASIGVLALSWYPPDVNDENGEPTDNLVPTILDKAHKYNLKVTFHIEPYSNRDDQNMYKNVKYIIDKYGNHPAFYRYKTKTGNALPMFYVYDSYITKPEKWANLLTTSGSRSIRNSPYDGLFIALLVEEKHKYDILQSGFDGIYTYFATNGFTYGSSHQNWASLKLICDKYNLIFIPSVGPGYIDTSIRPWNTQNTRNRINGKYYEIGLSAALQTRPSLISITSFNEWHEGTQIEKAVPKRTSNTVYLDYRPHKPGLYLELTRKWSEKYSKERATYALDRQLPVS

SEQ ID NO: 17304 - DNA, 2432 bp, Homo sapiens
tcgagtcggcaatatacagcttctgtatttatcaggcccagttctggtgatgatttcacttttgacagaagctgtccctcaaaagcaaacatgcaatagaagaaacagatctcaatggagtctcactctgtcacccaggatggagtacagtggcgtgatctcggctcactgcaagctccgcctcctgggttcatgccattctcctgccttagcctcccgagtagctgggactacaggcgcctgccaccacgcccggctaatttttgtatttttagtagagacagggtttcaccgcattagccaggatggtctcgatctcctgacctcgtgatccgcccgcctcagcctcccaaagtgctgggattacaggcgtgagtcactgtgcccagccaagtttagtattttttgtagagacagagtttcaccatgttggccaggctggtcttgcactcatggcctcaagtgatccacctgcctcggcctccgaaagtgccgggattacaggcgtaagccactgtgcctggccttaaatgggtaaatttcatatggtatatgaattatatttcactaaaactttaagaaaacattatacagtactgttcaaattttaagtggtccaatttaaatgcactattgtatacaattctatgtaatgtccttaccatggtatatgttaactataaatatctatgcccctacccttagtatcaaagcatatattatatgccagtgagccaagccccacatgtctgtgaaatgtggtcttctagccatagaagtagcttgtgctcctagggtattccttgaggctctgtatgaagaatgtccatttgtttgagtccctaacctacagaatattcctgaccatggaaatgtgatagataggagtaagcacatggaccaaaaggcctggaggctcatcatttaaggtacaagccaattatgtagtctttgaaagaatgctttgaaattcagcttgcttgattcaattcccaatattttcatctgtattaaaagatttggcccttacaggtttaaaacaatgtcagtgtaaccaagtgacattcaaattttggctcccaacatgtgatatgacatcacttcatgtgaaaatagcgaagctccaaacattttctttcagtcaccttattaagctcgctgagccctgacagcctaatgaaaggctaagggggaagaaaatgtcccaacttctacactgttgaagatgggctaatgagaggttagcttgcaagaatcattctttcttggcatcctgcttctgactgcttggctttcagcttatacccagcatgaaaatttaatttcctcgcagttgaaggtagtttaaagcttattactcacatgctaaaatgttgatgtatctgtttttgtgcttgttttctggatgattggaatgctctgcagtgatgttcatatcagcagtacagcgctggacttcctagtgaagaaaacagcaagattatagacacagtttagaaacaaaggaacaccatatacatttaaaggcataaagtatttactcactccctggccacagccaccgttaccttctcaatcccaacttcggatataattattgatatatttataacgagtttatgaagaatgtgaaaaaggtataaagatttcattatttactatttcatcaatcatctacttttttctagtttttgacctagtccctgagatgtaaaacaatatctctttttgaatacatcatagtctatgggtgagaaaaatattcaaaaagatagtcaaacatgatgaatacaaaagaggcctgagaaagctctgatgggagcacagaacagaggaaggctttagacaggtgaaaaaatttacctaagtcttaaaggaagaaagggaatttctaagaagtataatctctaccatgatttgcaatatgcttacaggccttatagcctcattttataattgtgagggtgcattgactctaaagactcagtgctgaaataaccctaataacagcccaactaatggtcatatctcatatatacagtcttgacaaattatttgtgaactctagtattttaaaagttatccttctttggaaaaatagcagtagcagaaataacactcttatcctaccttggccgtggatttaaacgtcatccattagcctaatacaacgttgctgaaaagccaaatttttctacactatatgcttcaaacccaagaaagtactggagctgactaataagggaagtcattagcagtacacagctgctacaaagagcctgaacaaagtaacacaaaattatcaggagaaatgttttacacagaacagatgtagcagagtttagaagcatgcagactttttttttccacaaaggagttgcctagtaattatgcatgttttccatagtatttacattaaacataatgaaaac

SEQ ID NO: 17305 - DNA, 2944 bp, Homo sapiens
  CDS (265)..(2031)
gtggctgctgcggatgtcggtgtgagcgagcggcgcctgaacacacggcggctgccgagcgcctgacccgggcctgcgccagagcctgcaccgagctccggggccccacacccgctacggtggccctgcgcccgttgctactgaggcggcgtgctctgcattcttcgctgtccaggcctgccggctctggtgtctgctggctcctccttgctcgcctgctccctcctgcttgcctgagtcaccgccgccgccgccgccacagccatggccgagagtggtgaaagcggcggtcctccgggctcccaggatagcgccgccggagccgaaggtgctggcgcccccgcggccgctgcctccgcggagcccaaaatcatgaaagtcaccgtgaagaccccgaaggaaaaggaggaattcgccgtgcccgagaatagctccgtccagcagtttaaggaagaaatctctaaacgttttaaatcacatactgaccaacttgtgttgatatttgctggaaaaattttgaaagatcaagataccttgagtcagcatggaattcatgatggacttactgttcaccttgtcattaaaacacaaaacaggcctcaggatcattcagctcagcaaacaaatacagctggaagcaatgttactacatcatcaactcctaatagtaactctacatctggttctgctactagcaacccttttggtttaggtggccttgggggacttgcaggtctgagtagcttgggtttgaatactaccaacttctctgaactacagagtcagatgcagcgacaacttttgtctaaccctgaaatgatggtccagatcatggaaaatccctttgttcagagcatgctctcaaatcctgacctgatgagacagttaattatggccaatccacaaatgcagcagttgatacagagaaatccagaaattagtcatatgttgaataatccagatataatgagacaaacgttggaacttgccaggaatccagcaatgatgcaggagatgatgaggaaccaggaccgagctttgagcaacctagaaagcatcccagggggatataatgctttaaggcgcatgtacacagatattcaggaaccaatgctgagtgctgcacaagagcagtttggtggtaatccatttgcttccttggtgagcaatacatcctctggtgaaggtagtcaaccttcccgtacagaaaatagagatccactacccaatccatgggctccacagacttcccagagttcatcagcttccagcggcactgccagcactgtgggtggcactactggtagtactgccagtggcacttctgggcagagtactactgcgccaaatttggtgcctggagtaggagctagtatgttcaacacaccaggaatgcagagcttgttgcaacaaataactgaaaacccacaactgatgcaaaacatgttgtctgccccctacatgagaagcatgatgcagtcactaagccagaatcctgaccttgctgcacagatgatgctgaataatcccctatttgctggaaatcctcagcttcaagaacaaatgagacaacagctcccaactttcctccaacaaatgcggaatcctgatacactatcagcaatgtcaaaccctagagcaatgcaggccttgttacagattcagcagggtttacagacattagcaacggaagccccgggccttatcccagggtttactcctggcttgggggcattaggaagcactggaggctcttcgggaactaatggatctaacgccacacctagtgaaaacacaagtcccacagcaggaaccactgaacctggacatcagcagtttattcagcagatgctgcaggctcttgctggagtaaatcctcagctacagaatccagaagtcagatttcagcaacaactggaacaactcagtgcaatgggatttttgaaccgtgaagcaaacttgcaagctctaatagcaacaggaggtgatatcaatgcagctattgaaaggttactgggctcccagccatcatagcagcatttctgtatcttgaaaaaatgtaatttatttttgataacggctcttaaactttaaaatacctgctttatttcattttgactcttggaattctgtgctgttataaacaaacccaatatgatgcattttaaggtggagtacagtaagatgtgtgggtttttctgtatttttcttttctggaacagtgggaattaaggctactgcatgcatcacttctgcatttattgtaattttttaaaaacatcaccttttatagttgggtgaccagattttgtcctgcatctgtccagtttatttgctttttaaacattagcctatggtagtaatttatgtagaataaaagcattaaaaagaagcaaatcatttgcactctataatttgtggtacagtattgcttattgtgactttggcatgcatttttgcaaacaatgctgtaagatttatactactgataattttgttttatttgtatacaatatagagtatgcacatttgggactgcatttctggaaacatactgcaataggctctctgagcaaaacacctgtaactaaaaaagtgaagataagaaaatactcttaaagctgagtatttcctaattgtatagaatcttacagcatctttgacaaacatctcccagcaaaagtgccggttagtcaggtttgttgaaaatacagtagaaaagctgattctggttatctctttaaggacaattaattgtacagacacataatgtaacattgtctcaacattcattcacagattgactgtaaattaccttaatctttgtgcagactgaaggaacactgtagtataccccaaagtgcatttgcctaggacttctcagcttctcccataggtagtttaacaggcattaaaatttgtaattgaaatgttgctttcactg

SEQ ID NO: 17306 - protein, 589 aa, Homo sapiens [sequence omitted]

SEQ ID NO: 17307 - DNA, 5737 bp, Homo sapiens
  CDS (2927)..(3694)
tctaaaaatgcttcctgaggtttcctaatttctaaatctggaagccacttctgaccagctacttttaagtatctcagactgctggggacaatagaaacttagccactctaacatggtagatggaggcgtgaactgtaataaccctaagatgggtatacagaatttttctcccctagtagcagtcacattgcaaaaagattatattgctattgaattttaaggtgtagattaaatgtctgtaatatgtgcataatcttccattcctgggatcttagtcttgacattttctttttaagcatagaacacccctcctttacaaagaaggtaatctgtggaaggaaagacatgctaatatgatggttttaattataattccctcagaacggaatatatccattaagtacatggcatatatatggctatagaaactgctacatgtatttaatttattgccttaatttttttttatctctctcaggatagaccatttagaaactatccagcaactcctaactgcagtagtaaagaagattccattaatcactgcaaaaagtaagacaattacactgaatgtaggggtgcatttttgaaagctgtgagcttaaggtattgagtcaactgaaatcacttgggattgtaaattaatattgatatggcggttaccttataaggtttcagctagagatacagcccatttgcaagggttttagaattcacatccagttagttttttattgttttcactgtgttgatctgtagaaggaatgttttacatttttcatatgtaaatcatagattgttttgtatgcagttaaaactctgtattagcatttggtgtttatgagtgaggaaagcatttagcgtttgcctgcagtgtaccaggtcctgtgcaggttgggtacgttcactgtctcatataatcccagcctcctgtgtgatagctggtgtcatctccacttacagatgaggaaactgaggataagcagggttgaataacttgctcgagatcacagagccacgggtggtgaaacaggatacaaacctggttctgtttgactctaagaccattcatctttcctctgaaactcagtattgcacagtgtagaaatgcagtttttaagacctcccaaagtgacgtgctgcgtcactgcccatcattagctagattgagtaaattgctgcttagccccagttgttttgacagaatcaatagcccttgctgaggggccagcagcctacggacacaggagcatgctcatgggcaagaccaccatgcacactcagaggggagccacaaggcaacctccacgccactcagatttgtagggctctgaacacatacaccaggtacagaccacctacttattttttccaactgtaatagcaaagcagtaatctctttctgtagggtaaagtttgggggatcattttgatgtctctcagagtaaacttttggtgacagtttcccagcctaacataagaaattcaaacaaaaaaatctctcttatatatgtgtgtgtgtgtgtgtgtgtgtatacatgtatatatatatacacgtgtatatacacacacacatatttttctctctccttaaaaatacagaatgtaagagctggaaggtagttcagaaaccatcttcccagctttctcagtttatagatgagaaaaccgagctgggcttggtggctcacgcctgtaatcccagcactttgggaggttgaggcaggcagatcacctgaggtcaggactttgagacctgcctggtcaacatggtgaaaccccatctctactaaaaatacaaaaattagccaggcatggtggtgcctgcctgtagtcccagctcctcgggaggctgaggcaggagaatcgcttgaacctgggaggcagaggttgcagtgagctgagatcacatcaccgcactccagcctgggtgacaaagtgagacaccatctaccacaaccaccttgtgagttaatggcgggtccagggctcctagtggagcaccagttccacagactttaatagtctatggcagtgattaccttctctaccaaagaagcaaagtgcccaggaaggtgtgttgctttgagtacacacggcaagacaccttctcttctgaggagacgccctcctgtgttaggctgcatctgagcttgcccagtaaggaacatacatgcgataaagaggtctgaagaagtgactggcttgcctccagcaaatgacgtgtggttggaatcgtaagagctttattcaggctttgctgggtgtgtgcattctaggtgaagatgccagctgcttttctgcaaagtctgtggagcagtactatggctggaacattggaaaaaggagagccgctgaggtaacccacatctgcctgtccactctggctgcctccagaaaccttgtcttatggaacagggataagattgcagcatatttggttgaaatatttgatggcagaatattttcctcagttaaaaaaaatctcattttttaaagacctgtatccagctgactttcaggcgtgccttcttttcctgcactggcagaaacatccctcacagtttctaaatttttttctgagtttcagagttttaaatgaactcgagtattgagtccttacagtgggaaggtgctgtggtgagtttagggaaagctggggtaggaggggagtgggagagcgcaggtggagaccaggtgaagatccttacagtgggaaggtgctgtggtgagtttagggaaagctggggtaggaggggagtgggagagcgcaggtggagaccaggtgaagatccttaaaggccaaacctaggagttgctgttttattgtattagcattagggaagttcgacttttttttttaatggggagtaacacaaccaggtttttttctttaaaaaaaaaaattctaacaggttaggttaggatggtgatttatggttgcatgatacgtagttgtgttaagtggaaggatttgattatggttccaaaagaaaattttttttttaagtggcaaagagcaatgacaatgcgaaaagtcttacaagaaatcctggagaagaatccgagatttcaccacctgactcccctcaaaaccaagcacatcgctcactggtgccgctgtcatggctacaccccaccggaccctgagagcctgaggaatgacggggactctatcgaggacgtgctgacccagatcgacagcgagcccgagtgcccatcatcattctcctctgctgacaacctctgccgcaaactggaggacctgcaacagttccagaaaagggaacccgagaatgaggaggaggtggacatcctcagcctctccgagccagtgaagataaacatcaagaaggagcaggaagagaaacaagaggaagtcaagttctacctgccaccaaccccagggtctgaatttattggggatgtcacacagaagattgggatcaccctgcagcccgtggcactccacaggaacgtgtatgcgtccgtggtggaggacatgatcctgaaggctacagaacagctggtgaatgatatcctgagacaggctttggcagttggataccagacagcttctcacaacaggattcccaaagaaattacagtgagtaatattcaccaggccatttgcaacattccttttctggacttcctcacaaacaaacacatgggaatattgaatgaggaccagtgagcggagtgaggtgccctggagaagcaggctttgaaggcacagcgaagctgtaactgaggaccctgctgctcgggaaggaggtggtttccagtgtgactcggcatgtcatggctacccaacctttgccgctgcctgttcccacgtgtcaccagcacgctgcactccagatgaaatcctcctaggacaggagtttgtttcctgagtgtggagtgaggctgtcagtggatccgtgctttgtcggccagcgtttctgcagtctttgtaaaggccccacgagagcgggccaggccgtgtgcctcaggcccttctccctgggtgtgcttaagggggctccttgggcccgcctccccaggaggtagaaaacgagtggcaggctagagatttcacccattttgtgggctggagttaccagtagctccagcagttaccctgaagagagattgggcttcagccttcagcaggtggttctctcccatgcctggccttggtgtggaggggctgtactctgagcccaagtgagtcagctataggaagaggccatacctagagccaagaaccatgaaggcctgagagacggcagactgagcagaattccttttttgagcacgagagcattactagaaccattgtcaaagcagtggcaagggacggagaggtcccaacaggagtcaggaagaggtttgattataaccaagaaaactcactatgctaggaatagactgtgtgcaccagtcccagacacttggcagaagtgtagcagcgttacacatgtgtgcgaagcagatcgcaggttccacgccatctgcatggcctgcaggagcttctgctgctgaccccatgctgagtggccagtggggagcggcgcccggcaggctcttctggggtcgtctgtcctatccgtggattgtatatactcttctctgttaaggagtttttcccaagaagaaaagtatttaaaagaaataccagtgagtgccttaaagttggagaagtaactgcccatgcccagaagtaaggatgccagtgcccagaagcagtgagattagtctgtgtccacaagcagaggccccctcgatgggagggagtggcaggcaggagaaggtggcgctgccaggtgcccgggtctattggaggcgccccatctcagacttcctaacacagcctgtgtggaaggcagaacaaagaatgcatgcccagtcagaaatctgttctattctgctccaggaaaatcggaaacctgtgagtcagagtcagagaaacttacccaagcaacgtaattcctgttttcatgggtcctgtagatgtttgagtcaggaaggtaaggcggggagtgactgaataaactctgccttttaaattgagcatctgggccgggcatggtggctcacgcctgtaatcccagcactctgggaggtcgaggtgggtgggtcacctgaggttgggagttcgagaccagcccgaccaacatggtgaaaccccgtctctactaaaaatacagaaaattagctgggcatggtggtgtgtgcctgtaattccagctactcgggaggctgaggcaggaagaatcacttgaacccaggaggcggaggttgcagtgtgccaagatcataccactgcactccagccctggtgacagaggagaccccgtctcaaaaattgattgatcaattcagcatctgagggctgcaagtacagaaggaatctattctcagcagggcatagggcacgcactggcttaacagtttagtatataaggctcaaatagtctatacctgaactgctataagcaaggtcgatagggaagtggatagattgcttcagcaaagtgaactgtgagatctccaggacagagggagaaagatctgatccaaatgagaacagattggttattgcaggtatcacagcctaaagaaattatctttttgcaaaaggaatattaaatgatttagcagtctccacgtgtgttaatgtttcaaacgtgtatcataatgtgtataattgtgtaacaaaattgtctacaataaatcttttggtatttgt

SEQ ID NO: 17308 - protein, 256 aa, Homo sapiens [sequence omitted]

SEQ ID NO: 17309 - DNA, 2440 bp, Homo sapiens
attaatatgtgctcatatcttactcaacatcagagagtctgtacttaataaaaccattatagatgcaactagtgtcaaaagatctttcagaaaataaaagcctttaaagtgaagaagataattcattctgaagacaaacattacaaatattaagagggttgtagtaccattacttgcatcacagatcttattgtacacattttgtactaaagaaaaccctgaagcagttgctcaaatactgttcaacatcagaaaatttatattggaaaaaacccctggaaaatgtaataaatttgtaaaaacagttttgaaaaactacagcttataaaacatgagggtctataatgcttggttgatagtacaaagtttattcaacatcagggaatttatattggagaaaaaccctacaaatgtaatcagtttggaaaaacatttttaaaaaaaccacagcatagaaaacaccacagggttcatactaaaatatgtttttgcagatgcagtaaaaatgaaaaaaatttaatccgaaattaagtttatgtaaatatctgagaattcacagtagaaatatctaaggcgcggacacttcagacattacactaaatcagtgctaagtacagaaaacaacacaaaataaaacttggtggataaattatttgtatataacattaaaagaagtagaagattttcagttataattacaattaaagtatacttttatcttgaaaaaattactgatttttaaattagtgaataatgatgtaattaaactctcaaataactttatgctcttttttcattcctgctatattcacatgtgaaagcatgtgaccaattgttgctgcaccaaagatatgagagattcttttattaggtgggcattatttaaaacattttttatggaacagtaaggatattaaagtgtaagatgcagccaggcatggtggctcatgcctataatcccagcactttgggaggctgaggccggtggatcacctgaggtcaggagtttgagaccagcctgaccaacatggtgaaaccctgtctttactaaaaatacaaaaatttaccaggcacctataatcccagctacttcaaaggctgaagcaggagaatcacttgaacctggaaagtggaggtctcagtgagccgaaatcataccattgcactccaacctgggcaacaaaagtcaaactccatctcaaaaagaaaaaaaaaaaaaaaagatgcgtgatgaaaatgtaactggagaggctctttgtggttaacttataaaggagtgatgcaggagataggttttcagagtaatattcttctgcattatagtgacaaaagttttttattttagttaaaattggttaaattagtaagtcattttacttattgtaattttatgtaattaaatgtacatttttaaatttttagattacatgtaaatataacttttaaaaaaatgtgttaagaccattgtacattcaatgaagcattattatgcttctaactttaacctatttcaccttactcaagagtgtatgtaaaagatggtaacaatatactatttggtaacataatggactaacatttctattaatctatttcaccagtggctttcaactgcaaataagttaaagaatatttttctataggttaaatattcttttttgtcttatttaaacttactgttcttaatttctgtgggtacatagtatgattttaattaccttattttattctttgtgctattcataattttttttgtttgtttggtttttttttttgagacagagtctcgctctcgcccaggctggagtgcagtggcgcgatcttggctcactgcaagctccgcctcccaggttcactccattctcctgcctcagcctcccaagtagctgggaccacaggcgcccactacttgtttgggtttttttttggagatggagtctcgctctgtcacccaggctggagtacagtggcatgatcttggctcactgcaacccccacctccccggttcaagtgattctcctgcctcagcctcccgaatagctgggattacaggcgtccaccatcacaccaggctaatttttgtatttttagtagagatggagtttcaccatgttggccaggatggtctcgatcttctgacctcatgatctgcctgcctcggcctcccagagttctgggaccacaggcatgagccactgcacctggccaaatgtgtatatatttatgcaatatataacatgttttgatacaggcatataatatgtattagtcacatcaggataaagtatctattaccttcagcatttatcctttgtattacaagccaattctacacttcattattttaatgtacaattaaattgttattgactacagggtcattttaattataaaaattatatagaagtataaataaagtccatacattcctgagtcatg

SEQ ID NO: 17310 - DNA, 2758 bp, Homo sapiens
  CDS (180)..(1595)
tagatgctgctaactgttcctcggctgatcgttttgtgacccttctgctgcctacaatccttgatcaacttcagttcacagaacaaaatctagatgaggctttaacaagaaaaaaatgtgaaaggattgccaaggccattgaagttttgttaactctctgtggagatgatacactaaaaatgcatattgcaaaaatcttgacaactgtcaagtgtaccactcttatagaacaacaatttacatatggcaagattgacctgggatttggaacaaaggttgcagattctgaattatgcaaacttgctgctgatgtaattttgaaaactcttgatttgattaacaaacttaaaccattggttcctggtatggaagtaagcttctacaaaatacttcaggacccacgtttgattactcctttggcttttgctttaacgtcagataatagagaacaagtacagtctggactgagaatattattggaggctgctccactgccagattttcctgctttagtacttggagaaagtatagcagcaaacaatgcctatagacaacaggaaacagaacatatacccagaaaaatgccctggcaatcatcaaatcacagttttccaacatcaataaagtgtttaactcctcatttgaaagatggtgttcctggattgaatattgaagaattaatagagaaacttcagtctggaatggtggtaaaggatcagatttgtgatgtgagaatatctgacataatggatgtatatgaaatgaaactatccacattagcttccaaagaaagcaggctacaagatcttttggaaacaaaagctctagcccttgcacaggctgatagactgattgctcagcatcgctgtcaaagaactcaagctgaaacagaggcacggacacttgctagtatgttgagagaagttgagagaaaaaatgaagagcttagtgtgttgctgaaggcgcagcaagttgaatcagaaagagcgcagagtgatattgagcatctctttcaacataataggaagttagagtctgtggctgaagaacatgaaatactgacaaaatcctacatggaacttcttcagagaaatgaaagtactgaaaagaagaataaagatttacagatcacatgtgattctctgaataaacaaattgagacagtgaaaaagttgaatgagtcactcaaggaacaaaatgaaaaaagtattgcccaattaatagagaaagaagaacagagaaaagaagtacagaatcagctagtagacagagaacataagctagcaaatttgcatcaaaaaacaaaagtacaagaagaaaagattaaaaccttacaaaaggaaagggaagataaggaagaaaccattgatatccttagaaaagaattaagcagaacagaacagataagaaaagagttgagcattaaggcttcctccctagaggttcaaaaggcacaattagaaggtcgtttggaagagaaagagtccttggtgaaacttcagcaagaggaattgaacaaacactcccacatgatagcaatgatccacagtttaagtggtggaaaaataaatccagaaactgtgaatctcagtatatagacattatggcattttggaatttgtaatctcatgatatttttgatgtatttatctattggagggggggtgggtaggggagttaatttgtgacttcgtaacaataagaagttattatctaatttagtaaagaccctgatctgttgcatgttttttatttgatagtttgaatagaaatttaattttctaagttttactttttgtttctggcttttatggcttaaggttttctttggttcttacattagaaaatcatttttaacctccattatcatttttctaaggttctttcctttttcttagttgctttctattctgttttgcctgtcttatttattctcatttgtgattatttagatcttaagaccaaactttcttggtataacagtcctaaagattacaaaataaaaatatagagagagtaaaagtaaaaagtaaagtaaaaagagagaaggtatgattttactgctagagaagtttgtctctgaagaagcacaaaagaaaatattagtgaatttaaaataatttttatactgctgtagcataatttctaaatttgaaaaaaatgcaatggtaataaaatgtataaaaattagaaaactgtcattgtgttaaactattacatttaaatgattacatttaacacaatagctgtctcataaaaaatctaagaacttgtagaattatttgtaaggtatatttagtgtttttttcccttttttcaaatgttgcatagtggtccagatcatctataattaattataagtttcttatgatttacataaggataatttggattctactcttgctgcatattcagaaaaatattatttactgttaattctgatatgaattgtatttaatttgttgtcctaatagtttttaattggttcatttaattttaaagcataggttaaatatctttattttttttaaaatacaagggtccttctgtacttttcatttgaatcatatcctctaactactctgtaagaaacgtttttacatcaatattttgattgattttattgctataccaatacagtcattaattttacttggtgttttcttcaccatatgtctgtttgatttaagtgaatttagatttgtacagttctggaaattttttaaaaaatattatgcagagtaaaacattttaaatt

SEQ ID NO: 17311 - protein, 472 aa, Homo sapiens
MHIAKILTTVKCTTLIEQQFTYGKIDLGFGTKVADSELCKLAADVILKTLDLINKLKPLVPGMEVSFYKILQDPRLITPLAFALTSDNREQVQSGLRILLEAAPLPDFPALVLGESIAANNAYRQQETEHIPRKMPWQSSNHSFPTSIKCLTPHLKDGVPGLNIEELIEKLQSGMVVKDQICDVRISDIMDVYEMKLSTLASKESRLQDLLETKALALAQADRLIAQHRCQRTQAETEARTLASMLREVERKNEELSVLLKAQQVESERAQSDIEHLFQHNRKLESVAEEHEILTKSYMELLQRNESTEKKNKDLQITCDSLNKQIETVKKLNESLKEQNEKSIAQLIEKEEQRKEVQNQLVDREHKLANLHQKTKVQEEKIKTLQKEREDKEETIDILRKELSRTEQIRKELSIKASSLEVQKAQLEGRLEEKESLVKLQQEELNKHSHMIAMIHSLSGGKINPETVNLSI

SEQ ID NO: 17312 - DNA, 3760 bp, Homo sapiens
  CDS (244)..(1887)
gtgctgggccgcgggccgaaggagtcgccagggctgcgtaggcttgtggcgcgcccgcggagaggccggggctctgacgcccgctctgcggcttcggtgtttgaacaggccacagtccaggagcgcttacattcaggagctccgcgtagcacctgcccaaccaaactcagccctccgttaagatcctggttccatgccgcagtaggacagcaggcccaagtctgcacatcccagtgatgcaccatgccaatagtggataagttgaaggaggccctgaaacccggccgcaaggactcggctgatgatggagaactggggaagcttcttgcctcctctgccaagaaggtccttttacagaaaatcgagttcgagccagccagcaagagcttctcctaccagctggaggccttaaagagcaaatatgtgttgctcaaccccaaaacagagggagctagtcgccacaagagtggagatgacccaccggccaggagacggggcagtgagcacacgtatgagagctgtggtgacggagtcccagccccgcagaaagtgcttttccccacggagcgactgtctctgaggtgggagcgggtcttccgcgtgggcgcaggactccacaaccttggcaacacctgctttctcaatgccaccatccagtgcttgacctacacaccacctctagccaactacctgctctccaaggagcatgctcgcagctgccaccagggaagcttctgcatgctgtgtgtcatgcagaaccacattgtccaggccttcgccaacagcggcaacgccatcaagcccgtctccttcatccgagacctgaaaaagatagcccgacacttccgctttgggaaccaggaggacgcgcatgagttcctgcggtacaccatcgacgccatgcagaaagcctgcctgaatggctgtgccaagttggatcgtcaaacgcaggctactaccttggtccatcaaatttttggagggtatctcagatcacgcgtgaagtgctccgtgtgcaagagcgtctcggacacctacgacccctacttggacgtcgcgctggagatccggcaagctgcgaatattgtgcgtgctctggaactttttgtgaaagcagatgtcctgagtggagagaatgcctacatgtgtgctaaatgcaagaagaaggttccagccagcaagcgcttcaccatccacagaacatccaacgtcttaaccctttccctcaagcgttttgccaacttcagcggggggaagatcaccaaggatgtaggctatccggaattcctcaacatacgtccgtatatgtcccagaataatggtgatcctgtcatgtatggactctatgctgtcctggtgcactcgggctacagctgccatgccgggcactattactgctacgtgaaggcaagcaatggacagtggtaccagatgaatgattccttggtccattccagcaacgtcaaggtggttctgaaccagcaggcctacgtgctgttctatctgcgaattccaggctctaagaaaagtcccgagggcctcatctccaggacaggctcctcctcccttcccggccgcccgagtgtgattccagatcactccaagaagaacatcggcaatgggattatttcctccccactgactggaaagcgacaagactctgggacgatgaagaagccgcacaccactgaagagattggtgtgcccatatccaggaatggctccaccctgggcctgaagtcccagaacggctgcattcctccaaagctgccctcggggtccccttcccccaaactctcccagacacccacacacatgccaaccatcctagacgaccctggaaagaaggtgaagaagccagctcctccactgccaacgggcatgggctgaaggggaacgacgagagcgctggcctcgacaggaggggctccagcagctccagcccagagcactcggccagcagcgactccaccaaggccccccagacccccaggagtggagcggcccatctctgcgattctcaggaaacgaactgttccaccgctggccactccaaaacgccgccaagtggagcagattctaagacggtgaagctgaagtcccctgtcctgagcaacaccaccactgagcctgcaagcaccatgtctcctccaccagccaaaaaactggccctttctgccaagaaggccagcaccctgtggagggcgaccggcaatgacctccgtccacctcccccctcaccatcctccgacctcacccaccccatgaaaacctctcaccccgtcgttgcctccacttggcccgtccatagagccagggctgtgtcacctgctccccaatcatccagccgcctgcaaccccccttcagcccccaccccacattgctgtccagtacccccaagcccccagggacgtcagaaccacggagctgctcctccatctcgacggcgctgcctcaggtcaacgaggaccttgtgtcccttccacaccagttgccagaggccagtgagcccccccggagcccctctgagaagaggaaaaagacctttgtgggagagccgcagaggctgggctcagagacgtgccccccacagcacatcagggaggccactgcggctccccacgggaagaggaagaggaagaagaagaagcgcccggaggacacagctgccagcgccctgcaggaggggcagacacagagacagcctgggagccccatgtacaggagggagggccaggcacagctgcccgctgtcagacggcaggaagatggcacacagccacaggtgaatggccagcaggtgggatgtgttacggacggccaccacgcgagcagcaggaagcggaggaggaaaggagcagaaggtcttggtgaagaaggcggcctgcaccaggacccacttcggcacagctgctctcccatgggtgatggtgatccagaggccatggaagagtctccaaggaaaaagaaaaaaagaaagcaggagacacagcgggcagtagaagaggatgggcatctcaaatgcccaaggagtgccaagccccaagatgctgttgtccccgagtccagcagctgcgcaccatccgcgaatggctggtgtcctggggaccgcatggggctgagccaggcccctcctgtgtcttggaatggagagcgggagtctgatgtggtccaggaactgctcaaatactcatctgataaagcttacgggagaaaagttctgacctgggatggcaagatgtcggcggtcagtcaggatgctattgaagacagcagacaggcccggactgagaccgtggttgatgactgggacgaagagtttgaccgagggaaggaaaagaaaattaaaaaatttaagagagagaagaggagaaacttcaacgccttccagaaacttcagactcgacggaacttctggtctgtgactcacccagcaaaggctgccagcctcagctatcgccgctgactgtgcccctgtggaaggagatgatcaagcggtgctgattcacgagagtggaagcctccagagcttggggctttctggctgctcttcattgacctgtgtgttcccagcacacgaacagcgcccctaacggagatttgttcagcgactgaatatacacctgtaaacgagtagcatgtatacattgattttgattacaaatggttctgtattatataccaccgttctgactgcttttttcacttatagcttggaaattgtcttctgttggtaatacagaaatctgtttcagtcac

SEQ ID NO: 17313 - protein, 548 aa, Homo sapiens
MPIVDKLKEALKPGRKDSADDGELGKLLASSAKKVLLQKIEFEPASKSFSYQLEALKSKYVLLNPKTEGASRHKSGDDPPARRRGSEHTYESCGDGVPAPQKVLFPTERLSLRWERVFRVGAGLHNLGNTCFLNATIQCLTYTPPLANYLLSKEHARSCHQGSFCMLCVMQNHIVQAFANSGNAIKPVSFIRDLKKIARHFRFGNQEDAHEFLRYTIDAMQKACLNGCAKLDRQTQATTLVHQIFGGYLRSRVKCSVCKSVSDTYDPYLDVALEIRQAANIVRALELFVKADVLSGENAYMCAKCKKKVPASKRFTIHRTSNVLTLSLKRFANFSGGKITKDVGYPEFLNIRPYMSQNNGDPVMYGLYAVLVHSGYSCHAGHYYCYVKASNGQWYQMNDSLVHSSNVKVVLNQQAYVLFYLRIPGSKKSPEGLISRTGSSSLPGRPSVIPDHSKKNIGNGIISSPLTGKRQDSGTMKKPHTTEEIGVPISRNGSTLGLKSQNGCIPPKLPSGSPSPKLSQTPTHMPTILDDPGKKVKKPAPPLPTGMG

SEQ ID NO: 17314 - DNA, 2162 bp, Homo sapiens
ttttcagtagcgtctcctccttattcattcacttttactgtgaagactgaaatccaaaagccaggttccccaaaaaagtatttttaaaaaattttaggggaccaaaataaatagaggaagaccaatataaaaaaatatgttcaactattccattttaaatttaaagcagaaaaaaaaattgtgcccctcagacctaaaggcagctttaaatgtatatagtttggtgaaacatttgggaaatattaatttggaggtttagaagcatacgaaaaacaaattcaaagcacttgaaagtaaagacaatatcatgaggtcgaaaaaaacttcaaaaggatattaggtaagagaaaatgtgaatgaaagcagtgaatttctgcctctcctcgtatttagggtacttaaaattactaaaaaatactgtctttttaccatacagctagatggcctgtattattcttaatgtggccaaaggagtgaagactgattagggttttagaatttggaactgtagtcacataaaggcatcttttgcatttcttaaaccagtaatctacattttctcctggaaatggagaaatatgaaatgtgctgtgcatagcttttggaatagaaaacaaagttttaaaagaatggatatgttttcttgcacaacttgtaaaattttaattaaaaaattacctcatttttcaatccataaggtgctttgctcaagtttgtgggatgtttgtaccatcccataaaaacccccttcacccaaactgtatttgaaatatgcaaaattcataactaagggatagcattccttggagactttgtcttgttttactcttgtttaccagctgggccaacatggtagatatatgagattcacatatggtttcattaaagcacataggaaagtgctcagtcaatatttaattagtttaattagataagggagaggagaaatcctaaatttgatggattcttttatactgtgaatatatttccatcagtgttggtaagatatcaaatgactatcagttgatcccagtcatcagtgacttatttgcatatttaagccctattcacaagagaccataatcattttaatcttatattttccctcaggaaatttagggactctgaagcccctattttattctcttggagtaaactgttgagtgtagttacaaaaacttttatttatgacttaaaaaaagtttagctgctatttcagtgaaagtgtaaaataaaacggtcatgattttttcaattacagaatagttacaaattttaccatgttcatctattccacagagcatgttaaaaacaacaacaacaaaaacctaacagcaattacaaccttggtgttgcgtttattctaatcagagtgaatgattataatcacactttgctattttaacataaattggtgctttagagcattaaggaggaagcagcaggccctgtactcagtatttattatttcttgcctcagaatgcaaaacaactttaaagtgtctatattcatatatatgtgcatttcttaagatttaaatacaaactgttgttactccttaagcttcaggctttctgcgaaagctctaagaatatcttcattactatgcttggtcaactggaagatggtattaataaggtcagaattaggaattggattgctctgtgggtcctccggtattgtgcagaggaaagaaaaatgtctttcacaccacaaactgtgtgtctgaaccccagccaaacaaatgtgttccattggtccaatatataagcattaacaacaacaacaaaaaatttaaaacaagtaaattaatgcattcacatgatcacttcttgaaaatggttcaaagcatgttttcctgatggtgggattgtttaaatgacatgttttaaagtttttaatactttattagttatgaagtgcttcttttatatgttaagtttaggttgccagtactcataatttttatttctgcaattatgttataatgagttgtttgcatgcctacttaacccaagtaaaacgatgctgtttgctctggaatgttcatcttttagacaggttttggctcatttccaatcatggtgcaatatagtgtaacattcatttgttttcattcaacagttttatttttgtcataataaataattacttttccaat

SEQ ID NO: 17315 - DNA, 1752 bp, Homo sapiens
gataatattgtttccctcgtccgtctgtctcgatgcctgattcggacggccaatggtgcttcccccacccctccacgtgtccgtccacccttccatcagcgggtctcctcccagcggcctccggcgtcttgcccagcagctcaagaagaaaaagaaggactgaactccatcgccatcttcttcccttaactccaagaacttgggataagagtgtgagagagactgatggggtcgctctttgggggaaacgggctccttcccctgcacctggcctgggccacacctgagcgctgtggactgtcctgaggagccctgaggacctctcagcatagcctgcctgatccctgaacccctggccagctctgaggggaggcacctccaggcaggccaggctgcctcggactccatggctaagaccacagacgggcacacagactggagaaaacccctcccacggtgcccaaacaccagtcacctcgtctccctggtgcctctgtgcacagtggcttcttttcgttttcgttttgaagacgtggactcctcttggtgggtgtggccagcacaccaagtggctgggtgccctctcaggtgggttagagatggagtttgctgttgaggtggctgtagatggtgacctgggtatcccctgcctcctgccaccccttcctccccacactccactctgattcacctcttcctctggttcctttcatctctctacctccaccctgcattttcctcttgtcctggcccttcagtctgctccaccaaggggctcttgaaccccttattaaggccccagatgatcccagtcactcctctctagggcagaagactagaggccagggcagcaagggacctgctcatcatattccaacccagccacgactgccatgtaaggttgtgcagggtgtgtactgcacaaggacattgtatgcagggagcactgttcacatcatagataaagctgatttgtatatttattatgacaatttctggcagatgtaggtaaagaggaaaaggatccttttcctaattcacacaaagactccttgtggactggctgtgcccctgatgcagcctgtggcttggagtggccaaataggagggagactgtggtaggggcagggaggcaactctgctgtccacatgacctccatttcccaaagtcctctgctccagcaactgcccttccaggtgggtgtgggacacctgggagaaggtctccaagggagggtgcagccctcttgcccgcacccctccctgcttgcacacttccccatctttgatccttctgagctccacctctggtggctcctcctaggaaaccagctcgtgggctgggaatgggggagagaagggaaaagatccccaagaccccctggggtgggatctgagctcccacctcccttcccacctactgcactttcccccttcccgccttccaaaacctgcttccttcagtttgtaaagtcggtgattatatttttgggggctttccttttattttttaaatgtaaaatttatttatattccgtatttaaagttgtaaaaaaaaataaccacaaaacaaaaccaaaaaaaaaaaaaaacttctcctcctgcagccgggagcggccggcctgcctccctgcgcacccgcagcctcccccgctgcctccctagggctcccctccggccgccagcgcccatttttcattccctagatagagatactttgcgcgcacacacatacatacgcgcgcaaaaagg

SEQ ID NO: 17316 - DNA, 2586 bp, Homo sapiens
  CDS (57)..(1442)
ataaggaacagaagaccggtaaaacaaatgaatcgcaaatttcaaataatataaacatgcagagttactcagtagaaatgcctaccgtgtcttccagtggaggcataattggcaccggaatagatgaactgcagaagagggtgccaaaattgatctttaagaaaggaagcagaaagaatacagataaaaactaccttaactttgtgtcaccattaccagacatagtaggacagaaatccttgtctggaaaaccaagtggctcacttggcatagtatcaaataatagtgtagagaccattggtcttctccaaagtacaagtggcaaacaaggtcagataagtagtaattatgatgatgccatgcagttttcaaagaaaagaagatatttaccaactgccagcagcaacagtgccttttctataaacgtaggacacatggtctcccaacagtctgtcattcagtctgcaggtgtcagtgttttggacaatgaggcaccattgtcacttattgactcctcagctctaaatgctgaaattaaatcttgtcatgacaagtctggaattcctgatgaggttttacaaagtattttggatcaatactccaacaaatcagaaagccagaaagaggatcctttcaatattgcagaaccacgagtggatttacacacctcaggagaacactcagaattggttcaagaagaaaatttgagcccaggcacccaaacaccttcaaatgataaagcaagtatgttgcaagaatactccaaatacctccaacaggcttttgaaaaatccactaatgcaagttttactcttggacacggtttccaatttgtcagtttgtcttcacctctccacaaccacactttgtttccagaaaaacaaatatacactacgtctcctttggagtgtggtttcggccaatctgttacctcagtgttgccatcttcattgccaaagcctccttttgggatgttgtttggatctcagccaggtctttatttgtctgctttggatgctacacatcagcagttgacaccttcccaggagctggatgatctgatagattctcagaagaacttagagacttcatcagccttccagtcctcatctcagaaattgactagccagaaggaacagaaaaacttagagtcttcaacaggctttcagattccatctcaggagttagctagccagatagatcctcagaaagacatagagcctagaacaacgtatcagattgagaactttgcacaagcgtttggttctcagtttaagtcgggcagcagggtgccaatgacctttatcactaactctaatggagaagtggaccatagagtaaggacttcagtgtcagatttctcagggtacacaaatatgatgtctgatgtaagtgagccatgtagtacaagagtaaagacacccaccagccagagttacaggtaaggtcccaaaagtggccaggctggaggtcttctaatgtaattttgttttattttgagaacactgccattggaatgtttctacacgatcctattaagaataatgtgatgccctttcaatgcaacttttcatatttagtttattttgttagcgtgattttagctctgtttgtattatgatttttaatcaaaatcaatagattaaaaatagtttgacattcaaagtgacaatgtttagcaatcaaatttacatgtatagatcgtcagggaatagcccaaatgttttaaacgcaaaaaaaaagacaaaaaaaaaccaaaaaaaaaaaacctacaaaaaaaactttgttgctaggattaaggttattctaattgctttactctcaggaaagtgtaataacgcatgggaattctgtacgttatcactgtaatggaatatccaatttacagatagtatgatatacatttcatcatttaagtaagggatcgaaaacatttcaaattgctctatctgggctgatagacatttcgtcatttaagtaagggatcgaagacatttcaaattgctatctccatctgggctgatccaaaattctgagattgttggctacctatattttgttgcagcttttaaatgtactctgaacttccaaaccacattcattccagcctggtagaacaaatattcttggatctttgatcaaagcctggaatgatagctttaataaaagaaggaaaaaaaaaaagcaccctctcttgatctcaactgtaacaaggctgtaattccatcaagcgattctactgacatctagtacagtgttgaagcccaagtggttggctggttccagtattagaactcaagttgaaattatatgattaactgaaatttggggcatgcattatttattatacatggcctacaacggttctgtctgcgctgttacgtattacctacacttctgggtttttttgttcttgttctcagcctctctttaagagttcttgggccttccttttccctctttctattttaacagttttaattttagaaccatttacattccagtaggtaattcactatgcgctttatatgccttagggcatccaaataaaaaacaatagggtaaacatccccaaaacccaccttt

SEQ ID NO: 17317 - protein, 462 aa, Homo sapiens
MQSYSVEMPTVSSSGGIIGTGIDELQKRVPKLIFKKGSRKNTDKNYLNFVSPLPDIVGQKSLSGKPSGSLGIVSNNSVETIGLLQSTSGKQGQISSNYDDAMQFSKKRRYLPTASSNSAFSINVGHMVSQQSVIQSAGVSVLDNEAPLSLIDSSALNAEIKSCHDKSGIPDEVLQSILDQYSNKSESQKEDPFNIAEPRVDLHTSGEHSELVQEENLSPGTQTPSNDKASMLQEYSKYLQQAFEKSTNASFTLGHGFQFVSLSSPLHNHTLFPEKQIYTTSPLECGFGQSVTSVLPSSLPKPPFGMLFGSQPGLYLSALDATHQQLTPSQELDDLIDSQKNLETSSAFQSSSQKLTSQKEQKNLESSTGFQIPSQELASQIDPQKDIEPRTTYQIENFAQAFGSQFKSGSRVPMTFITNSNGEVDHRVRTSVSDFSGYTNMMSDVSEPCSTRVKTPTSQSYR

SEQ ID NO: 17318 - DNA, 2727 bp, Homo sapiens
  CDS (789)..(2504)
gactctgggatcggcggcgctatgagttctttcgaggggcagatggccgagtatccaactatctccatagaccgcttcgatagggagaacctgagggcccgcgcctacttcctgtcccactgccacaaagatcacatgaaaggattaagagcccctaccttgaaaagaaggttggagtgcagatgaggaaactgaggaaccagagaggttaaattagttgcccagtgtcacacagccagtaagtggcaggaccaggattccagccagcttgaaggtttatctatactgttcacctgtgactaaggagttgttgttaacgagcccgaaatacagattttggaagaaacgaattagcagtcacaacagcagggttgttcctgttgtctctggcattcagcttgaagttactacaggtcagcccggccagcagtcaggaaggaaagctggaagagaagtggaggggaacagagacaaactggaaggcagaatggcccactaggacagaccgaaacccacttctgtctctcacttcctctggcctcaatagtgctggtctcccgctttggctctgaagcacatgcacctgccccaggactcggaggagctgcacacgggcacccagcagaagctgatgttgctgcggccctgccccagactctgagttaagccagaagatatctattgaaatcgagacccctacccagatatctttagtggatgaagcatcaggagagaaggaagagattgttgtgactctcttaccagctggtcactgtccgggatcagttatgtttttatttcagggcaataatggaactgtcctgtacacaggagacttcagattggcgcaaggagaagctgctagaatggagcttctgcactccgggggcagagtcaaagacatccaaagtgtatatttggatactacgttctgtgatccaagattttaccaaattccaagtcgggaggagtgtttaagtggagtcttagagctggtccgaagctggatcactcggagcccgtaccatgttgtgtggctgaactgcaaagcggcttatggctatgaatatctgttcaccaaccttagtgaagaattaggagtccgggttcatgtgaataagctagacatgtttaggaacatgcctgagatccttcatcatctcacaacagaccgcaacactcagatccatgcatgccggcatcccaaggcagaggaatattttcagtggagcaaattaccctgtggaattacttccagaaatagaattccactccacataatcagcattaagccatccaccatgtggtttggagaaaggagcagaaaaacaaatgtaattgtgaggactggagagagttcatacagagctcgtttttcttttcactcctcctacagtgagattaaagatttcttgagctacctctgtcctgtgaacgcatatccaaatgtcattccagttggcacaactatggataaagttgtcgaaatcttaaagcctttatgccggtcttcccaaagtacggagccaaagtataaaccactgggaaaactgaagagagctagaacagttcaccgagactcagaggaggaagatgactatctctttgatgatcctctgccaatacctttaaggcacaaagttccatacccggaaacttttcaccctgaggtattttcaatgactgcagtatcagaaaagcagcctgaaaaactgagacaaaccccaggatgctgcagagcagagtgtatgcagagctctcgtttcacaaactttgtagattgtgaagaatccaacagtgaaagtgaagaagaagtaggaatcccagcttcactgcaaggagatctgggctctgtacttcacctgcaaaaggctgatggggatgtaccccagtgggaagtattctttaaaagaaatgatgaaatcacagatgagagtttggaaaacttcccttcctccacagtggcagggggatctcagtcaccaaagcttttcagtgactctgatggagaatcaactcacatctcctcccagaattcttcccagtcaacacacataacagaacaaggaagtcaaggctgggacagccaatctgatactgttttgttatcttcccaagagagaaacagtggggatattacttccttggacaaagctgactacagaccaacaatcaaagagaatattcctgcctctctcatggaacaaaatgtaatttgcccaaaggatacttactctgatttgaaaagcagagataaagatgtgacaatagttcctagtactggagaaccaactactctaagcagtgagacacatatacccgaggaaaaaagtttgctaaatcttagcacaaatgcagattcccagagctcttctgattttgaagttccctcaactccagaagctgagttacctaaacgagagcatttacaatatttatatgagaagctggcaactggtgagagtatagcagtcaaaaaaagaaaatgctcactcttagatacctaagaattcaaagcgtttcaacctagagcaaccactaaaaaacctgcacagagatgacagtcaatattacaatagagaaaatacagtacttaaaaatgttcaaataacctggttgggtgtggtggctcacacttgtaatcccagcactttgaggtgggcaatggctcgagcccaggagttcgacaccagcctggccaacacagtgaaatgtgtctctacttac

SEQ ID NO: 17319 - protein, 572 aa, Homo sapiens [sequence omitted]

SEQ ID NO: 17320 - DNA, 2522 bp, Homo sapiens
  CDS (130)..(915)
aaacagagtattgtatgggagtttgaaaaataccagcgattactagagaaaaagcagccaccacatcggcagctgggggcagaggtagcagcagctctggccagcctacagcgggaggcagcggagaccatgcagaaactggagttgaaccatagcgagctcatccagcagagccaggtcctgtggaggatgattgcagagttgaaagagaggtcgcagaggcctgtccgctggatgttgcaggatattcaggaagtgttaaacaggagcaaatcttggagcttgcagcagccagaaccaatctccctggagttgaagacagattgccgtgtgctggggctaagagagatcctgaagacttatgcagctgatgtgcgcttggatccagatactgcttacccccgtctcatcgtgtctgaggacagaaaacgtgtgcactatggagacaccaaccagaaactgccagacaatcctgagagattttaccgctataatatcgtcctgggaagccagtgcatctcctcaggccggcactactgggaggtggaggtgggagacaggtctgagtggggcctgggagtatgtaagcaaaatgtagaccggaaggaggtggtctacttatccccccactatggattctgggtgataaggctgaggaagggaaatgagtaccgagcaggcaccgatgagtacccaatcctgtccttgccggtccctcctcgccgggtgggaatcttcgtggattatgaggcccatgacatttctttctacaatgtgactgactgtggctcccacatcttcactttcccccgctatcccttccctgggcgcctcctgccctattttagtccttgctacagcattggaaccaacaacactgctcctctggccatctgctccctggatggggaggactaagaaagctaccaccctaaccacagaggcttggaattgggcctggcccccatggggcttggaggaccgagccactgacaggtatcccctgaaactgagctgagcccagtatccaaggattcctctgtctgatcctttggtctttgctaccaggctgaagtctgtcatgaaaccacttattttaaaaagcagaggcccagtcaaatgagcattgcatcccatgagggaagcacgacagggctgatggtgaggatcagagcagttctaaggtgactcgttggggtaaggatcaggactttgtccatgtagtagccaaccaccctcttccctgattcccgtccggtgtcacagttcagtcagtgaggatgatgaagtagatacagtcttcaggacaccattagatgggctttcccaataggccaaaaaaatgctgcgcatacccagagctggttgttgtgctgaggccagtcagaggatgcttcccctgaggtttgctataactaagcaacctttatgtgactctcaccttctgacctcctggcaagagaaattcagtgcagcagggggacacagacctgcccaagccaccccactgccgttccctctctgagcacaagctgggcaaatcactgtcccttggactccagtagaccagtgtcctagtcttgccttttttctctaagtggcaggatcagaaaacctgcgagctttagtttgtattttcactttatgaatgaggaaactgaaatggccttaagggagcaagttatttctttttttttgacacggagtctcgctctgttgcccaggctggagtgcagtggcacgatctcggctcactgcaggctctgcctcctgggttcacgccattctcctgcctcagcttcccgagtagctgggactacaggcgcccaccacgacgcctggctcatttttttgtatttttagtagagacggggtttcaccatgttagctaggatggtctcgatctcctgacctcatgatccgccctcctcagcctcccacagtgctgggattagaggcatgagccactgcgcccggcccctggagcaagttatttcttacaaagctgctgaaggtaagattatcaaaattataaagcatttttcacactcaagtgaaacaaggttgacaaactcacttcgcaggtcacatgcctatacatcacttattatatttgggtctgaaacttctcacatgtttgggaggttttatgtgtcctcattgggaaaatgggtgtaattcagcataaaacctcatatgattgtcctgcctcatggagctgttgtatagatcccagatccatcccatgatttgttcctgtctgaggcatagaggcaggcaagccgtggattttgcacatggtgactttcccactgtgccatgatacagtctgcatcttatagcagtgcctttgtctcagggcctctgctggcagtctagaccttttgggcagaaaggagcttcaaatggctgtgataaggaatattaaaaattgtgtttctactttaattgtattggctgttcatgtatgtaggagttaaaataggccaaactggagaaataaacgcattctgtccaccatg

SEQ ID NO: 17321 - protein, 262 aa, Homo sapiens [sequence omitted]

SEQ ID NO: 17322 - DNA, 2490 bp, Homo sapiens
  CDS (73)..(1551)
tgaatagaagggctggtccagcggcggcggaggctggcgctgtcctgagagggagggctctgtgcggaagagatgaatcggacaaagggtgatgaggaggagtattggaacagctccaagttcaaggcttttacctttgacgatgaagacgatgagctttcacagttaaaggagtccaagcgggcggtgaacagcctccgagacttcgtggatgatgatgacgatgatgacctggagcgagtcagctggagtggggaacctgtgggaagtatctcatggtccatcagagagactgctggtaatagcggctcaacccacgaggggcgtgaacagctaaagagccgaaacagcttctcctcctatgcacaactacccaagcctacttctacctactccctgagcagcttttttagaggtagaactagacctggaagtttccagtccctttctgatgctctgtcagacacacctgccaaaagctatgctccagagctggggagacccaaaggggagtatagggattacagcaatgactggagccccagtgatacagtgcgacgtctccggaagggcaaggtttgctcactagagagattccgctccttacaggacaaactacaactcctagaagaggcagtaagcatgcatgatggaaacgtcattactgcagttctgattttcctgaagaggacactgagcaaagagatcctcttccgagagctggaggtgcgacaggttgccctgagacatcttattcacttccttaaggaaataggggatcaaaagttgcttttagacctcttcaggttcctagatagaacagaagagcttgcgctatctcattatcgagagcatttgaacattcaggaccctgacaaacgaaaagaatttcttaaaacctgtgttggtttgccattttcagcagaagattccgcacacatacaggaccattacacgctcctggaacgtcagatcattattgaggcaaatgatcgccatctagaatcagcaggacagactgagatcttccgaaagcacccccgcaaagcctccatcctcaacatgccactagtgacaacacttttctactcctgcttctatcactacacagaggctgaggggacattcagcagtcccgtcaacctgaagaagacatttaagatcccagataaacagtatgtgctgacagccctggctgctcgtgccaagcttcgagcctggaatgatgtagatgccctattcaccacaaagaactggctgggctataccaagaagagagcacccattggcttccatcgggttgtcgaaattttgcacaagaacaatgcccctgtgcagatattacaggagtatgtcaatctggtggaagatgtggacacgaagttgaacttagccactaagttcaagtgccatgatgtcgtcattgatacctaccgggacctgaaggatcgtcaacagttgctagcatacaggagtaaggtagataaaggatcagcagaggaggagaagattgatgctcttctcagcagctcgcaaattcgatggaagaattaagtggcattgactaccttgaagcctgcctcatttcctcctctcctgcctgtgaaagcagagagagctcttctttgggagagctgcggcatcacatcgcttgggcccattacccatgggcagtgccagctactcttgacacagataacttcagactgatcttctgtccaaggaacatcatctgaggatcgagatctaaagctttgagtcatgagaatgattctctccacctggtgctcatatgaaggtgggagtgatttctagattgggcccctactgggtaagatctcacttggtctgagaaaagtgactgctccagaaaggaagaggtatgggagtcatagggtggctactgcattccactcagctaattatgatccaggacttggcgctggacattggcagttctgctctgaatgaagtcagaacagaaccaaaatggcctcaggaaggaatgccagtgtttcccaagacctcctggagatgcactcacaccagactgcacagacccctccacattatgccacacacggcctagacgttgtgtttcctcagccattttccctctgctgccccagtttactctgtccaaaaccctaaggttcttctctcacttgaacacagacgaccttgcttgggtgatgagacatcccctttatctcttcctctactgctggccaagacccgtcactttataagaagctcagatgcagcagtgctggagagctctctctttatgcaaaaatctcatttcaccaggagctttcagaagtttcacctgggctaaattcagcagcatttctgttaggatatttagatggaggttttattttcacacttggattcttgctctgtaccaatatttgcctccttttctgtgactgaactgggtttttctgacatgcctagactcctaataaaggtatttcttccttggtg

SEQ ID NO: 17323 - protein, 493 aa, Homo sapiens
MNRTKGDEEEYWNSSKFKAFTFDDEDDELSQLKESKRAVNSLRDFVDDDDDDDLERVSWSGEPVGSISWSIRETAGNSGSTHEGREQLKSRNSFSSYAQLPKPTSTYSLSSFFRGRTRPGSFQSLSDALSDTPAKSYAPELGRPKGEYRDYSNDWSPSDTVRRLRKGKVCSLERFRSLQDKLQLLEEAVSMHDGNVITAVLIFLKRTLSKEILFRELEVRQVALRHLIHFLKEIGDQKLLLDLFRFLDRTEELALSHYREHLNIQDPDKRKEFLKTCVGLPFSAEDSAHIQDHYTLLERQIIIEANDRHLESAGQTEIFRKHPRKASILNMPLVTTLFYSCFYHYTEAEGTFSSPVNLKKTFKIPDKQYVLTALAARAKLRAWNDVDALFTTKNWLGYTKKRAPIGFHRVVEILHKNNAPVQILQEYVNLVEDVDTKLNLATKFKCHDVVIDTYRDLKDRQQLLAYRSKVDKGSAEEEKIDALLSSSQIRWKN

SEQ ID NO: 17324 - DNA, 1694 bp, Homo sapiens
  CDS (41)..(1342)
cccggatgtggagaagctggggagaaggcgtgggaggaagatggactcggtggagaagggggccgccacctccgtctccaacccgcgggggcgaccgtcccggggccggccgccgaagctgcagcgcaactctcgcggcggccagggccgaggtgtggagaagcccccgcacctggcagccctaattctggcccggggaggcagcaaaggcatccccctgaagaacattaagcacctggcgggggtcccgctcattggctgggtcctgcgtgcggccctggattcaggggccttccagagtgtatgggtttcgacagaccatgatgaaattgagaatgtggccaaacaatttggtgcacaagttcatcgaagaagttctgaagtttcaaaagacagctctacctcactagatgccatcatagaatttcttaattatcataatgaggttgacattgtaggaaatattcaagctacttctccatgtttacatcctactgatcttcaaaaagttgcagaaatgattcgagaagaaggatatgattctgttttctctgttgtgagacgccatcagtttcgatggagtgaaattcagaaaggagttcgtgaagtgaccgaacctctgaatttaaatccagctaaacggcctcgtcgacaagactgggatggagaattatatgaaaatggctcattttattttgctaaaagacatttgatagagatgggttacttgcagggtggaaaaatggcatactatgaaatgcgagctgaacatagtgtggatatagatgtggatattgattggcctattgcagagcaaagagtattaagatatggctattttggcaaagagaagcttaaggaaataaaacttttggtttgcaatattgatggatgtctcaccaatggccacatttatgtatcaggagaccaaaaagaaataatatcttatgatgtaaaagatgctattgggataagtttattaaagaaaagtggtattgaggtgaggctaatctcagaaagggcctgttcaaagcagacgctgtcttctttaaaactggattgcaaaatggaagtcagtgtatcagacaagctagcagttgtagatgaatggagaaaagaaatgggcctgtgctggaaagaagtggcatatcttggaaatgaagtgtctgatgaagagtgcttgaagagagtgggcctaagtggcgctcctgctgatgcctgttctactgcccagaaggctgttggatacatttgcaaatgtaatggtggccgtggtgccatccgagaatttgcagagcacatttgcctactaatggaaaaggttaataattcatgccaaaaatagaaattagcgtaatattgagaaaaaaatgatacagccttcttcagccagtttgcttttatttttgattaagtaaattccatgttgtaatgttacagagagtgtgatttggtttgtgatatatatatattgtgctctacttttctctttacgcaagataattatttagagactgattacagtctttctcagatttttagtaaatgcaagtaagaacatcatcaaagttcactttgtattgtaccctgtaaaactgtgtgtttgtgtgctttcaaagatgttgggattttatttatctggggacagtgtgtatggtaagacatgcccttctattaataaaactacatttctc

SEQ ID NO: 17325 - protein, 434 aa, Homo sapiens
MDSVEKGAATSVSNPRGRPSRGRPPKLQRNSRGGQGRGVEKPPHLAALILARGGSKGIPLKNIKHLAGVPLIGWVLRAALDSGAFQSVWVSTDHDEIENVAKQFGAQVHRRSSEVSKDSSTSLDAIIEFLNYHNEVDIVGNIQATSPCLHPTDLQKVAEMIREEGYDSVFSVVRRHQFRWSEIQKGVREVTEPLNLNPAKRPRRQDWDGELYENGSFYFAKRHLIEMGYLQGGKMAYYEMRAEHSVDIDVDIDWPIAEQRVLRYGYFGKEKLKEIKLLVCNIDGCLTNGHIYVSGDQKEIISYDVKDAIGISLLKKSGIEVRLISERACSKQTLSSLKLDCKMEVSVSDKLAVVDEWRKEMGLCWKEVAYLGNEVSDEECLKRVGLSGAPADACSTAQKAVGYICKCNGGRGAIREFAEHICLLMEKVNNSCQK

SEQ ID NO: 17326 - DNA, 2541 bp, Homo sapiens
  CDS (100)..(564)
gtactctgattggtgacgggtgaggcggcccgaaatcgtaggacttccgaaagcagcggtggcgtttgcttcactgcttggaagtgtgagtgcgcgaagatgcgaaaggtggttttgatcaccggggctagcagtggcattggcctggccctctgcaagcggctgctggcggaagatgatgagcttcatctgtgtttggcgtgcaggaacatgagcaaggcagaagctgtctgtgctgctctgctggcctctcaccccactgctgaggtcaccattgtccaggtggatgtcagcaacctgcagtcggtcttccgggcctccaaggaacttaagcaaaggtttcagagattagactgtatatatctaaatgctgggatcatgcctaatccacaactaaatatcaaagcacttttctttggcctcttttcaagaaaagtgattcatatgttctccacagctgaaggcctgctgacccagggtgataagatcactgctgatggacttcaggaggtgtttgagaccaatgtctttggccattttatcctggtaaagaagctgtgggcttaataagctaatatttcgtgtgatagtttctgtaaagctctgggcacagggcattattatagttgagcagccagttaactgatttaatctcatgtttgagttttcttgattgcatttgccttgtttattgtgagcatggaatacttctggaagctttcctagtagatttttctttaataaatgtactaatagtttttgatttacagaattactgcaaagatagtacagagactttctgtatgccctacacccagtttccccattattaacatttcgcattggtatgatgcatttgtcaaaatagatgaatcaattctgctacattattattaactaaagtacacactttattcaggttctgtttttgcctaatgtcttttttcagttctaggatcccattcaagatactacattacatttagcagtcatgcctccttaggctcttcttggttgtgacagcttctcagactttccttgtttttgatgaccttgacagttttgaggagtactgcttaggtgttttgtagactctctcaatcgggatttgtctgatgtttttctcatggtgagactgaagaatgtggtttttgggaggaaggccacagaggtaaagtgacattctcatgacatcatatcaagggtgtatgctatcagtatgacttctcagtgttgatattaaccttgatcacctggcttgaggtcatgtttgtcaggtttttccattgttaagttactttttctttctcccttttcatactctactttttgaaagaaagttgggccgggcacggtggctcctgcctctaatcccagcactttgggaggccaaggcgggcagattacctgaggtcgggagtttgagatcagcctgaccaacatggagaaaccccatctctatcaaaaaacaaaattagccgagtgtggtgacgcatgcctgtaatcccagctgcttgggaggctgaggcagaagaatcgcttgaacccgggaagcggaagttgtgattcgggaactggagcctctcctctgtcacagtgacaatccatctcagctcatctggacatcatctcgcagtgcaaggaaatctaatttcagcctcgaggacttccagcacagcaaaggcaaggaaccctacagctcttccaaatatgccactgaccttttgagtgtggctttgaacaggaacttcaaccagcagggtctctattccaatgtggcctgtccaggtacagcattgaccaatttgacatatggaattctgcctccgtttatatggacgctgttgatgccggcaatattgctacttcgcttttttgcaaatgcattcactttgacaccatataatggaacagaagctctggtatggcttttccaccaaaagcctgaatctctcaatcctctgatcaaatatctgagtgccgccactggctttggaagaaattatattatgacccagaagatggacctagatgaagacactgctgaaaaattttatcaaaagttactggaactggaaaagcacattagggtcactattcaaaaaacagataatcaggccaggctcagtggctcatgcctataattccagcactttgggaggccaaggcagaaggatcacttgagaccaggagttcaagaccagcctgagaaacatagtgagcccttgtctctacaaaaagaaataaaaataatagctgggtgtggtggcatgcgcatgtagtcccagctactcagaaggatgaggtgggaggatctcttgaggctgggaggcagaggttgcagtgagctgagattgtgccactgcactccagcctgggtgacagcgagaccctgtctcaaaatatgtatatatttaatatatatataaaaccagagctgacaatgacactctggaacattgcataccttctgtacattctggggtacatggatttctactgagttggataatatgcatttgtaataaactatgaactatg

SEQ ID NO: 17327 - protein, 155 aa, Homo sapiens
MRKVVLITGASSGIGLALCKRLLAEDDELHLCLACRNMSKAEAVCAALLASHPTAEVTIVQVDVSNLQSVFRASKELKQRFQRLDCIYLNAGIMPNPQLNIKALFFGLFSRKVIHMFSTAEGLLTQGDKITADGLQEVFETNVFGHFILVKKLWA

SEQ ID NO: 17328 - DNA, 3022 bp, Homo sapiens
  CDS (1057)..(1464)
ggagggggcgtcgggaaagccccgacttcgcagccttacactcttcgtgggcggcgaccgcggccccactgacatcattcctcatgagggaggaggcacaaacagttctgggccgaccagaaaaaggacgactgggacttgactctgaatcgcaggatttgaagagatttctcctggcttcccaacgaggctggtgggaagcggtcctcctcccatacacgacctcccaccctcgcgaggcgtaaaaaccagttctgactgtacagtaaagcgagggccagggctgaggtctggaagctaatgaaagcacagaaagtgtcgaaactggatgagcaggaagcgagtggcctcccctgtcatctgacgttttcccaggatgtaatttgcctgactgaaacagatcaggaccaacagggagagttttcgatttagtgtgaggaaaagagcactaaattgtagcaaaagaccttattgctcaaggcccagtcagaagatttcataaggaagctgtagaaagtcttaagaggaaatcagccgggcgtggtggcgggcacctgtaatcccagctactccggaggctgaggcaggagaatcgcttgaacccggggagcagaggttgcagtgagccgagatcgcgccactgtacgccagcctgggcgaaagaacgaaactccgtctccaaaaaaaaaaaaaacgaagaaaaagtccaaagagggtaaaggctgttctccccttaaaaaacagctaaagacctttgggggcgctgctccttgtaaatgtcaactacttccgcgggaaagaacgcgcaggcacttggccttgtgggcgctcacttgccccggaagtactgttgagttagcgcctcgccttccggggcggattgtctgtcgttgcagtagctgtaggaaggggaggccattttccgtttctgggaggagtgaggggcaacgggtcggagaaaaaggaaaaaagaagggctcagcgcctccccgccgggccgtggacagaggggcacagtttcggcaggcgggtgaggtcgctgagggcccgccggagatgttttccttgtcgagcacggtgcaaccccaggttacagttcctctgagtcatctcatcaatgccttccatacaccaaaaaacacttctgtttctctcagtggagtgtcagtttctcaaaaccagcatcgagatgtagttcctgagcatgaggctcccagcagtgagtgtatgttcagtgacttcctgacgaagcttaacattgtttcaattggcaaaggaaaaatattcgaagggtacagatccatgttcatggagccagcaaaaaggatgaagaagagcttggacacaaccgataactggcacatccgtccagaacccttctccctctcaatccctgtacactgcgggtttctccaaatgcctattgtctatgatttgttttgtccatcgttcttagtcacggcttagttcaggttcttgccatctttcacttgttccatcagccttctctctcatccagtctagttgctttgtttgtttgttttatcatttttaaattttttgtaaagacagggtcttgctttcttcaccaggctgatctcgaactcctggcctgaagcagtcctcccacctcagcctctcaaaagtgttgggattacaggctcgagccaccatgctaggccagtctatcttccttagttctccattttcttctataagacagaactaatcatgttacttagagaattaaattcaaacatggctcttcacagtttggccataacctatctctttaattttttctttccttgaattttttgagatattccagacccttggatggctttttgtttgcccccgtccctaagccgccttgatcatttttaatagcttaaaaagtacttttaagtattttatttcatcatgcctttaactgtcttttactatgtgctgtcatgttgtatgctaggatacgtagatgagtaaggcatgatctctgcctttgatccttactattaggaaataaggtgtattttatagttatgttagtattgagaaaatgaattctaagaatatgagttatagctaatttaaaaagtaccgtattcccagacatcagtccagagctatataatccgtgtccatgcctcttttaaaaaaaactttatttttagagacagggtctcccctttgtagcccaggctgaagtgcagtgatgctgtcatagctcactgcaacctccagctcctgggctcaaacatttctcctgagtagctggtgctgcgggtgcataccaccatgcccagctaatttttaaatttttcatcaagatgatgtcttaccatgttgctcaggctggtctcaaactcctggcctcaaacgatcttcccaccttagctgttttgggtttgagtaacatgtaattgttacttgcctttaagtgcctctctttcagctcatgtggacaagaaaataatccctatcctgttgtttaaaagtgggtatacacacatttttgtgatttttagacttttttgcctgattttcacacagttttgactttaattttcttctttattagaagatatgggtaactttagaacctctgagttcaaggaaggatctaagcaatgaggccagaggagtgagatgtcctatggtaaccaagcataccatttctttgtcaagtgggcttttgtttatggctgcttaggggcttaaaagctccatggactggtgaggattatcatttgaatggaatttccccaattcaagaaccttactattatcctccaatcagttctacactgttggggaaaatcccctggaccttatataacatactttgtaaccatgcagttagttactcttacactcttgtcattataaatgcttgatcaatagttgatagactagctcttgatcagagtacccttgtatggagagaaggaaaaaatgccatacatttcacttgattctgtgaaccataatgcttaggacagtagtggtttgggtttgattt

SEQ ID NO: 17329 - protein, 136 aa, Homo sapiens
MFSLSSTVQPQVTVPLSHLINAFHTPKNTSVSLSGVSVSQNQHRDVVPEHEAPSSECMFSDFLTKLNIVSIGKGKIFEGYRSMFMEPAKRMKKSLDTTDNWHIRPEPFSLSIPVHCGFLQMPIVYDLFCPSFLVTA

SEQ ID NO: 17330 - DNA, 2566 bp, Homo sapiens
  CDS (53)..(2566)
accagaagcattaaatgttatcgtaaggctaattgaacaagccccaattcaaatgggagaagaggcagtgaggtgggcaaaactggtcatacctttagtggttcattcagcacaaaaggtacatttgcggggagcaactgctctggagatgggaatgccattattgcttcagaaacagcaagaaatagcatctattacggagcagcttatgactactaaattaatctcagaacttcagaagctatttatgagtaaaaatgagacttacgtgttaaaattatggcctttgtttgtcaaactacttggaaggaccttgcatcgaagtgggagtttcatcaattctctcttgcaactagaagaacttggatttcgtagtggagcacccatgattaaaaagatagcttttattgcttggaagagtttaatagataattttgctttaaatccagatatactatgtagtgcaaaaagactcaagttgttaatgcagcctttgagttccatccatgtgagaacagaaactctagcattaacaaaactagaagtctggtggtatttactgatgagacttggacctcatcttcctgctaattttgaacaggtttgtgtgcctctgattcaaagtacaataagcattgattctaatgcctcacctcagggcaattcgtgtcatgtagctacatctccaggtttaaatcctatgactcctgtacacaaaggtgcttcctccccgtacggagccccgggaactccccgaatgaacctgagttcgaatttaggtggaatggccacaatcccatccattcaacttttgggacttgaaatgttgcttcatttcttgttgggtccagaagccttgagttttgctaagcaaaataaacttgtgctgagcttagagccattggaacatccgttaatcagcagcccttcctttttttccaaacatgcaaatacacttatcactgctgttcatgatagctttgttgcagttggaaaagatgcccccgatgtggttgtcagtgctatctggaaggagctaattagcttggtgaagtcagttactgaatcaggtaacaaaaaagagaaaccaggttctgaagttttgactctcttattaaagtctttggaaagcatagtaaagtctgaagtatttcctgtatcaaaaacgctggtcctcatggaaattacaattaaaggacttcctcagaaagtattaggttcaccagcatatcaggttgctaatatggatattcttaatggaactccagctttgttcttaattcaattaattttcaacaatttcttggaatgtggtgtatcagatgaaaggttctttctcagtttggaatcacttgtaggctgtgttctttctggtccaacttcaccactagctttcagtgactcagttttaaatgttattaatcaaaatgcaaagcagttggaaaataaggagcatctctggaaaatgtggagtgttatagtcaccccattaactgaattgattaatcagaccaatgaagtaaatcaaggtgatgccttagaacataattttagtgccatctatggtgcattgactttaccagtaaaccacattttttcagaacagagatttccagtggccaccatgaagactttgcttagaacttggtcagaattatatagagcatttgctcgttgtgctgctttggtggcaacagcagaagagaacttgtgctgtgaggaactttcttccaagataatgtccagtttggaagatgaaggcttttctaatttgttgttcgtggatagaattatttatattattactgtaatggttgattgcattgacttctcaccatataatattaaatatcagcccaaagttaaatcaccacagagaccttcagattggtccaaaaagaagaatgagcccctagggaaattgacttctttatttaaacttattgtgaaagtgatctattctttccacacactgagcttcaaggaagcacattctgataccctcttcactattggcaactcaatcaccggcattatttccagtgtacttgggcatatttctttgccttctatgatccgaaaaatatttgcaactttaacaagacctctggcattattttatgaaaactcaaagcttgatgaagttcctaaagtatatagttgtctgaacaacaagttagaaaagctactgggagaaattattgcttgtctgcaattcagctacaccggaacttatgatagtgaacttcttgaacaactctccccactattatgcataatatttctgcacaagaataaacagattcgaaaacagagtgctcagttctggaatgccacttttgccaaagtgatgatgttggtttatcctgaagagttaaaaccagtactaacacaagccaaacaaaaatttctgctcctgttgcctggtttggaaactgttgaaatgatggaggaatccagtggaccatattctgatggaacagaaaattcacaactaaatgtgaagataagtggcatggagagaaaatcaaatggaaaaagagattcatttttggcacaaacaaag

SEQ ID NO: 17331 - protein, 838 aa, Homo sapiens
MGEEAVRWAKLVIPLVVHSAQKVHLRGATALEMGMPLLLQKQQEIASITEQLMTTKLISELQKLFMSKNETYVLKLWPLFVKLLGRTLHRSGSFINSLLQLEELGFRSGAPMIKKIAFIAWKSLIDNFALNPDILCSAKRLKLLMQPLSSIHVRTETLALTKLEVWWYLLMRLGPHLPANFEQVCVPLIQSTISIDSNASPQGNSCHVATSPGLNPMTPVHKGASSPYGAPGTPRMNLSSNLGGMATIPSIQLLGLEMLLHFLLGPEALSFAKQNKLVLSLEPLEHPLISSPSFFSKHANTLITAVHDSFVAVGKDAPDVVVSAIWKELISLVKSVTESGNKKEKPGSEVLTLLLKSLESIVKSEVFPVSKTLVLMEITIKGLPQKVLGSPAYQVANMDILNGTPALFLIQLIFNNFLECGVSDERFFLSLESLVGCVLSGPTSPLAFSDSVLNVINQNAKQLENKEHLWKMWSVIVTPLTELINQTNEVNQGDALEHNFSAIYGALTLPVNHIFSEQRFPVATMKTLLRTWSELYRAFARCAALVATAEENLCCEELSSKIMSSLEDEGFSNLLFVDRIIYIITVMVDCIDFSPYNIKYQPKVKSPQRPSDWSKKKNEPLGKLTSLFKLIVKVIYSFHTLSFKEAHSDTLFTIGNSITGIISSVLGHISLPSMIRKIFATLTRPLALFYENSKLDEVPKVYSCLNNKLEKLLGEIIACLQFSYTGTYDSELLEQLSPLLCIIFLHKNKQIRKQSAQFWNATFAKVMMLVYPEELKPVLTQAKQKFLLLLPGLETVEMMEESSGPYSDGTENSQLNVKISGMERKSNGKRDSFLAQTK

SEQ ID NO: 17332 - DNA, 3652 bp, Homo sapiens
  CDS (119)..(3169)
ggagcccctcagcggcggcggggtctgtgagttggtcgcggggtcttggcggggaatggaggtagaataaacgtgggacccggagtgcaccaaggtgagaaaaaaaaaattactaaaaatgacaagtagaagacttgaggagtccatgggggctgttcagatgggattggtcaatatgttcaaaggatttcaaagcaaggttttgccacccctgagtccaaaggtggttacagaagaagaagtaaaccgaatgcttacaccctcagagttcctgaaggaaatgtccctgaccaccgagcagagactggcaaaaacacgtttgatgtgccgaccacagatcatcgaactcttagatatgggggaaacaacacatcagaagttttcaggaattgacctggatcaggcattattccagccctttccatcagaaattatatttcagaactacactccctgtgaagtctatgaagttccactgattttgaggaacaatgacaaaattccaaggttggtgaaagttgtggaagaaagttcgccttactttaaagtaatcagccccaaagatattggccacaaagtggctcctggagtgccttccatattccgaatcctctttactccagaggagaacaaggattacgcccatacgttgacctgtgttactgaaagagaaaagtttattgtacccatcaaagctagaggggcacgagccattctcgattttcctgacaagctgaatttttccacttgtcctgtcaaatacagcacccagaagattctgctggtacgaaacattggcaacaaaaatgctgtatttcacatcaaaacttgtaggcctttctctatagaaccagctattggaactcttaatgtgggagagtccatgcaactggaagtggagtttgagccacagagtgtgggcgatcacagtggaagacttatcgtgtgttatgacacaggtgaaaaggtgtttgtatctctctatggagctgccatagacatgaatataaggccggataagaattccttgaccatcgagaaaacctacatatctctggccaatcagcgaactataaccattcacaatcgcagtaatatcattgcccatttcctgtggaaggtatttgctacccagcaagaagaggacagagaaaaatatagggcctgtgatgatctgatcaaagaggagaaggacgagactgatgagttttttgaagagtgcattactgatcctttactccgagaacatctttctgttctatcccgaacctttgcgaatcagaggaggctggtgcagggagacagcaagctgttcttcaataacgttttcactgtggagcccctggaaggtgatgtctggcccaactcatcagctgaaatcaccgtgtactttaacccactagaagccaagctctatcaacagaccatttactgcgacattttaggccgagaaatccgtctgcccctccgaatcaaaggggaaggcatgggacctacgattcacttcaactttgaattgctggatattgggaaagttttcactggatctgcacattgttatgaggcgatactgtacaacaaaggcagcatcgatgctctcttcaacatgacccctccaacttcagctttgggggcctgctttgttttcagtcccaaggaaggcatcattgaaccaagtggagtccaagctatccagatctccttcagctctaccatcctgggaaactttgaagaagagttcctggtcaatgtcaatgggtcacctgagcctgtgaaactgaccattagaggctgtgtcattggacctaccttccattttaatgttccagctctgcactttggtgatgtttcctttgggtttcctcataccttgatatgttccctcaataatacctctttgatccccatgacttacaaactgcgtatccctggggatggccttggccataaaagcatttcatattgtgagcagcatgtggactacaaaagaccatcttggaccaaggaagaaatatcctcaatgaaaccaaaagaattcaccatctctcctgactgtggcaccattcgcccccagggatttgctgctatcagggtgacattatgctccaacactgtgcagaaatacgagctggcactcgtggtggacgtggagggcatcggagaagaggtgctggcgctcttaattacagcaaggtgtgttgtacctgccctccacctggtcaatacagaggtggactttgggcactgcttcctgaagtacccgtatgagaaaacactccagcttgccaatcaagatgacctcccaggattctatgaggtccagcctcaggtgtgtgaggaggtgcctactgtgctgttttccagccccacccccagcggggtcatctccccaagcagcaccatccacataccactggtcctggagacccaggtcactggagaacacagatccacggtttacatctcaatctttgggagccaggacccccctttggtatgtcacttaaagagcgctggagaaggcccagttatctacgtccatcccaatcaagtggacttcgggaatatctacgtcctaaaagactcttccaggattctcaacctatgcaaccagtccttcattcccgcatttttccaggcacacatggcacacaaaaaatccctttggacgattgaacccaatgaaggcatggttcctccagaaactgatgttcaactggcactgaccgccaacctgaatgacacactgacattcaaggactgtgttattttggacattgaaaatagcagtacctatcggattcctgttcaggcttccggaactggttccactattgtttcagataagccctttgctccagaactcaatttgggggcacattttagcctggatacccactattaccactttaagttgatcaacaagggacgtcggatccaacagttgttctggatgaatgatagcttccgaccccaggccaagctgagtaagaagggccgggttaagaagggacatgctcatgtccaaccccagcccagtggctctcaggagcccagggatccacagagccccgtgtttcatctccaccccgccagcatggagctgtacccaggccaggcaattgatgtgatactcgaaggctattctgctactcccagggtaaggggatagcacatttggaagctattgttttttcctaaataaatctctactgtatctatttcttaggaaagtcccttgacatttatctgaggaaggatatggtttctcaaggattgtgtacaatcctgagttaccatagtagcatccgttgctttcggggtgcagctctgctcagtcttcaatttgtttctgtagctactgtgaacccaatcttaaaggaggttctcatgcccagggtccacagtgaccagccagcaagtctctggtagaaaaacacccagtttttagccaaagcaaattctcctattaacacttagcaggatgaatttaatattcattcaaaaagggtgtttatatcgacactctgggctgcctctcctattcaggtattgggacatccctgttcctttctttccagcctgactgcaactcacatttcgaaacatcttctttttatgcattaataaaagagccacatttatcttcagc

SEQ ID NO: 17333 - protein, 1017 aa, Homo sapiens
MTSRRLEESMGAVQMGLVNMFKGFQSKVLPPLSPKVVTEEEVNRMLTPSEFLKEMSLTTEQRLAKTRLMCRPQIIELLDMGETTHQKFSGIDLDQALFQPFPSEIIFQNYTPCEVYEVPLILRNNDKIPRLVKVVEESSPYFKVISPKDIGHKVAPGVPSIFRILFTPEENKDYAHTLTCVTEREKFIVPIKARGARAILDFPDKLNFSTCPVKYSTQKILLVRNIGNKNAVFHIKTCRPFSIEPAIGTLNVGESMQLEVEFEPQSVGDHSGRLIVCYDTGEKVFVSLYGAAIDMNIRPDKNSLTIEKTYISLANQRTITIHNRSNIIAHFLWKVFATQQEEDREKYRACDDLIKEEKDETDEFFEECITDPLLREHLSVLSRTFANQRRLVQGDSKLFFNNVFTVEPLEGDVWPNSSAEITVYFNPLEAKLYQQTIYCDILGREIRLPLRIKGEGMGPTIHFNFELLDIGKVFTGSAHCYEAILYNKGSIDALFNMTPPTSALGACFVFSPKEGIIEPSGVQAIQISFSSTILGNFEEEFLVNVNGSPEPVKLTIRGCVIGPTFHFNVPALHFGDVSFGFPHTLICSLNNTSLIPMTYKLRIPGDGLGHKSISYCEQHVDYKRPSWTKEEISSMKPKEFTISPDCGTIRPQGFAAIRVTLCSNTVQKYELALVVDVEGIGEEVLALLITARCVVPALHLVNTEVDFGHCFLKYPYEKTLQLANQDDLPGFYEVQPQVCEEVPTVLFSSPTPSGVISPSSTIHIPLVLETQVTGEHRSTVYISIFGSQDPPLVCHLKSAGEGPVIYVHPNQVDFGNIYVLKDSSRILNLCNQSFIPAFFQAHMAHKKSLWTIEPNEGMVPPETDVQLALTANLNDTLTFKDCVILDIENSSTYRIPVQASGTGSTIVSDKPFAPELNLGAHFSLDTHYYHFKLINKGRRIQQLFWMNDSFRPQAKLSKKGRVKKGHAHVQPQPSGSQEPRDPQSPVFHLHPASMELYPGQAIDVILEGYSATPRVRG

SEQ ID NO: 17334 - DNA, 2642 bp, Homo sapiens
  CDS (44)..(751)
aaaaatctatgattcagcttttcatcctgacactggtgagaagatgattttgataggaagaatgtcagcccaggttcccatgaacatgaccatcacaggttgtatgatgacgttttacaggactacgccggctgtgctgttctggcagtggattaaccagtccttcaatgccgtcgtcaattacaccaacagaagtggagacgcacccctcactgtcaatgagttgggaacagcttacgtttctgcaacaactggtgccgtagcaacagctctaggactcaatgcattgaccaagcatgtctcaccactgataggacgttttgttccctttgctgccgtagctgctgctaattgcattaatattccattaatgaggcaaagggaactcaaagttggcattcccgtcacggatgagaatgggaaccgcttgggggagtcggcgaacgctgcgaaacaagccatcacgcaagttgtcgtgtccaggattctcatggcagcccctggcatggccatccctccattcattatgaacactttggaaaagaaagcctttttgaagaggttcccatggatgagtgcacccattcaagttgggttagttggcttctgtttggtgtttgctacacccctgtgttgtgccctgtttcctcagaaaagttccatgtctgtgacaagcttggaggccgagttgcaagctaagatccaagagagccatcctgaattgcgacgcgtgtacttcaataagggattgtaaagcagggaggaaacctctgcagctcattctgccactgcaaagctggtgtagccatgctggtgagaaaaatcctgttcaacctgggttctcccagttacggaaaccttttaaagatccacattagccttttagaataaagctgctactttaacagagcacctggcgtgggccaagtgcctgatactcccttacactgaatcatgttatgatttatagaaatacctttcctgtagcttttatagtcattgtttttcaaagacgatataccagccctcacccaggttttaaaaaagcactggtaggcatagaataggtgctcagtatatggtcagtaaatgttctattgattatcaatcagtgaaaaaagaaatctgtttaaaatactgaattttcatctcactcccattgcaaatcaaggagatctcagcagtgaactgggaaaatacaaaagctctgggctaatctataaaaacttaccctgaaatattaagggcagtttgcttctagtttggggattgcgctagcccaatgaaggtgatgaagcttttggatttggagggtaaaagctccttcacaccccttccaaaagtcagtcacagaccactgcaacatgccttccctgctggatcattatatacattcagattgtgagtggattgccttggttgacttttaatttattgttttttgttcttataaagatgataatcttaccttgcagttattgactttatattcaattatttacatcaaataatgaaataactgaaatgtacaaatgtcaaattttggaagtatattcaataccaatgctgtatgagtgggctgaatccagttcattgttttttttttggtaagaagtgagactacagttccagctacctacatgtcttttcttgtcatccttatagatctctttggctttcagaaagatacagtgataatgtgtgtatgaatcagtcacaatgaattttacttgaatattgtatgttgcattccacttcatttgaaaataatgaaaccatgtaccactgtttacatcatctgtagtgatttcatagataatatatttaatatgacagattatgtttcaactctgtagatgtttaacgtcatagacagttggccctctgtatccgtgagctctatatctgtgaattcaaccaagtttggatggaaaattttttttttttttttttttttttttgagacggagtctcgctctgtcacccaggctggagtgcagtggcgtagtctcggctcactgcaagccccgcctcctgggttcacgccgttctcctgcctcagcctctctgagaagctgggactacaggcgcccgccaccacgcccggctaatttttttgtatttttagtagagacggggtttcactgtggtctcgatctcctgacctcgtgatccgcccgccttggcctcccaaggtgctgggattacaagcgtgagccaccgcacccggcctgaaaatattttctaaaaagataaaaaatatacataacgatgaaaaataatacaaatttaaaaaccaatacagtataacaactatttacatagtgcttacattgtattaggtgttataagcaatctagagatgatttagcaagtatacaggaggatgtgcctaggttatatgcaaatactgtgccattttatatcaggaacttgagcatctgcagatattggtatcggagggcggtcctggaaccaagcatccacggatactgaggggtgacatttcatgaagtgtagatcattgtattcagagattgtaaatgaaaaaaatatagaaactatttagttttggtagattttttttctgacaatgtgaccagactgaatttcctcataaagaaaaaatggcgtgccttgtg

SEQ ID NO: 17335 - protein, 236 aa, Homo sapiens
MILIGRMSAQVPMNMTITGCMMTFYRTTPAVLFWQWINQSFNAVVNYTNRSGDAPLTVNELGTAYVSATTGAVATALGLNALTKHVSPLIGRFVPFAAVAAANCINIPLMRQRELKVGIPVTDENGNRLGESANAAKQAITQVVVSRILMAAPGMAIPPFIMNTLEKKAFLKRFPWMSAPIQVGLVGFCLVFATPLCCALFPQKSSMSVTSLEAELQAKIQESHPELRRVYFNKGL

SEQ ID NO: 17336 - DNA, 2852 bp, Homo sapiens
  CDS (314)..(736)
actcttggcgccttcgcggaaggtgcgtccgagccatggccgctgccaacccgtgggacccggcgtccgcgcctaacggcgctgggctagtgctaggccacttcatagcttcggggatggtcaatcagaaaaacctggaaattgaactcctgaaactagaaaaagatacagcagatgttgttcatcctttctttttggagatgaagtcttgctatgttgcccaggctggtctcgaactcatggcctcaattctcccgtttcagtctcccaaaacactgcgattacagctcagaagtgtcatactctgcaaagcatgaataatcatttggaagcagtgctgaaagagaagagatcccttaggcaaagactgttgaaacccatgtgccaggaaaacttacctattgaagctgtttatcacagatatatggtacatttgctggagttggctgtgactttcattgagagattagaaacccaccttgaaacaattagaaatattcctcatttagctgcaaatctaaagaaaatgaaccaggctttagcaaagatggatatattggtgactgagacagaagaactggcagagaatatactcaagtggcgtaaacaacaaaacgaagtttcgtcttgtatccccaaaatattagctgaagaaagttatctttataaacatgatattataatgcctcctttaccttttacttctaaagttcatgtccaaactattaatgccaagtagtcatcaactttatttttgcttaattatgtgtagtcatatgaagtctatttctagttgactgtaacatgggtattaatagtctttgctgctggtaatactgaaagaacctgctttatattggagtatcaagatctcaggttcattaagaccaaactgacttttcctttgtttttcatatatttttattctacctttcagtaaaactagagaagctaaaaaagagccatgacaatttattaatataagtgaattaaccatttctcaggtgggaaattctctttttttaaaaatgtgtgtttatcgtctggtgtggtggctcacacctgtaatcctaacacttggggaggctgaggcgggcagatcacttaaacccaggagttcgagaccagcctgggtaacatggtgaaatcccatatctacaaaataaacaaaaaattagccgaccatggtggtgcatgcctgtagtcccagctattcgggaggctgaggtaagaggatcacctaagcctgtgaggtcatggttgcaatgagtcatgatcacgccactgcgctacagcctgggcgacacagtaagaccctgtctcaaaaaaaagaagtgtgtttctggccaggcacggtggctcacgcctgtaatcccagcactttgggaggcctaggtgggcagatcatgaggtcaggagttcgagaccagcctggccaacatggcgaaacacctgtctctactaaaaatacaaaaattaggccgggcgcagtggctcacacctgtaatcccaacactttgggaggccgacccagatgggtggatcacctgaggtcaggagtttgagaccagccttgacaacatggtgaaaccccatctctggtagaaatataaaaaattaaccgggcatggtggtggacgcctgtaatcccagctacttgggaggctgaggcagaataatcgcttgaacccaggaggcagaggttgcagtaagccaagatcgtgcctctgcactccaacctgggtgatggagcaagactccatctccaaaaaaataaaaaatacaaaaattagccaggcatggtagcatgtgcctgtaatcccagctactcaggaggctgaggcaggagaatcacttgaacccaggaggcagaggttgcagtgagcccagatcgtgccaccgcactctagcctgggcaacagagcaagactctgtcttaaaaaaaaaaaaaaaggtgtttctgaattagaagggtcttcttgaatctgaaaatgtctatgatgattattcctgtgggaatgtcactaagtatgcagaaaagagtaacacagccagcctgacttatcctttgaaaggcctgattataaggtttgtcctcagctgttgcatctgggaacttagatatcagaaggtatcttagtctgttctgctgtcataacagaattacacaaactaagtattttataatgaacagaagtttatttggttgacaggtgtggaggctaggcagtccaagaacatggtgccagcatctagtgagggtcttgccatggcagaaggcaccacatggcaagtgagcatgagaaagatatatgggtctaaacttagccttttatcatgagcccactcccaagatagcagcactaattcattaatgagggcaaagccctccttacctaattactttttaaaggtctcataacacttttacaatgtcaattaaatttccaacacttgaactttgggggacatatttaaaccttaacaggagggctccactcactgaaaagagtcgttcatggtagctaacctgtggtttgtgctgaaaacctgctttcttcctgggagtctagaattttggtacatggtaggtagaaggtacctacgtgaccagcccccagtaaaaaccctgggcactgtatctctaacaagtttccctggtaaacaacatttctcacatgttgtcacaattcagttgctggtggaatgaaacaacagatatgtgtgactccactgttagaggactctggaagcttatacctggtttcccccagactttgcctctgtaccttttctctttgctgttttgcttcatatgcttttgctgtaataaatcatagctgtgtgatgat

SEQ ID NO: 17337 - protein, 141 aa, Homo sapiens
MNNHLEAVLKEKRSLRQRLLKPMCQENLPIEAVYHRYMVHLLELAVTFIERLETHLETIRNIPHLAANLKKMNQALAKMDILVTETEELAENILKWRKQQNEVSSCIPKILAEESYLYKHDIIMPPLPFTSKVHVQTINAK

SEQ ID NO: 17338 - DNA, 2842 bp, Homo sapiens
  CDS (645)..(2723)
ctaatacatctaatgacagtaggcatcaaaagctaaaagagatttcacaatactacataccatgagacagggctgataaattatggcccatgctgtctggttttgtacgtaaagttttattggaacacacctgtgtccattctttcatgtattgtctatggctgctgtcatgttacaactacagagttgagtagttgcaacagagactatatggcccttgaccaaaaaaagcctgccaacccctgccatgggacatattcttcagggtccctttcttaaaaatatgtataacaactcttaataatttattggctcagtgattcccaaattatgttttatagaatattaatattctctaagttaataaatgttttgagaaaatgattgatgctaatattggtttttctttatggttgattttaatatgtttatttaaatatgagattaagactgctaaactcatttctatagcttttatttttatgtgataatctacctttaagaaaaggtgtaccatacctgagagcaccaggaagtcgcatgagagatcacctgatacatgaacgtatgatgttccatctgcgcattgatgaataggcagcatttacaaattaactgatgtgttgctgtatatcatctctttgatgattgctcctcttctttgtatcctgtcttataatttcaacacatttgcgatactcaatgtctattctaaattaaccatgttttgtaccacaaactcattgcccatggatctgttgctgaaacaaggaagtcttaaacaagaagtggaatctttctgttatcagattgtgtctgaatcaaatgatcagaaggttggaatattacaaagtgaagataagcagttgcaaccttcagtttctaaaaaatcagaaggtgagctttccagggtcaaatttatatccaattccaacaaaataacatttagtaaaaaaccaaaaagaagaaaatatgatgaaagttatttgtcttttggatttacttacttcggaaatagagatgcacctcatgctcagtgtgtattatgtaagaaaattttatcaaatagctctttagcccctagtaagcttcgaagacatttggaaactaaacatgctgcatataaagacaaagacataagctttttcaagcaacatctcgattcacctgaaaataataaacccccaacacctaaaattgtgaatacagataatgaaagtgctacagaagcatcatacaatgtaagttaccatatagcgctgagtggagaggctcatactattggagaattgcttaccaaaccttgtgcaaaagatgtagtgatgcggatgtttgatgaacaatatagtaaaaaaatagatgcagtacagctatcaaacagtactgttgcacgtcgaattaaggatctagctgctgacattgaagaagagcttgtttgtagactgaaaatttgcgatgggttttcactgcaactagatgaatcagctgatgtttcaggacttgctgtgctgcttgtgtttgttcgttataggtttaataagtctattgaggaagacctactcctgtgtgaatctttgcaaagtaatgctaccggtgaagaaatattcaactgtatcaacagttttatgcagaaacatgaaattgaatgggaaaaatgtgttgatgtttgtagtgatgcttctagggcagtggatgggaaaattgccgaagctgtcaccttaataaaatatgtggctcccgaaagcaccagtagtcactgcctattatacagacatgcactggcagttaaaataatgcctacatctctaaaaaatgtgctagaccaggcagtacaaatcatcaattatattaaagctcgaccacatcaatccagactattaaaaattttatgtgaggaaatgggtgctcagcacacagcacttcttctaaatacagaggtgaggtggctttctcgaggtaaagttcttgtaagactttttgaacttcgtcgtgaacttttggttttcatggattctgcttttcgactatctgattgtttaacaaattcatcttggctgctaagacttgcatatcttgcagatatttttactaaattaaatgaagttaatttgtcaatgcaaggaaaaaatgtgaccgtttttacagtatttgataaaatgtcgtcattgttaagaaaattggaattttgggcctcatctgtagaagaagaaaactttgattgttttcctacactcagtgattttttgactgaaattaattctacagttgataaagatatttgcaatgccattgtgcagcacctaaggggtttgcgcgttactctgttaaaatactttcctgtaacaaatgacaataatgcttgggttagaaatccatttacagttactgttaaaccagcttcattagtagcacgggactatgagagcctgattgatttaacatctgattctcaagtgaagcaaaattttagtgaactttcactaaatgatttttggagtagcctaattcaggaatacccaagcattgcaaggcgtgcagtgcgtgtacttcttccttttgctacaatgcacctgtgtgaaacggggttttcatattacgctgcaacaaaaacaaaatataggaaaagacttgatgctgcacctcatatgcgaatccgacttagcaatattacacctaatattaagtggatatgtgataaaaagacacaaaaacactgttctcattaaaattggaggagtttgcatgtctcatgataaccaaatgtaagatgaaaataaaagatgatttacttcatctctggtatttgggggatttaaataaaatgattccatttttttatact

SEQ ID NO: 17339 - protein, 693 aa, Homo sapiens [sequence omitted]

SEQ ID NO: 17340 - DNA, 2645 bp, Homo sapiens
gacatatactgagtgctactttatgccagaccctgggctggcagctgtttggaggcaaagatgtatgaggccatctcaggagagactacttgttaggattcttgagttttgaccaacagaaatgaacttggaccaacttaagcaaggaaaaagcgttcatgggaaggatgctgggatagctcacaaaaccaaaagaatagctgaacaattaattggccttgggaagggtgggagctggggcaactacgaggcttgcctcccaggagctgctgcggttggcagatcaacaccaacttgccattggttctagtgggtccccttccactcaagattcaaattccaagtgaaagaacctggcctggagctcagggcttcatagagtgggaggggggcagtcttccaaaagatgcggactcttgccacatggaatggtggagtacggaagggtggaaagggtttggtaggtaaaccctgaagatgcttctaacacacgtgctgttctcccatctcacgtatgacgactctcccacaggtaaccaaaaccacatttctctctgcttagggaattcaagatcatatctaacttcgaattccaggggtaatgacacggcttctattctccaaagtccagtgtcattagggataatctccctctttcagttttatcacaattccattttgaaattctacaacctgtagattaactggtaaaattaaccatattcaaccaaaattgtataacccagcaagaatggaagaatgggtaaagtctacagtccatttctagaactggtcatgagaactcatgtttatgatgatggacttttgatctggtggagggacccaaaccttcagttctgaagctcattagtggtcctacctgtgtgacaggcatttactattggactggcagtcccaggacaaactccaggaatccccccatgtccatctctactcctgccctcttttacgtagcagcaatcatattttcccttgatagggttcatcattctagatactccgatgacttctttataatgagcctgaagtggcctggtggctgcctcagcttccagttcagttgaatagctactacgtctttgaggatgtgctccttgctgggggactaaactctccacgccagcccagtcccaaacctaaacctcgggtatgagaaaagcattgagatctagcaatagcagggccatgtccacactgcgtcctatccctgaaggagaaacagcgccaggtatggttgccggctccaagcgcatgctgcctcctgcaggcctgacccagcctctcggggtgttgtttctggtgccatagttgaattttcaacaaaccatttcaccaccctctcaagacagctgctgctggtttgtgggttcctgacaagatgagtgaatgcctgcccatcaacccgttactcttcttttagctgtaaagtgaactctctggttgggttcccgtatcatattttcttgtcaggacttaccgcaagctatgtatggctccgcggtatgccacccatggaaagacacctcatgcaccattgacctgccaggtcacgtggcctgatggcagcgtcggctgcacaaaagactttcccagctgcaatgccttcgcctgctctaggcccaccccaaagctggcagccttctaggtcagttggtaaatgggttagaacaagatgccccaaagtggcataaattgcatggaattaggccttagtggcgagggattcgacatacagtcatttgtcctacattgtgaaggaaacattctgacctcaaacagatccctcaaccccagaactttatagaaggggcagaccttggcattttcacatgatttatctcccactctgattcacatatgtttgaccaaggcactgggcagctgccaatttcccgtcccttctgtagtcccagatgaatggatacagacctctttggggaaggctgcaaggaaggttcacaacatgcatctaagtgttaaaataagtttttccttcaaaaatacatttgacttcctctccatttaaggtctggaaatcaagtgggagatcttgactttaccttggcacttgagacagaactgttggcccagaagtctttagttaaggtcattactaggccatatcttaggggcgtctggcctttttcattcctgggacccacagctcgaggtctggtttccatgccctatcccttacgatgagcgccctattttgttccttctgtctatctctgttgctgagatcagggagcccacgttcacagcagctctttcaagcagcctcccaggcctagagaggaaaatcagcagagcctcatgaatgtatttctcgtggcaagaagggagctcatcttctgggtcctgccagagggcagtgagggggttgatgggctggttgcatgccagggacccaatcaagcatttttatcttctgaaatctttgaattcctgcctttcttggatgtttggtcttttgatataatttagcatgggccaacatttggtccagatttgtattagccaagccctcctaaaatagtaataacagtatctggcgatttgagcttttacgtagaatgtagaatctctggtgagtgaacatatcaataaagacaacctgaacc

SEQ ID NO: 17341 - DNA, 2975 bp, Homo sapiens
  CDS (354)..(1313)
agcgaataaatgctcagaaaggcgttttgtttcaagaggatcagattttggactggtttgtacagatatgtttggccctgaaacatgtacatgatagaaaaattcttcatcgagacattaaatctcagaacatatttttaactaaagatggaacagtacaacttggagattttggaattgctagagttcttaatagtactgtagagctggctcgaacttgcatagggaccccatactacttgtcacctgaaatctgtgaaaacaaaccttacaataataaaagtgacatttgggctctggggtgtgtcctttatgagctgtgtacacttaaacatgcttttgaagctggcagtatgaaaaacctggtactgaagataatatctggatcttttccacctgtgtctttgcattattcctatgatctccgcagtttggtgtctcagttatttaaaagaaatcctagggatagaccatcagtcaactccatattggagaaaggttttatagccaaacgcattgaaaagtttctctctcctcagcttattgcagaagaattttgtctaaaaacattttcgaagtttggatcacagcctataccagctaaaagaccagcttcaggacaaaactcgatttctgttatgcctgctcagaaaattacaaagcctgccgctaaatatggaatacctttagcatataagaaatatggagataaaaaattacacgaaaagaaaccactgcaaaaacataaacaggcccatcaaactccagagaagagagtgaatactggagaagaaaggaggaaaatatctgaggaagcagcaagaaagagaaggctggaatttattgaaaaggaaaagaaacaaaaggatcagattattagtttaatgaaggctgaacaaatgaaaaggcaagaaaaggaaaggttggaaagaataaatagggccagggaacaaggatggagaaatgtgctaagtgctggtggaagtggtgaagtaaaggctccttttctgggcagtggagggactatagctccatcatctttttcttctcgaggacagtatgaacattaccatgccatttttgaccaaatgcagcaacaaagagcagaagataatgaagctaaatggaaaagagaaatatatggtcgaggtcttccagaaagaggaattctgcctggagttcgtccaggatttccttatggggctgcaggtcatcaccattttcctgatgctgatgatattagaaaaactttgaaaagattgaaggcggtgtctaaacaagccaatgcaaacaggttggactgtgatgatccatgaattcatccatgtgtgtaattttgtcgtttgtcatacatagcttagtacctacactttgtggatgttttctccattgttcacatatgatgttttttgcctcttgggtacaataattttctgaggtgcaaatttggcccttgattactctgtgaaagcatgtagctttccagttcagcctgatttttgtgtcttgtttgtgggtttagactgaatatactatttaaaggaacatgtgataacattctgccaacataattataacattttatcacccacttcctttaaataaatcaggatataaatctaaattgaatcacactttatgcagaaccccagtgcatttttcgcccttttcttcatcacttcaaagcctacttttctctttgttgtcttagcatgctttctcttcaccttcatctctgatttataactctttgtgatcctgttcatcatattatttcttttcttccattgaattaataatggtaactgattaatatgtacttgagaagagataaatgattgaggtaaatataaattaacgtttatatacacattataaattatatacagaagcctgatatatgaagcatctattttttgagaaaggaaggttacagacttacacatatgcatattttttatgaatagtgagacaaattttgtgggaggcttttattctccagaattattgatctttctagtatatatattgtttaattagtaaactttatttttagagcgatttggggttcacagcaaaatggagtggaaagtacagagagttcctatgtaccccttcctcacacatgcacaacctctgtattgacatcctcatttgagtgataacgtttgttatgatcaaacatcgatccattatcacccaaagtccatagtttacattagagtttactcttggtattgtacactccatggcttttgacgaatgtataattataggtatccaccactgtaatatcatacgaaataatgtgactgccttcaaaatcccctgtgctccacctccctccaacctccctcccaactcttggcaaccactggttgctttactgccttcatagttttagcttttctagaatatcatatacttggaatcatatagtatgtggcctttcacactggcttttctcacttactaatatgcatttaaggtgcctccatatatcttcatagtttcataccttatttcttcttaacactaatatcccattgtatttatgtagcatacttttttttttttttttttggtaattttttttttttgagacaggttcttgttctatccccaggctggagtgcaatggcatgatcatggctcacttgcagccttgacctctggggcttaagtgaccctcccacctcagcctcctgaacagctgggactacaggtgcttgccaccatgtgtggctgattttttaaattttttgtagaatggagtcttgctatgttgcccaggctggtcttgaactcctgggttcaagcagtcctcctgcactggcctcccaaagtgctgggattacaagcatgagccaccatgcccagccagaatggatgtactacactttatccattattctactgaaggacatcttggttgcttttaagttatggcaattatgaataaagcttctacaaac

SEQ ID NO: 17342 - protein, 320 aa, Homo sapiens
MKNLVLKIISGSFPPVSLHYSYDLRSLVSQLFKRNPRDRPSVNSILEKGFIAKRIEKFLSPQLIAEEFCLKTFSKFGSQPIPAKRPASGQNSISVMPAQKITKPAAKYGIPLAYKKYGDKKLHEKKPLQKHKQAHQTPEKRVNTGEERRKISEEAARKRRLEFIEKEKKQKDQIISLMKAEQMKRQEKERLERINRAREQGWRNVLSAGGSGEVKAPFLGSGGTIAPSSFSSRGQYEHYHAIFDQMQQQRAEDNEAKWKREIYGRGLPERGILPGVRPGFPYGAAGHHHFPDADDIRKTLKRLKAVSKQANANRLDCDDP

SEQ ID NO: 17343 - DNA, 2866 bp, Homo sapiens
tcacctgggaaatacaaaaatagcccctcctgaagataaaatcattcagaaacagagcaataattctgactcattaacttctacctactcaaaaaagtctgccatgatgatggaccgaagtgaggctttttaacccacaagtaacctttttatttttttgagacagtcttgctctgtctgtcacccaggctggagtacagtggcatgatcttggctcactgcagcctcgacttcctgggctcaaatgatcctcccacctcagcctcccatgtggctggaaccacaggcacgtgccaccatgcctggctatttttttgttgagctgggctctcgctttgttgcccaggctggtcttgaactcctcggctcaagcaatccttcccactcagcctcctgtagtgtcgagaatataggcgtgggctactacacctgcttcagccgcttctataaaaccgctgacctgtgtgtggaggacaggccaggtgtgtgctcactgcgctgcgaagatgttttgtcacgtgactttccccggatttccatttctttttttctgcttccctcaaaaactaatagaagactgggtgcggtggctcacgcctctaatcgcagcactttgggaggcagcagctggcggatcacaaggccaggagttcgagaccagcctggccaacatgatgaaaccctgtctctaccaaaaatacaaaaattagctgggtgcgatggtgggtgcctgtaatcccagatactcaggaggctgaggcaggagaattgtttgaaccccggagatggaggttgcagtgagccaagatcgtgccattgcactccagcctgggcaacagggcaagattccgtctcaaaaacaaacactattagaaaatgccctggaggtggcggggagttgttgatttgtgaggacagattgaaagcaactcccagggtggccttgtccacctccccgtcgagaatgtggctgccggcctctttgaagattgtggtctggcataaggagaggtgcaggcgcctggttctgagcaccttggaatttccagccgcacagcatctggtgccctcccctccaccctcacaaggagctgccatcctgtttggattttctgtttgtggaccagaaacaaacgtttttccaaaggattagcaaatagggtaatttcctgtgtaacgctgctctggggcctcttcctcatcctggcagaaggagcctggagcccatgaggcagccagcactgtgcccttgctcagtcgtgctgtcccctccctctccctcagtctcctctccatgcccaagtcagtttccagccgctggtcttcatggcattcccagcacagccgggcaccaagaggcaaaacccaaggcctggcttggccgtgttaacgattgtacagacattttttaaaataactttgtgtaatacttttctggaatagtaagttcttgttgaactgtcacaggtgagcttctaggaacacaccaggtgtggttacttccactgggtgtgtccatggtcgtggtctgtgcttttgtaaacgaacagaacacttgaaccacctcccgaattgggtcatcggcttctttacgttgatacttaagagatttgcagctctctttcaaggaaacttcccctactgaaaggcataaaaaggttaaaaaagaaaatccgagagtcccaattccctgtataacagcattaaaataatctgcctgcctggaaagatgagaacactgttgcacaacccaaaatgtgtctttaatttgtgaaaaattaccatggtgagtcagacagtcattttaaacagctgaacagagactatcatcagcaaatagagctcagctttgtagctgcctttaaaatccttgtcccaaatccggtgagctctgcttgctgccgccgcgctcctgggtgatcactcagacgggtcagtgggaataacaggccaacaagacagctttttacatgtgtccaaaggatggcctttcgaaggcctggaagtatttcactgttggaagaagtaaacaagaatgacattccagatggaaatagaattctctctcttgcctttgaccaacatggtactaaggggtttcttctttcccaatgtatgtacgtgccctgctgggggccttactttatagaatgagagcatccgagcttccctaatgaatctggctagttctgtgtctggctgaggatacaggagtgggacatccactctcggatccctcagagcacagaaaccttcagctttgctgtctctgaagtatttcctccagtttccctgcgggcccctatgtttgagtttgatggctgctggatcctcactcaacgaaaactcggttggaaactgttccgcctggcagtcctttttttgttgttttccatctcatttcccttccatctgaaagtggcattcagctgacttgctcatttagactgttcacggagtctgaatctgccaacgtggtgttggaggctccaccttgaaaagggccacagtcagggcaactttccccatacaggaaaacttgaaaattacatcaacagtctacgtcacagccaaattatatttcctttataccaaacaaaactatggagaactaaaagtacatcacacaaaacgtttatagtgttttgcatgtgacctatttcagtatttatataactagattagtgctttctagcaaacggttctgttaattagcgagtcactgttgattctgctgtggtggtaagttgataccgtgtaactaatcccgtggatgcctcctcgttatttttgtccaaacgaagcagccgtggtagtagctgtctatgattcttgctcagcaaagtaaaataaatgttaaatatgg

SEQ ID NO: 17344 - DNA, 2000 bp, Homo sapiens
tctattttttggctattataaacaatgctgccgtgaacatttgtgtccaactttttgtgtggacacgttttcatttctcttggatacacactagcagtggaattgctgggtcatacagtaactctatgttactttttgaagaaatgccagacagttttccaaagtggctgcaccattttacattcccaccagcatatatgagggttctagtttctccacatcatctctaatacttgttgttgtttatctttttgattatagccatcctagtaagtttgaagaggtatctcactgtggttttgatttgcaatttcctaaccatttgatgacaaatgatgttaagcatcttttcatgcacatattttctttggaggtttgcctattcaggtcttttgcccattttaaaattgggtttatctttttttttttttgagatggagtctcgctctgtcacccaagcaggagtgcaatggtgcaatctcggctcactgcaacctccgcctcccaggttcaagtgattctcctgccccagcctcctgagtagctggattacaggtgcccaccactacactggctaatttttgtatttttagtagagacgggtcttaccatgttggccaggctggtcttgaactcctgacctcaggtgatccacccaccttggcctttccaaagtgttgggattacaggcatgagccactgcacccggctgggtttatgtttttatattgagttgtaggagtactttattcattttagctagaagtactttattcattttagcttatcagctacatgatttgcaaaaattttctctcattctgtggattgtcttctcactttgttgatggtatcctttgaaccacaaaagttttaaattttgatgatgtccagttagtctatgttttattttgttgtttgtgcttttggtgtcatatctaagaaatcgttgcctcatccaaggtcatgaagatttacctctatattttcttctaaagattttatggttttagctcttacatttaggtctttggtccattttgatttaatttttatataaggtgtgaggtaagggtccagcttcattcttttgcacgtggatattgagttgtgccggcactatttgttaaggctgttttcctctgtttaatcatcttaaccctttttggaaattaattgaccataaatgtgagtgcttatttctggactctcatttctataccattgaactataatatatatctgcccttacgccagtaccacactaattactatagcttcatagtatttgaaatcaggaaactaacttttgttctttttcaatattgttttggttattgcaagtctcttgaatttccatataaattttacgatcagcttgtctgtttctgcaaaaaaaaaacaacaacaactggggattttggtagggatttcattgaatctgtagatcattggccacttgattttaaacaaaatattgagatatctacttcttgaaatgattgcttgagacagtacctgtgtactccttgctatgaaaaatgaggaagttaacatactcatcttccacctttccttttccttactttttttgttgaagtatcattgtggacactttcccagttgacttccacttgatcccctgaattaactaactggcactggcgtttcctttgtaaaatgtacaatgtcagccaccatcttgctactaaagtgtggcctgtggaccacaacatggggggaatctcaggtctcacctcagacttgctgggtcagaacctgagttttgagaggctctgggcaaccggcacctctcagacctgctgttgggttctcatcgatggacccgatgcttcctagcaaatgatacctgttgtatgtgttattggtaataacatagtttacttagctattacattaattaataaaacatgagcgctgaaagagttgtttctgtgaaaataagctgattgctttaaaaagataagagacaaatcacc

SEQ ID NO: 17345 - DNA, 2160 bp, Homo sapiens
  CDS (197)..(496)
gtctttctctgtctcggctgaggcagccatctttctcttgccgcgtgctggtgttggaggaccctccctgcttcagggtacagctcgcagaaagaagaaggtggtacatagaacagccacagctgatgacaaaaagcttcagagttctctaaaaaaactggctgtgaataatatagctggtattgaagaggtgaacatgattaaagatgatgggacagttattcatttcaacaatcccaaagtccaagcttccctttctgctaatacctttgcaattactggtcatgcagaagccaaaccaatcacagaaatgcttcctggaatattaagtcagcttggtgctgacagtttaacaagccttaggaagttagctgaacagttcccacggcaagtcttggacagtaaagcaccaaaaccagaagacattgatgaggaagatgatgatgttccagatcttgtagaaaattttgatgaggcatcaaagaatgaagctaactaaaagtttggtttttggaagctggcatggactagatttaacaaatcagctatgtggttccaaagttttacagacatggagaacatcacctgttactagttcagtaatataaatattttgtatattaataatgctgtttgttcagcatttttcggtcatttgattttgcattttgcacttcctcccaggatatttttttggtcaaaatatgaagtattggtgcagtttgagggtgttttggtttttgattcctggtttttttgttttttgtttggggtatttttggtgtatgtatgtttatgtatgtgtgtgggtatgtgtgtatacagtggagagcaaattggaaaacagttctatttatcctcctccctccccagtagaaataaaaaaaaatctttacatttgttacttttcttttccccccgtaagacacagaattaatggaaagtgagtatcttggatttcaaatctgaagagatttttaccattagtggtttgattttaatttgcttggttaactatcatatttttcatacacttctctggatttaaaatatcttgaggtattttgccactggcttcatgctggagtaatgggtaacatatctttggtatggttgccttagattaacttacctagtcagacccagaagaacttcttttactagcttgcttcctaaatgccttttttcctctccttttggtctccaaatggcctggtcagcttttggtaatattcttcctcatcttccacctagcttgagaaggatgttctccatatagagtttagcgagtgcctaatccctccttttgtaagattttgttccctcagcttgaggaacaacttcatcttcaactttttatttctccctgatgttacagtttggtagatttcaaactggaatagctagcatgtgcttgctaaataattttatgccagccttatcctgtatcctagctgttcttaacagcaggtacaaaaatgcctgtttttcagcaaggttgaaattgggaatgtccttttgaatcagaagaaaataggccatagactcatctcccagcacaaatgggcattctatgaaatggtactggccctaggaggatttcctcaaccactctcctactcttggccttgaacctacctctgggttggatcttactattgtagctgctcactataccctcctgcatgcttagaataatgctttgaggggagcactggtaaaacacagtatttatttttttacctcctttaagaggacttggaggtaagttgcattcattcactcaagtttccctcttgctgtctaatagaagcttactttttgctatatcagcatttgttacagccaatatttaaggacaaaatttagaaaatatatcatttcctggcccatcatcaaactaatacagcttaaccttgcagctaccaacttttgtgtcaagctagatatctttatttgatatctaaggtgcaagaccaacaatatattaagagatctgtagacatgaaggcaaagctcttgtattttttttcatccaaacacctcaatttattttataaattcgttcatttttcctgttatgttttatataatatatggactaaacaaaataaaataacagtgcaaaagaggagaatatttcctcttgtgcttttcttg

SEQ ID NO: 17346 - protein, 100 aa, Homo sapiens
MIKDDGTVIHFNNPKVQASLSANTFAITGHAEAKPITEMLPGILSQLGADSLTSLRKLAEQFPRQVLDSKAPKPEDIDEEDDDVPDLVENFDEASKNEAN

SEQ ID NO: 17347 - DNA, 2847 bp, Homo sapiens
  CDS (53)..(1858)
acctttaagcgtcacgggtggggctgcagcttctggacctaggactttgaacatgtcgcgcctgaagcggatagcggggcaggatctccgcgctggtttcaaagcaggtggaagagactgcggtacctcggtaccccaagggctgttgaaggcagcgaggaagagcggccagttaaacctgtcgggtagaaacctcagtgaagtgccgcagtgtgtctggagaataaatgtggatatccctgaggaagctaatcagaatctttcgtttggtgctactgaaagatggtgggagcagacagatttgaccaaactaataatatcaaacaataaacttcagtcacttacagatgacctgcgactcttgcctgcactgactgttcttgatatacatgataatcagttgacatcccttccttctgctataagagagctagaaaatcttcagaaacttaatgtcagccataataaactgaaaatactccctgaagaaattacaaacctaagaaacctgaagtgcctgtatctccagcataatgaattaacctgcatatcagagggatttgaacaactttccaatttagaagatttagatctttcaaacaatcatcttacaactgttcctgctagtttttcttctctgtccagtctggtgcgactcaatctttctagtaatgaactgaagagtttgccagcagaaataaatagaatgaaaaggttgaagcatttggattgtaattcaaatctcttggaaactatacctcctgaattggctggcatggaatcactagaattgctttatttgcggaggaataaattacgttttctaccagaatttccttcttgtagtctattgaaggaattgcacgtaggtgaaaaccagattgaaatgttagaggcagaacatcttaaacatctgaattcaattcttgtgctagacctgagggataacaagttaaaatctgttccagatgaaattatactactacggtccttggaaaggcttgacctaagcaacaatgatattagtagtcttccctattcattggggaaccttcatttgaaatttttggcattagaaggaaatcctttgagaacaattcgaagagaaattataagtaaaggaacacaagaagtcctaaaatatctacgaagcaagatcaaagatgatggacctagccaaagtgagtctgctactgagactgccatgacactaccaagtgaatccagagtcaatatacatgccatcattacattaaaaatattagactatagtgataaacaagcaactttgattcctgatgaggtgtttgatgcagtaaaaagcaacatcgtcacttctattaacttcagtaagaatcaactatgtgaaattccaaaaaggatggtagaactgaaggaaatggtttctgatgtcgatctcagttttaataaactttcctttatatccttggagttatgtgtgcttcagaaattgacttttttagatctcaggaacaattttttaaattctttgccagaagaaatggaatcactggtaagactgcaaacgatcaatctttcctttaataggtttaaaatgctacctgaagttctatatcgtatcttcacacttgaaacaattctgattagtaataatcaggttggatctgtggaccctcagaaaatgaagatgatggaaaatctgaccacgttggaccttcaaaataatgacctcttacaaattccaccagagctcggtaattgtgtaaacttaagaacattactattggatggaaatccattccgagttcctcgagcagccatattaatgaaaggaacagctgctatacttgaatatttgagagaccgaattcctacttaacatggagttgctttataacccttgtcatgtattattaaccctggttaattctaaggaggatgtaacatttgttttagtatcatcttaaaaggtgattattgtaattgatcttgtagtttcccagtatcacctacccgttggtataattagcctgggccatattcactgccagtaaatatttttacatttttatttaagatttttgtaaggtgttgtgtacatttgtaatggtgataaccacaatgtgttcatacatttgttctaaatgttttgcttatgatttatcctgctaactttcattttcttatagcaagcagttttttcaaaaatgaatttttatttaatgtggttcagtattataataacaaagcatttttgtagaactggttttttttctcatttatttttgtattccatacaatgtgaccaattgacttgaatatgactagccagtttctatgtttttgttagatataaaattaaatcgaattttgttgaatactgttctttggcatttaaaaaataagaccttcttatcttgggccacatgtcaaaagaaaaaggaaacaaaaatatattaaaaataagacttttcattacccatgataggacttttgtgatatggctaatctcagtacacatttcaacttaaaacctttttatttacagcaccataattttaaaatttacttgcaatcttggtaagactaaacttgcagtgtttttctaaaagggaatttgataggtaaacttgatttaataaaaattaaatatcatttttgtttacaccaaaattatcagaagtaggttgattagtcattataacacttaccatatgattctattaagaagtcaattcagtagcatgtatatcaatttatatagataggtagatagcttttggatgattgaggcatgcttatattatgaaaaaaattgctaataaagataaatactacatgttcagaataaaagttacatttttc

SEQ ID NO: 17348 - protein, 602 aa, Homo sapiens
MSRLKRIAGQDLRAGFKAGGRDCGTSVPQGLLKAARKSGQLNLSGRNLSEVPQCVWRINVDIPEEANQNLSFGATERWWEQTDLTKLIISNNKLQSLTDDLRLLPALTVLDIHDNQLTSLPSAIRELENLQKLNVSHNKLKILPEEITNLRNLKCLYLQHNELTCISEGFEQLSNLEDLDLSNNHLTTVPASFSSLSSLVRLNLSSNELKSLPAEINRMKRLKHLDCNSNLLETIPPELAGMESLELLYLRRNKLRFLPEFPSCSLLKELHVGENQIEMLEAEHLKHLNSILVLDLRDNKLKSVPDEIILLRSLERLDLSNNDISSLPYSLGNLHLKFLALEGNPLRTIRREIISKGTQEVLKYLRSKIKDDGPSQSESATETAMTLPSESRVNIHAIITLKILDYSDKQATLIPDEVFDAVKSNIVTSINFSKNQLCEIPKRMVELKEMVSDVDLSFNKLSFISLELCVLQKLTFLDLRNNFLNSLPEEMESLVRLQTINLSFNRFKMLPEVLYRIFTLETILISNNQVGSVDPQKMKMMENLTTLDLQNNDLLQIPPELGNCVNLRTLLLDGNPFRVPRAAILMKGTAAILEYLRDRIPT

SEQ ID NO: 17349 - DNA, 3884 bp, Homo sapiens
  CDS (378)..(806)
actgagggtggtggagcaggtagatggaaagaactctcttcccaaagacaagccgcagagccgcatcccttccccagcccctgtgttaggccgtgaggcatcttcctgccagcctgcaccagggctttcaggttttgttgcttagcacatccagggtcatgcacttcaggacaagccacctgatgcccctcggccccccagtcctgcagcctcgctggagctctccctgcagcaggaagggctgaggccaaccacaaaggggcttggggcgacatcaagggatggcagagcgagagggaagtgcagggagcctggcccagaagaccagccctgccgccgcctcctggaaggggcacacctcctgagctaagcccaggatgccgcccaagcctcggggcctcccaaggtgtcccccatgccagagtgtgtggcctctgccaggcccagggtggctccaggtggttggactcccatttcctctccccttcccaggtctttcccaagcccagagcccctgttttagttttccagtgtggggagacaggagagtggccacagagcctggttctgcgcttggtgctgctggactccaaacctggctctggagctgcagtcctggtgagggcggtggccctggggaagatgagctccccaacacttgttacggcagtttccagtcacaagccgcaaggacacagtctcaaaggagcatcagatggggttgggggcatgtggggtggccctggctctcccaggtggggtcctgccaggccaagagctatgctaagtggggcccaccatggccataggcccctccgtgtcacctggcataatcagctggtagaaacagcccttggggactacatcacctgacctgatctccaggttccaggtaccatttcttactgccccccagctgcactgtgcccctgtccacaggtcatgtgactgggtgtcgggcacggttcccttgcagcaatgaacagtacatctgtggatgaaggtgggcagatagagggttggcggggggtggagcggggcactgatcatggcagcctgctgtggccagccccaagggcttcccggtgacttctcagagcctgaatgtctcccctggacaggtgggatcgaggggatgccatgaaggtgggcatgagggggaatctcgccaggggtacagtgcgtctacactgcttttcagactagttccacgcaggcactaggtctcactggctgaggggcagcctctgtccccaggcgccgcgacttgccccatctgctgcagaggaggcccacctgtggtgagcattgtggtcttggggcctgcaggcgcccttgtggagttaccatggtgaccgcagccccttggactggtgctggggattcagacaccaggtcacgtaggccttggctcgtggcatggccaagccctggggtctgtcggggttggcagggcaggcttcctggaggaggggctgaggccgcgtattctccctctcatcctgccatccgctgcggctactctccagggccacaactgtcacagaacgaggaacccgggccttgtgcagaagagccttgtgtaggtggattgagaagagagtcccagaggagaagctgagccctctgctgacttgcccccagctcatttctgcttgacctttccttgttgccgtttttgcttggaaactatattgtggacctcatcattctgggaaaggtggttcacgagaaagcacagtcatgtgtcaattaacagtgcagatgcattctgagaaatgcgttgttaggtgatttcatcatcctgcaacatcagagtgtgccccgcgctcatggatgagacagcctgccccacacccaggctgtgggggacgggatggcctgttgcttctggaccagacgcctgcacagcacattaactgtgctgaatgctgtaggcagttgtaacgcaatggtaagtgtctgtatctaaacgtagaaaaggtatagtgaaaatatgatgtaaaagagaaaacatgcttcagctgtggagggcacatgcttcagctgattggggcctgtggacaaggctgtgggtgtccgtgagggagagggagtgcctctgaggcccttctgcaggctggatgaacaacacacttaggccacactcagtttatactaaaaaaatgtcttcaataacacattcacttgagcttttttctaacttgttaattttatgaattttaaaaacatttttgactcttttttaataacagcttaaaacacacatcgtacagctgtacaaaaatatttttcctttttttattttgtttttttgagacggggtcttgttgtgtcacccaggttagagtgtagtggcgccgtctcggctcactacagtgagcctcagcctcccgggcttaattgatctcctgcctcagccccccaagtagctgggaccacaggcacgtgccaccatgttgcccaggctggtcttgaactcctggactgaagcggtcctcctgttaggggtggcgaatatttgagttgtcagtggtgaattcacatgggtctgcagcagcctcaactcttgcctccttggaagaaagaattcatctgaagagcataaggcggaaaaaggagactgaggcaagtttccgagcgggagtggaagtttattaaaaagctttagagcaggaaagaaaaagtacacttggaagagacccaagcacgcactgtggaggtggagtgcagcatttgaccttttgacttggggtcttatatattggcgtacttctggggccttgtgtcccttttcccatgatgctttccttagggtgggctgcctgcatgcacggtgccctccttgcactccggacgtgagcattcgcagtgggtttgtgaagttgtatgtatgtttgcctgaggctgcttcccttttccggtaggacgcccccagaaggtcatactctgccattttgtctcttaatgcgcttgctctagcccacttacccaattcctgagattttattggaagccgctggtgagcaatttcaagtgcctttatctattgggaaattgcctctccctggcgcctgcgaccaatgatcatttttagacagccagtgtaacaactgtgggaccatcacctcaaggactaaactgattttttatcttgcccaaattcctatctaaggggtctggggagtcctgccctgcaaatcagaaattctcatcagatgggttttatttaaccctatatattatgacttactttccaacctgaccctggcataacattacaagtcaaggaagaaaaatcaaagtagtttacctcaaaatgtgtttaaccatattttgaaatgaccctacaaagctgttttgtgtgggggaaaatttgcatctgtaaagaatctctgttaacatagctagatctttttcttccagaccctcccaatcctgaggagattaaaactctagcaccttttgaaagatctgaataggaaacagttgtcatctattgtctctaagggcagcgactattagacttcaaagaactttggtctccacaatctttatcttaacttgaacatttcctttctatcaatcccaggtcttcagacaaactcaaccaattgtcaaccagaaaatgtttaaattcacttgtagcctggaagcttccctcccctgctccgacctttgagttgtcccgcctttctggaccaaaccaatgtatttctcaaatgtatttgattgatgtctcatgcctccctaaaatacataaaaccaagctgtgccccgaccaccttgggcacatgttctcaggacctcctgaggactgtgtcatgggccatggtcactcatatttggctcagaataaatctcttcaatattttacagaaaac

SEQ ID NO: 17350 - protein, 143 aa, Homo sapiens
MPPKPRGLPRCPPCQSVWPLPGPGWLQVVGLPFPLPFPGLSQAQSPCFSFPVWGDRRVATEPGSALGAAGLQTWLWSCSPGEGGGPGEDELPNTCYGSFQSQAARTQSQRSIRWGWGHVGWPWLSQVGSCQAKSYAKWGPPWP

SEQ ID NO: 17351 - DNA, 2821 bp, Homo sapiens
  CDS (227)..(1768)
attttgggggtggttggaggcggtggcggcggcggcgaggaggggaatttccttgtgcctccattcccgggaggggggagcggcgttggaggccaccgtttccagcatcaacaacagcaacttgtgattggcggtgaccggatattcagttgcacatccccacatcaatgcactgccaatgggttatatcctgtgttgtgacctcatggtttaagtgggaataaagatgagtataagcagtgatgaggtcaacttcttggtatatagatacttgcaagagtcaggattttctcattcagcatttacctttggtatagaaagccatatcagtcagtccaatataaatggtgccctcgtcccacccgctgcattgatttctatcatccagaaaggtctacagcatgtagaagcagaagttagtattaatgaggatggtaccttgtttgatggtcgaccaatagagtctctgtccctgatagatgccgtaatgcctgatgtagtacaaacaagacaacaagcttatagagataagcttgcacagcaacaggcagcagctgctgcagctgccgcagctgcagccagccaacaaggatctgcaaaaaatggagaaaacacagcaaatggggaggagaatggagcacatactatagcaaataatcatactgatatgatggaagtggatggggatgttgaaatccctcctaataaagctgttgtgttgcggggccatgaatctgaagtttttatctgtgcctggaaccctgttagtgatctcctagcatcagggtctggagactcaacagcaagaatatggaatcttagtgagaacagcaccagtggctctacacagttagtacttagacattgtatacgagaaggagggcaagatgttccaagcaacaaggatgtcacatctctagattggaatagtgaaggtacacttctagcaactggttcctatgatgggtttgccagaatatggactaaagatggtaaccttgctagcaccttagggcagcataaaggccctatatttgcattaaaatggaataagaaaggaaatttcatcctaagtgctggagtagacaagactacaattatttgggacgcacatactggtgaagccaagcaacagtttccttttcattcagcaccagcattggatgttgattggcagagcaacaacacctttgcttcttgtagtacagatatgtgcattcatgtctgtaaattaggacaagacagacctattaaaacattccaaggacatacgaatgaagtaaatgctatcaaatgggacccaactggcaatctcttggcctcctgttctgacgacatgactttaaagatatggagtatgaaacaagacaattgtgtccatgatttgcaagcacataataaagaaatttatactatcaaatggagtccaacaggaccagggactaataatccaaatgccaaccttatgttagcaagtgcatcctttgattctactgttaggttatgggatgtagaccgagggatatgcatccataccttgacaaaacaccaagagcctgtgtacagtgtagctttcagtcctgatggcaggtatctggcaagtggttcttttgacaaatgtgtacacatctggaacacgcagacaggtgctctagttcacagctataggggaacaggtggaatatttgaagtttgctggaatgcagcaggagacaaagttggagccagtgcatcagatggttcagtttgtgtattagaccttcggaaatagcgctactagttggaagccatggaccgactatgaatgtgtacatagccaaaatgactgtccctgacccatgtactgctatagtcccacttgaaccatggccagtccactacagccaaatctaaaagaaatatatacatacagtgtatataaacaaaattgcaccctgaagatgacagagttttgtcacagcttgtgaattctgttcaccaagtgctggaatctaatctgctgtgcccctaaaatagcatttagaagttttggatatgaaaaacagaagagagaaaaatatacattataaaagcagaacatacatgtaccagtttttggatactaaatgacagccttgtttctcccctttgaatcagcagacaccatggattatattctttttttcccttcagtagtgagcagtttgtatgtacagagaaaatggacttacaaaaacttgcagcagtagtttgttcttgctttaaaatttcgtttttggtttagattatggatgcatgaagtaagggagtgaatcagtttcttgtttatatttttttcaccttttaaacaaaaaattctttaaaatattttaatgcattcttttgaagaggtagatgtttggtacattttatggctcccagagcatatattcagttggtgcatgttgtggaagggggaattggaaattaaatgaaaacctatgactttggtcatgtcaatctgtaagacacatcagtaaaagggtattatgctctgttggttttgtttttttgttttgcttttttttttttttttcttttttgttttttggtgatgtggcttaaatgcaatagtttcttttttgggacatatttctgccaattaaagactagaagggcacaactttttttttaattaccatagagaagatacattaaaaaaaatcttctgatgttttgtagccataactaaattatggtaaaaatgtgcactattgtgaaaaggagcaacgtagttttgggttttttgttgtttgtttgttttgctttgttttttaagagattaaaatgtttctggataagg

SEQ ID NO: 17352 - protein, 514 aa, Homo sapiens [sequence omitted]

SEQ ID NO: 17353 - DNA, 2800 bp, Homo sapiens
  CDS (90)..(422)
gactgcgccacgtctgaggcggctgtggccacgtctgaggcggctgtggccgcgtcggtgtccgcgtcgaggagccggggcagggcacgatggcggactgggctcgggctcagagcccgggcgctgtggaagagattctagaccgggagaacaagcgaatggctgacagcctggcctccaaagtcaccaggctcaaatcgctcgccctggacatcgatagggatgcagaggatcagaaccggtacctggatggcatggactcggatttcacaagcatgaccagcctgcttacagggagcgtgaagcgcttttccacaatggcaaggtccggacaagacaaccggaagcttctatgtggcatggccgtgggtctaattgtggccttcttcatcctctcctacttcttgtccagggcaaggacgtgagccagtgggagctggtgtctgtgggtgccaagggcagccagggtcttccctgcctggtgttttgggctccagaggacttacctacaaaatactcctttgcaattataattgtgggtcaggaatcttcttcctgtgtggcaggaggctgcggctgcctgtgacctgatgagctcatgttggctggtcccatgtgtgaaagggactctctcggggaaaccaaggcccagcccctcccccctcccccaggtgctagagagccaggcagagctggggccacagcgtgtctggagaagccaggtctgagcagagcagctgttgaatcccagacgtggctacctgtggcttgcagcccttctccccgcgcttgggactctgacatcttaaggctgcacggtcgtgtccttgtctgggtgaggccatgtctgtgatccaaggttcctggaactgacacaggaaggggctgtgaaccctaagtgggtgtcatctcctccgaccgaggcttctcaccctggagatggcagttactcctggccatggttgctgagcatgggcagaccagtggaggccaccctactgtgttatctgcgccttcgatgaagtgagacccttggggagaacgggctgtggatgaaggagtggactgcagccttggcctagccactgggctgggatcttctgggtcatgtgactgtgtatccaggagcagaaacttgtattctcaggattcaggatctacccagcaccaaagatgtattttcaggagaacagacctagaaatgggcctgtctggcatttcagagtcaggcaaagcaggcagggccagggagcttctgtgggtctacacaagaaggttcctgtgagggctatcagttgttgccttctagcttgctggtaactttggcgcctccgccaagccctgccagactcccctggctgtgatggcattctgtgccatcctccttgtccccagcctctgcaggatgccctccctacccacctctccctgggccttccctgtccactgggctggattcatgttcaaaccactggactggcagggcaacgacttcttcccacctcaagatgaggtcctcgcccccttgtcttggcataaaacacctttaaagcatgagccatgtgcttctttgcccttttctgtcctgttccaatcttctgcctcccagtcactccctggggactatgggatcactgtccccccacctgtgtggccacaccatgtgtcctgtcaatccagaactgcctctgagctccaggctgaccacagatcagccacagcctgatgcctgcagccccactttgctcacccttcccctcccctcctccttccttccacacagcaagcctacctttctccatccatgctcaccatagcccccttccttgtgacctggaccctccattgtacctggctgagactgtcagcctcctggaggagtggggtccaccttcttcttgccctatgcagtgcaagctcacttctcacccagcaaggttgactcatctgcctccatgtctctggggctttgctgttgccctgaaacctagctgggctggtcttgctcccagcttgcttccccctcctcggatgtccctttgcaggcccctgtcgttcctccggcaccagtgtccttggctgccatggcaagctcatcaggggcttgtaccctggtcaccaagcatggtagcagctgcctgcattgtatctccatctggtcactgcaggtgccaacccttcatcccccatgttttcctgggccatggagggctgacctccgtttctggggaatgtggctgagctgtggtaaccagctacaccccaggtgctctttccatggtggtgcctgctcatcttgctgatgcaaactaggaagttaggctgcatctcggagtggctttcgctggagaggtgctttgctgtctctcagactcagtcactgtgttccctccccgcctctcttatctccatggctgtttgcagctctcccaggtactttggggtctgagctggaattcctttgtggtttgctcttctgcttctcactcttgtattaagaaggattccacaaagggagagtggcatccctgctgctgctgtgccagaccagagtttcctgaggggccctgaccctaaccctccagctcagccctgtacacctgaccctgtaaatgagtggggtttgctgactgtaatccctgacaccagtaaaaccaaaaggactcttgggggctcagtgtgagagccagggttacctactctgccaagtgaggacaaactgctaggctgtatcccataatttcaggatgagaaacattaacaataaaaatttgtagtaaacataacctcatgaagaact

SEQ ID NO: 17354 - protein, 111 aa, Homo sapiens
MADWARAQSPGAVEEILDRENKRMADSLASKVTRLKSLALDIDRDAEDQNRYLDGMDSDFTSMTSLLTGSVKRFSTMARSGQDNRKLLCGMAVGLIVAFFILSYFLSRART

SEQ ID NO: 17355 - DNA, 1098 bp, Homo sapiens
cttcccgcttgagttcaacaagaactccctcaccttctccattccaccaaagaacaaggcccggctcaagaagatcaaggatgacactggaccagtggccaaaaagccctcttctggcaaaaagggggctacgacacagaactctgagatttgctcaggccaggcccccactcccgaccagccagacacctccaagcgttcaaagtgaaggccgtgcagagctggtcactgaaatgagcctgataggataggctggagcataaaactctgcaagggctcctctatcctgtggtcctgagctgtgtgcccttctcagtctgaggggcctaacctagagcaggtttcatagtgagaaaattcaatgtagcagactactgagaaactactgtgttgctcaggctttgtttgaggtcctgtatatacagcactgaaaagagagataaagtccctgcctgcatgcattctggcggaagagacaagcaagcaatgaacaaattagcagaaaacctagttttagtgaaaaatgctgtaaagaaaatagaaatgcgatagagtgctggcaggctagtgtagataagtggtctgaaaaggtgtctctgagccgagggcatgtgagctggggcctaaacaactagaaggagagagccacgtgaacatccggcgaaggggacccaggcagagagaaaaggaaatccaagccctgaggtaggaatgagcaggtcagattcaaggcagtgaggtcaggccgcatgaacctggaggggaatcggggacttcatgcgaaactccagcctaggctttcaaagtcaaagggtgatacagtgggtaccaagctcctctgctccccactttgtagagcctagcatgaggtggcatgtactagaattggatcctaggtgcttagccctgcaatatcagggcctcactggtgggagctgcctcgggctgggttgcttggtcatagagccatagaaggaagctgtcagcccggagtgcctgccacctagacactgatgccattgtgtgctgcctcaagactgctggagtcaggacattttatagagccttttccagttttactaaaaaatttttccattg

SEQ ID NO: 17356 - DNA, 2618 bp, Homo sapiens
  CDS (132)..(548)
ttttgttttctgaagattcaacaaagctctttgtagcatcaaatcaaggagctctgcatattgttcagctgtcaggaggaagcttcaagcacctgcatgctttccagcctcagtcaggaacagtggaggccatgtgtcttttggcagtcagtccagatgggaattggctagctgcatcaggtaccagtgctggagtccatgtctacaacgtaaaacagctaaagcttcactgcacggtgcctgcttacaatttcccagtgactgctatggctattgcccccaataccaacaaccttgtcatcgctcattcggaccagcaggtatttgagtacagcatcccagacaaacagtatacagattggagccggactgtccagaagcagggctttcaccacctttggctccaaagggatactcctatcacacacatcagttttcatcccaagagaccgatgcacatccttctccatgatgcctacatgttctgcatcattgacaagtcattggtgagttcttcactgctacctcccaaatcttcttctgaatcttaaagttctaaaagcaacaagtacaataaggtaagaggacagagactcagaataaaggtagctagtaaatcagaatacaggtagctagtacatttcttggaggagaggggcttttgttttacagattccctggtttgtgttcccacagttcttcgggaggctctcggggaaggggctggcctttgtatactggcttttgctgatttgactatttgtctactttgcgagtaagcacataaatcttacacagaaaagtgattaggccagtattcggaaggtgaccctcatccggaagtatcattgatttggctaacttgctttcaactttgaactctggggtatctgaataacctggtttcattaaaggaggtacaggctgaggttttgacctctgtgccccttcgctaaagctactaaaacgctgtctgcaggcttgaggaactggtcttaacatcttcgaaaaacccagctaggaaaattcttcatggctgtgatttacatgggatacgagcattttcttcagttttagattctgtcctctttgccagctgctgttttgattcaccctgaatttgtatggcttttctgggcaggtgctttgtttcctaggagcattgtggccatgcctgtcctgcactttgggcttagattacaaccatcacacggtgttttggtgtgtttgtgaaggtgggggtggaaggaacatgggggaaagcagcagatggctctaaaggaggtgtgcacggggatgtgtcactggaatcatctcgtgggccctgcgacctctgggtgtgggaagcagagctggctgacaagtgccttctgcaagatgagtgatacaggaagggcccctcccactctcttgcctctttgtaattgagcccagatcattttttccaaagcattggctttaagttcatcgcttccttacagtaggcatagctatttcccaggaagtcagagacaaaatatcatttctttggccagaggccacctcgaggtgtcagtgacatcagcacaggtggtttgtgttgaggtttcgcctggggagaactccagtcacttgtccagtctgtgatctggttgggggagagtctagaaagcacagaccctgtgtgggctgagctcctgcacttgccagtttgttccattctgacaaagtgatactgatgagacaggccagaagccgcagaagggccctttgatcttgctgcatggagttaacaagctctctttgcctcatacacccaccctctacagtgtggctgcaagagtagcttcagctctttctccctctctctccttttcttctttttttcccccctagtttttctgaatagaggtattatggctacagctgttttcccgaattaacgaatgtcagggaggtactgaatatatatgatggttagaagatgatgttgggctcaaaatgcactacagatctttggtctgcagaagcccaataaaagtaaccatttaaacaatgtgtctttgtttttttagccccttccaaatgacaaaaccttactctacaatccatttcctcccacgaatgaatcagatgtcatccggaggcgcacagctcatgcttttaaaatttctaagatatataaggtaaaacatcttgtgttgttattctggatagttggttcctttgtgataccaaaatgtaataaactccacaatcggaagataagagcaccttcagtttccatgcagagaacctggcttgtgggagacaagtcacctttttgaggctggctgtcccttgtatatgttttattgttcttgccttagtaggttagaggcaggcacatcatacttaaccaaaatgaaatgcgtaagtagtgagaaatgttggcgctgagggtagagtctttgttgtcatgagagctggctttaaattttacttgttggagtgttccataggataaatgtcaagcaggctgggcttggtagctcatacctgtaatcccagcactttgggaggccaaggcaggtggatctcctcagcccaggaattcaaaaccagcctgggcaccatggtgaaaccccatcactattaac

SEQ ID NO: 17357 - protein, 139 aa, Homo sapiens
MCLLAVSPDGNWLAASGTSAGVHVYNVKQLKLHCTVPAYNFPVTAMAIAPNTNNLVIAHSDQQVFEYSIPDKQYTDWSRTVQKQGFHHLWLQRDTPITHISFHPKRPMHILLHDAYMFCIIDKSLVSSSLLPPKSSSES

SEQ ID NO: 17358 - DNA, 2272 bp, Homo sapiens
  CDS (142)..(2034)
tcaaatgtatctttaccaggacccggcctctcagttccaagacccctacagcctgaatatgtagcccttcccagtgaagagtcacatgtccaccaggaaccaagtaagagaattccttcttggagtggtcgcccaatctggatggaaaagatggtaatgtgcagagtgaaagttccacacacatttgctgttcactcttacacccgtcccacgatatgtcagtactgcaagcggttactgaaaggcctctttcgccaaggaatgcagtgtaaagattgcaaattcaactgccataaacgctgtgcatcaaaagtaccaagagactgccttggagaggttactttcaatggagaaccttccagtctgggaacagatacagatataccaatggatattgacaataatgacataaatagtgatagtagtcggggtttggatgacacagaagagccatcacccccagaagataagatgttcttcttggatccatctgatctcgatgtggaaagagatgaagaagccgttaaaacaatcagtccatcaacaagcaataatattccgctaatgagggttgtacaatccatcaagcacacaaagaggaagagcagcacaatggtgaaggaagggtggatggtccattacaccagcagggataacctgagaaagaggcattattggagacttgacagcaaatgtctaacattatttcagaatgaatctggatcaaagtattataaggaaattccactttcagaaattctccgcatatcttcaccacgagatttcacaaacatttcacaaggcagcaatccacactgttttgaaatcattactgatactatggtatacttcgttggtgagaacaatggggacagctctcataatcctgttcttgctgccactggagttggacttgatgtagcacagagctgggaaaaagcaattcgccaagccctcatgcctgttactcctcaagcaagtgtttgcacttctccagggcaagggaaagatcacaaagatttgtctacaagtatctctgtatctaattgtcagattcaggagaatgtggatatcagtactgtttaccagatctttgcagatgaggtgcttggttcaggccagtttggcatcgtttatggaggaaaacatagaaagactgggagggatgtggctattaaagtaattgataagatgagattccccacaaaacaagaaagtcaactccgtaacgaagtggctattttacagaatttgcaccatcctgggattgtaaacctggaatgtatgtttgaaaccccagaacgagtctttgtagtaatggaaaagctgcatggagatatgttggaaatgattctatccagtgagaaaagtcggcttccagaacgaattactaaattcatggtcacacagatacttgttgctttgaggaatctgcattttaagaatattgtgcactgtgatttaaagccagaaaatgtgctgcttgcatcagcagagccatttcctcaggtgaagctgtgtgactttggatttgcacgcatcattggtgaaaagtcattcaggagatctgtggtaggaactccagcatacttagcccctgaagttctccggagcaaaggttacaaccgttccctagatatgtggtcagtgggagttatcatctatgtgagcctcagtggcacatttccttttaatgaggatgaagatataaatgaccaaatccaaaatgctgcatttatgtacccaccaaatccatggagagaaatttctggtgaagcaattgatctgataaacaatctgcttcaagtgaagatgagaaaacgttacagtgttgacaaatctcttagtcatccctggctacaggactatcagacttggcttgaccttagagaatttgaaactcgcattggagaacgttacattacacatgaaagtgatgatgctcgctgggaaatacatgcatacacacataaccttgtatacccaaggcacttcattatggctcctaatccagatgatatggaagaagatccttaatcactgagctaacctaaataaggaaggacttcattttatggactgatattttgctgtgtaacttgttctttgtagattgtcatctgcagtgctgcaaagatatgaagaaatatgataacgtataagtgacaccagtactgtagttcataatgagtaggtacaggcgggaaactgaataataagaagtcataatggaatcaaggtgaagctttttataaacttttttagcctaagc

SEQ ID NO: 17359 - protein, 631 aa, Homo sapiens [sequence omitted]

SEQ ID NO: 17360 - DNA, 2551 bp, Homo sapiens
  CDS (42)..(1883)
tagacaaaggaaaatgcaaaaagcgaggcgacggcttaaagatggagaacgacccccaggaggcggagtctgaaatggccctggatgctgagttcctggacgtgtacaagaactgcaacggggtggtcatgatgttcgacattaccaagcagtggaccttcaattacattctccgggagcttccaaaagtgcccacccacgtgccagtgtgcgtgctgggaaactaccgggacatgggcgagcaccgagtcatcctgccggacgacgtgcgtgacttcatcgacaacctggacagacctccaggttcctcctacttccgctatgctgagtcttccatgaagaacagcttcggcctaaagtaccttcataagttcttcaatatcccatttttgcagcttcagagggagacgctgttgcggcagctggagacgaaccagctggacatggacgccacgctggaggagctgtcggtgcagcaggagacggaggaccagaactacggcatcttcctggagatgatggaggctcgcagccgtggccatgcgtccccactggcggccaacgggcagagcccatccccgggctcccagtcaccagtggtgcctgcaggcgctgtgtccacggggagctccagccccggcacaccccagcccgccccacagctgcccctcaatgctgccccaccatcctctgtgccccctgtaccaccctcagaggccctgcccccacctgcgtgcccctcagcccccgccccacggcgcagcatcatctctaggctgtttgggacgtcacctgccaccgaggcagcccctccacctccagagccagtcccggccgcacagggcccagcaacggtccagagtgtggaggactttgttcctgacgaccgcctggaccgcagcttcctggaagacacaacccccgccagggacgagaagaaggtgggggccaaggctgcccagcaggacagcgacagtgatggggaggccctgggcggcaacccgatggtggcagggttccaggacgatgtggacctcgaagaccagccacgtgggagtcccccgctgcctgcaggccccgtccccagtcaagacatcactctttcgagtgaggaggaagcagaagtggcagctcccacaaaaggccctgccccagctccccagcagtgctcagagccagagaccaagtggtcctccataccagcttcgaagccacggagggggacagctcccacgaggaccgcagcacccccctggccaggcggtgtctctgttcgcacaggtccggagaagcgcagcagcaccaggccccctgctgagatggagccggggaagggtgagcaggcctcctcgtcggagagtgaccccgagggacccattgctgcacaaatgctgtccttcgtcatggatgaccccgactttgagagcgagggatcagacacacagcgcagggcggatgactttcccgtgcgagatgacccctccgatgtgactgacgaggatgagggccctgccgagccgcccccaccccccaagctccctctccccgccttcagactgaagaatgactcggacctcttcgggctggggctggaggaggccggacccaaggagagcagtgaggaaggtaaggagggcaaaaccccctctaaggagaagaagaagaagaagaaaaaaggcaaagaggaagaagaaaaagctgccaagaagaagagcaaacacaagaagagcaaggacaaggaggagggcaaggaggagcggcgacggcggcagcagcggcccccgcgcagcagggagaggacggctgccgatgagctggaggctttcctggggggcggggccccgggcggccgccaccctgggggtggcgactacgaggagctctaggccggcgtgggcagtggccgccctggggcggggggcgtgcctgtcactgcctggggaggcatttgcctctgtaccatcgcctttgccgctgccccgtggctgccgtgtgcgcttctgagctggaagaggccgggcattggtggtccccaggctgggccctgcaggtgctgggccttcaggcccagtgtgagcctgctctgcaagaagggaggggacagctggcttcagccaggctcggtggacaccctggccctctcggggcagagccgccagtgtttctcagggatgtgactgaggcccaggagggacctgtgagggtctgtttacagaggctgggcaggggccgcttggctgtggggtgtgcgctgccccggcacctgcttgccctccgcgctcatctggggccgcagcatgcctatggttccgcttccggccgggagccctgaacacgggtgtgcagactcaccctaaagggcggcccaggccccacgctagaaggctggcgagaccgaaggcagcatgtgaggcctctcctgggagtgggggttgtgtttcccacagtggcctcagctgcgcccccgctcaggtgagcccgaaggcaggagccgggaggcactcctcccaaacactccactcagaccataaagcactcctgtttcactctg

SEQ ID NO: 17361 - protein, 614 aa, Homo sapiens [sequence omitted]

SEQ ID NO: 17362 - DNA, 2932 bp, Homo sapiens
  CDS (355)..(2019)
agccctcccttgcacgttccggctcctcctctatcttcacgcccacgctaggccctgagcccacctctacgtctcgccgccaactccacatcctggctcctatctctgccttccaggcatctcccagctgcacgctcgggcccggctcagagccctaagccctgcctcccggtcctggccgggtttcccagaactgcacggcgcctctccgcccaggcccaagcgcgagcccctcctccacacccgagtcccagccccgcgtcccggattcggacccgcctgcctggggcggtgctgcaccaggtgcgggtgtggcaggcgtctcggagcgccaggtgcagcttcctgatcaagatggtcgccgcctgccgctcggtagccgggctcctgccacgccgccgccgctgctttcccgcccgggccccgctgctgcgcgtcgccctctgcctcctgtgctggaccccggcggctgtgcgcgcggtccctgagctcgggctctggttagagacagtcaacgacaaatcaggacctttgatatttaggaaaactatgtttaactctacagatatcaagttatctgttaagtcattccattgttctgggcctgtgaagtttaccatagtgtggcatttgaagtatcatacctgtcacaatgagcattctaatctggaagagctgttccaaaaacataaacttagtgttgatgaagacttttgtcattatttgaagaatgacaactgttggacaacaaaaaatgaaaacttagattgcaacagtgattcacaggtgtttccctctttgaataataaagaactaataaatatcagaaatgtttcaaaccaggaaagatcaatggatgttgtagccagaacacaaaaagatgggtttcatatctttattgtttctattaaaacggagaatacagatgcaagctggaatttgaatgtttctctttctatgattgggcctcatggatatatctctgcatcagattggcccctaatgattttttacatggtgatgtgtattgtttatatattatatggcatactctggctgacgtggtctgcctgttattggaaagatatattaagaatccagttctggattgcagctgttatttttttgggaatgcttgaaaaagcagttttttatagtgaataccaaaacatcagcaacactggactgtcaacccaaggcttattgatatttgcggagttgatttctgcgattaagaggacgttggctcgccttctcgtgatcattgtgagcctgggctatggcattgtgaagcctcgtttaggaacagtcatgcaccgggtgatcggactggggcttctatacttaatctttgcagctgttgaaggcgtgatgagagtcattgggggttctaaccatttagctgttgttcttgatgacattattttagcagttattgactccatttttgtgtggttcatttttattagtttggcacaaactatgaagaccctaaggctaagaaagaacactgtgaaattttcattatatagacattttaaaaatactctgatctttgctgtgctggcttctatagtgtttatggggtggacaactaagacatttagaattgcaaaatgccaatcagattggatggaacgctgggttgacgatgcattttggagcttccttttttcgcttatccttattgtaatcatgtttttgtggagaccatcagcaaacaatcagagatatgccttcatgcccttaatagatgattctgatgatgaaattgaggaattcatggtaacttctgaaaatttaaccgaaggaataaaattaagagcctcaaaatcagtttccaatggaacagctaagcctgccacttctgagaactttgatgaagatttgaagtgggtagaagaaaatattccctcttcattcacagatgtagctcttccagtgttagtggattcagatgaggaaatcatgaccagatctgaaatggctgaaaaaatgttctcttcagaaaagataatgtgattggaacccgtataagaaatgtagttaagcctgaaggactatccttcatcaagactgaaagtgagctttgatttgatattgcctaaaaatttttattgtgttatcttggaagtctgtgtatcaaaatgaagaattcagatggtaggaggttctatagtccttttaaagctgactcttgagtgtcagttgaatatccattaagttggatttggaaataacctgaggaaagtattatgataaagatctgcacagatgcctcttagctgataggtggcaggcctgtgggttcgggttctccctcttttctctggaacatatgacaattccagattaaagaaaaatgttttttaataaatacccttggtctttcttctagtcacctttgaggtagatattgtgattttctggagtatagtatatccgtgtctctgtgtcttaggtttactagatgcaataatacttctctttgacatttgtactgaagtgatttgatattaagtaaaacagttaatgtttgaatataggcatatttataggttttttccgctcccccccaacccaccctttttaaaaaatctatacaaagcccttgtttgagtctcatcatgcacatcaaatcatggagttaggtcttctctgagctcaggggaacacaagtgcacagagagagatgtcttgagggtcactaccaaagaattaccctcattgtccctcactcaggccatgtgtacatgcgatgctgctgagtgtgctggggtgggtggtggccacgtggctcccccagagcacttcctaactggcaagctgggagacccattactggtgaactttgtggaaattagaactgtatcttttacataatcttggcatattacatttcataataaaaacatacatttagttgcatgct

SEQ ID NO: 17363 - protein, 555 aa, Homo sapiens
MVAACRSVAGLLPRRRRCFPARAPLLRVALCLLCWTPAAVRAVPELGLWLETVNDKSGPLIFRKTMFNSTDIKLSVKSFHCSGPVKFTIVWHLKYHTCHNEHSNLEELFQKHKLSVDEDFCHYLKNDNCWTTKNENLDCNSDSQVFPSLNNKELINIRNVSNQERSMDVVARTQKDGFHIFIVSIKTENTDASWNLNVSLSMIGPHGYISASDWPLMIFYMVMCIVYILYGILWLTWSACYWKDILRIQFWIAAVIFLGMLEKAVFYSEYQNISNTGLSTQGLLIFAELISAIKRTLARLLVIIVSLGYGIVKPRLGTVMHRVIGLGLLYLIFAAVEGVMRVIGGSNHLAVVLDDIILAVIDSIFVWFIFISLAQTMKTLRLRKNTVKFSLYRHFKNTLIFAVLASIVFMGWTTKTFRIAKCQSDWMERWVDDAFWSFLFSLILIVIMFLWRPSANNQRYAFMPLIDDSDDEIEEFMVTSENLTEGIKLRASKSVSNGTAKPATSENFDEDLKWVEENIPSSFTDVALPVLVDSDEEIMTRSEMAEKMFSSEKIM

SEQ ID NO: 17364 - DNA, 2603 bp, Homo sapiens
ggaattagcgactctaagtgaaggtcactgacacagagaagcagtatgtgtctggggcttccaggacctgcaggcccactagcgtgcacttaccggaatggcatacacaggacctgatcatgaggaagaccaggtttccagtgtaaactactcttgttcccaccacctctggagcactcagggagccccatacagtacttacaatgtctttaatggacttgattctgtttaattttttgttttatattaggcacactgtattaattttccaaaatgttataccacactatgttcttggtcctgacctattgctctggaggaaagagttgtataagaacgtggctcatgtgaacttttgctagcttcatttgaggacctgagaatcatggggaaagggaaggtaatgttttcattgaaatcatcacagtgatttttattccctgggaacacagcgtgtactaaaaatacatgagaaaatagcatgtatatgaaagctattctcaaaagtcacctgagctcaccatcttcatagccaaccctaccagttataaagatggcagctctatcacttgattaagtgggaggtggtcaaatattctggtgcctcattttcttcatctgtgagatgggaactgttatgcctggcttactaagagtcttgtgagagactgagaagttgattttgttcatatccaatctgtaaatgcgaagtcaggggaagtaatgtccctgaaataaacgggttcatgccatctagggacaataaatggttttcttgttgtaacttctggttaatatcagtaccttgatgtcatcaccgtgatgacaaagagaagagttattgttgatcttcttggttttggtctgtctcttttcttaggataaagaaaaacttccaaactagaaaaacaggccctggttcccttagtttgcacttgaacccaatatgttgccttgtacatacttggtccctgtcacattgactgcttgggaggcttccagggagaagtatgagaccctgaggggtgagaatgggcagctagcaagaacatggaaattctgcttggcactacagtcataaatagaaaacactgtgtgtgctcaggggagcaggggatgccactgaagaaactcaagggaatgtgtatttgaaggaaatgcaaaaactaagtatttagcaaaatgaaattatgccttgatgactaaaaggcactagaaaggttgtgtctactaacttcagccctaatcagaacagatgcctagaaggagcatttctgtgacaacttcatagtgattagaatcagtggagaactccatcttagtggcaggaatataatgaaactacccacgcaagaacatggttgaatcacatttgcttgacttagggcaaagtacgaaagagagacaaaagggttctcttggaaacaagaagagtgactccagatgtggcctgaataattgccatgttaagttaatgcaaaagatcagaacagggctacatttgcacaggcagtttctctccgggccgtagttttcactgatgatcacctttcacagcattttccccaaccagcatttcacttagtcttctctatacccagcacctcccccggcacccccggcaagcccactatcacttccgacttccaacgtggcatccgtgagatctgtccacattaggcgaagcaggagaacactgagagcagcaggatgggtttggaaagagcatgcctctggaaacacagcttcctgggaattcacatgaggccagtcctacagagagcaagatgcaccccaggatttcttcattttctaatagatgtgggagtgctccattttccccgacagcgaatttcccctgagaaacgatactagaccctgggtttgcccaccttgtaactcttccttatctcctccttttcatccctaattcatcctccctctggcatggaattgacgcccgtgcagtacatttgccaagtggcaccttctttcaatttatgttttattttgctatggtggtgattctttatttgctggttgtcttttctcacacatctttctctctgtctctctctttcctgctctttgtttttctgcccagaaaaacctgacttcgataccaaaaaagatgaaactacagaaactcaaatttaaaaaaaaactttaaaagaaacaaaaaaatactcaacgattctttcagctttattaacattttccattgtttcttgcgacttgtgtctcgttctttgtagtattgatgatgaacatttgataatgaatgttcttgtatattcagataaagaaaaaaaaaaccaaaaaagcggtctgaatttaatagtgtttataataaaaattttaaaaatgaccctcatagcacgcaaaacaggatggggaatttcccctcttctttctgtgacaatgcgcatcattcctgcattagtttttaacaccagactacctacattcatcatttccctcatttttcttttattttcttgcatttgtgaattagttcaagaatgctagaaaagtgtcgagttgtgcacatccatttcttgtttcacaatgtttaaaagtgacagtaattcattttgtaaact

SEQ ID NO: 17365 - DNA, 2451 bp, Homo sapiens
atgtcatcttaaaaatctaaaatataacatggcacataaagccaaaaaaaaattttttttttttgagacggaatcttgctttgtcgcccaggctatagtgcagtggcacgatctgagctcactgcaaccttaacctcctgggttcgggcgattctcctgtctcagcctcccgagtagctggtacgacaggtgcatgccaccatgcctggctaatttttgtgtttttactagagacggcatttcactatgttggtcaggctggtctcaaactcctgacctcaggtgatccacctacctcagcctcctaaagtgctgggattacaggcatgagccactgtgcccggccaaagcaaaaaattttaagaaacacccgattcagtaacaatagctcttaatttagtttatatcattaaatgttttgatcttcatccttgttttaggaaacacaaaaaagcatgcacaaagaggcttataatttttatataatttaaaatatttcttcatttaaacagaaatgttctactctccaacttttcatgtgtacatacttaccatttctgtgggtgtgtgcataaaatgtaagcatcatttgatcaattttctgttgttgccttgtttatatcaatcttctcagttatgaaaactgctctggatgttgttttacagttatctctgtatattggctcataagtccttttgagataaatttcaagtcagataaataggggtaaaacgcaaagctcagctgggcgtggtggctcacgcctgtagtctcagccctttgggagggtgaggcgcgcaaatcacgaggtcaggattccgagaccagcctggccaacatggtggaaccccgtctctactgaaaatgcagaaacttggctgggcgtgctggcaggcgcctgtaatcctagctactcgggaggcagaggcaggagagttgcttgaacccgggaggcggaggttgcactgagccaagattacactactgcactccatcctggcgacagagcaagactccgtttaaaaaaaaaaaaaatacaggctgggcgcggtggctcacgcctataatcccagcactttgggaggccgaggcgggtggatcacgaggtcaggagattgagaccatcctggctaacatggtgaaaccccgtctttactaaaaatacaaaaaattagccgggcatggtggcaggcacctgtagtcccagctacttgggaggctgaggcaagaaaatggcatgaacccgggaggcagagcttgcagggagccgagatcgcgccactgcaccccagcctgggtgacagagcgagactcagtctcaaaaaaaaaaaaaaataaataaatacaaaaatagcactcaaaaatgtatattcttatattgattcgtgtttatattttgttttatatgtgcatatttatgctagttttgtggatcttatatttccacaggattagagaatatattcgaaatattactgtgtttaaaagtatcttatttagtaactcaggtcactcataagtcagaaccagttgtcttaactttcttatttcatcttgggtcaaattaggaactctgcccttgactgcatgatcaatgtgttatttatttttattagagaaactgttgacattcagggatgtggtcatagaattctctctggaggagtaaaaatacctgaacccttctcagcagaatatgtatagagatttgatgttagagaactatacatacgttgtctctgagtcggaataacttaccttcagaatatctaatgtctaataactatgataccgtaccttgttttaacctgattgtctctcttagctgagagagccggacagactccattttagtttctttacttgcagcccctttacccctctcccttaagggcataaccagtgcaagctgactccaagcacatccaggaatacacttactgataagatactgaggcaagctgtaccagcagctcctgggaatgcgctcaaagcccctgcgtttatcactttgtgatagtttaagcccctgcacctggaactgttcattttttctgtaactgtttctgtaaccatttatctttttaactttttgcctgttctgcttctgtaaaattgcttcagctaggctcccccctccccttgtagactgaggtataaaaggaaatctggccgggcgcggtggctcacatctgtaatcccagcactttgggaggccgaggtgggcgaatcacgaggtcgggagatcgagatcatcctggctaacatggtgaaaccccgtctctactaaaaatacaaaaaattagctgggcgtggtggcggcgtctgtagtcccagctacttgggaggctgaggcaggagaatggcgtgaccccgggacgcggaggttgcagtgagctgagatcgcgccactgcactccagcctgggtgacacagcaagactctgtctc

SEQ ID NO: 17366 - DNA, 2489 bp, Homo sapiens
  CDS (16)..(2421)
gcaagatttgttgcaatgaaatatattaaatccaattctaaaaattcttctcatcattttgtagagacatttaacataaaaccacaggacttgcacaaatgcattgccagatgccatttcgcacgtagcagatttttacaaattttgcaaagacaagattgtgttacccaaaaatatcaggaaaatgcacaattatcagttaagcaggtacgaaacttgagatctgaatgtataggattggaaaaccaaataaagaaaatggaaccctatgatgaccacagtaatatggaagaaaaaattcaaaaggttcggtctttgtgggcttcagtgaatgaaacgctcatgtttttggaaaaagagagagaagttgttagttcggtccttagtcttgttaaccaatatgctttagatggaactaatgttgctattaatattccaaggctcttacttgacaaaattgagaaacaaatgtttcagttgcacataggaaatgtttatgaggctggaaaactgaacctcttaacagttattcagttattaaatgaagtcttgaaggtgatgaaatatgaacgttgtcaggctgatcaagcaagattgacggtagaccttcactaccttgaaaaagagaccaaatttcagaaggaaggattatcagatctgaaacatatgaggtatagaataaaagatgatctcacaactataagacattctgttgttgaaaagcaaggagaatggcataaaaagtggaaagaatttcttggtttgtctcctttcagtctaattaaaggttggactccatctgtagatcttttaccaccaatgtctcccctttcgtttgatcctgcctcagaagaagtgtatgcaaagagtattctttgtcagtatcctgcttcacttccagatgcacataagcaacataaccaagaaaatggttgcagaggagacagtgataccttgggagcgctacatgatctagccaacagccctgcctctttcttgtcgcagtcagtttcatcatcagatagaaacagtgttacagtacttgaaaaggacacaaagatgggaacccccaaagaaaaaaatgaagcaatttctaagaaaataccagaatttgaagtggaaaattctccattatcagatgttgcaaagaatacagagagtagtgcatttggagggtctttgccagctaaaaaaagtgatccatttcaaaaagagcaagatcatctggtagaagaggttgccagagcagttttatctgattcaccacagctctctgaaggaaaagaaataaaattagaggaactaattgactctctgggttctaaccccttcttaacaaggaatcagattccccgtactccagaaaacttgataactgaaattaggagctcatggagaaaagctattgaaatggaagaaaacagaactaaagaaccaattcaaatggatgctgaacatagagaagtattgccagaatcattacctgtgttgcacaatcaaagagaatttagcatggctgattttctcttagaaaccactgtatcagattttggccagtctcatttgactgaagagaaagttatttcagattgcgagtgtgtgcctcagaaacatgtgctgaccagtcacatagatgaaccaccaacacaaaatcagtcagatttgttaaataagaaagtaatttgcaagcaagatttggaatgtttagccttcaccaagctttcagaaactagccgaatggagacattctcccctgctgtcggcaataggatagatgtgatgggtggcagtgaagaggagtttatgaaaatattggaccacttagaagtttcttgtaacaaaccttccacaaataaaactatgttgtggaattcttttcagatatcaagtggaattagttctaagagttttaaagataatgattttggcatattacacgaaactcttccggaagaagttggtcatctaagttttaatagttccagtagttcagaggccaattttaaactggagccaaatagtcctatgcatggtggcactcttctagaagatgttgtgggagggagacagactactccagaatcagactttaatttacaggctcttcgcagtagatacgaggctctgaagaaatctctttccaagaaaagggaagaatcttacctctcgaattcccaaacacccgaaagacacaaaccagaattgagccctactccccaaaatgtacaaacagatgatacgcttaactttttggacacctgtgatttgcatactgagcatataaagccatctttacgcacgtccatcggtgaaagaaaacggtctctttcaccactaattaagttttctccagtggaacaaagattgagaaccacaatagcatgtagtcttggagaactacctaatttaaagggtaaggtttaaatagacctatgcatattcacctgttgaagttttctctcaacttttgataaaaccggtacacaaag

SEQ ID NO: 17367 - protein, 802 aa, Homo sapiens [sequence omitted]

SEQ ID NO: 17368 - DNA, 2276 bp, Homo sapiens
  CDS (152)..(886)
tatttctcagaaagattgccaggaagatgatacaacagtgaaggagcagaatttcctgtataaagagacccaggaaactgaaaaaaagctcctgtttatttcagagcccatcccccacccttcaaatgaattgagagggcttaatgagaaaatgagtaataaatgttccatgttaagtacagctgaagatgacataagacagaattttacacagctacctctacataaaaacaaacaggaatgcattcttgacatttccgaacacacattaagtgaaaatgacttagaagaactaagggtagatcactataaatgtaacatacaggcatctgtacatgtttctgatttcagtacagataatagtggatctcaaccaaaacagaagtcagatactgtgctttttccagcaaaggatctcaaggaaaaggaccttcattcaatatttactcatgattctggtctgataacaataaacagttcacaagagcacctaactgttcaggcaaaggctccattccatactcctcctgaggaacccaatgaatgtgacttcaagaatatggatagtttaccctctggtaaaatacatcgaaaagtgaaaataatattaggacgaaatagaaaagaaaatctggaaccaaatgctgaatttgataaaagaactgaatttattacacaagaagaaaacagaatttgtagttcaccggtacagtctttactagacttgtttcagactagtgaagagaaatcagaatttttgggtttcacaagctacacagaaaagagtggtatatgcaatgttttagatatttgggaagaggaaaattcagataatctgttaacagcgtttttctcgtccccttcaacttctacatttactggcttttagaatttaaaaaatgcatacttttcagaagtgataaggatcatattcttgaaatttttataaatatgtatggaaattcttaggatttttttaccagctttgtttacagacccaaatgtaaatattaaaaataaatatttgcaattttctacagaattgaatacctgttaaagaaaaattacagaataaacttgtgactggtcttgttttacattatatatatgttcgtaattgtttcctgagaattacaatgaataataatttgctttgtcactgaaaaccaccagtgaagtgcaatttggagaatatcaaacttagcattatacatttggatattctagttgtattgtaaattttaaaagattatcaggataacatgaccttgccttgaaaaacctaaatttcatacagaaaggaaaaatacatttctatgcttgaattctggaaatcatcagaaatattgacacttgagggtcactggtggaccatgctagtattttggtgctgagtaattagattatgtataggggtaactggaagccatgaaggaaggacttaaccaggctaccaagtggaatataatttatctgctatttttaattacttaccttgtaaataactttaataatattcaaaagttgactctcctgtggctcatgccacaggatcccagcactttgggaggccgaggcaggctgatcacgaggtcagaagatcaagaccatcctggccaacatggtgaaaccttgtctactaaaaatacaaaaaattagctgggcatggcggcatgcgcctgtagtcccagctactccctccagaggctgagaattgcttgaacctgggaagtgcaggttgcagtgagccaagattgtgccactgtattccagactgggtgacagagtgagactccatctcaaaaaaaaaaaagttgactctaccccctaatttggtaggagatgaaggagaaaaggatggcattgaattatagatacagttttgggatatatacaaggattgccttgatctggcacttactgatacaagcatttggagaagagaaaattcaaatataagaaatttcaatttgaatctgtggatataaggcatttgcctttgagtatgttcttgtaggagtaagactaccaccagtgacattcaattggttctattgcatagtacatgaatctattgtcactaaaaattaggttactaatcttaatttttttgaaatatatgattctcagtacaggactaattcatatgcttttcctgcatacattattttgatcatttggataacatcaatgaacactggctttttaacacctttgtttttcataccagtacctgaagtaggctcaataaaagagtctttacagtgcatacacgc

SEQ ID NO: 17369 - protein, 245 aa, Homo sapiens
MSNKCSMLSTAEDDIRQNFTQLPLHKNKQECILDISEHTLSENDLEELRVDHYKCNIQASVHVSDFSTDNSGSQPKQKSDTVLFPAKDLKEKDLHSIFTHDSGLITINSSQEHLTVQAKAPFHTPPEEPNECDFKNMDSLPSGKIHRKVKIILGRNRKENLEPNAEFDKRTEFITQEENRICSSPVQSLLDLFQTSEEKSEFLGFTSYTEKSGICNVLDIWEEENSDNLLTAFFSSPSTSTFTGF

SEQ ID NO: 17370 - DNA, 3050 bp, Homo sapiens
gatgccgagcccaggccggttccggcgaagttaaaccctcggagctggcctcggactgctggggcgttaccccttcggccacccccgctgaccatggcagtgtttcatgacgaggtggaaatcgaggacttccaatatgacgaggactcggagacgtatttctatccctgcccatgtggagataacttctccatcaccaaggatcagtttgtgtgtggagaaacagtcccagccccttcagccaacaaagaattagttaaatgctgaagaagccttcaggaatccaaatcctgaacatttggaatgagcccagatagaaatatcgaatgcaaagctactggcttcacagagacaaccatttatgatttgctgttctgtaagagtgtggattctttctatcaactgctgatatcatcttcaggaagcaagtccataacatgacatatctggattttgtgcttagaaccttaaattggaagcattcttaattatgcatctaaatttaaaagaagataatttcaaaacagtgctttctttcccttggtttcatcattttcatatcttaaaccaaattacttcggtatctgacaacagcatcatctacctcagtcattaggatttcttaataaaaaagagattgtatttttgacttggttattaagattattaaaattagcccttcctttgaaatatgacatcagctttgctgttctaaatttaaaattagttgcttcatcagtaccacacttccagtttctataccaagccagtctcctcagttttcccattagaatggacatgttctgttcagcgtgtcatttctgtaatgcttcatgcagagagtttggtcatagtattaaagagaaaatacagtgaggtcacaatgtctccagagctaaaagttagtgaacaagaaagaaagtccaaaatgaagtgatgaaagaatgaggacttttcttatattctgcatatttcttggaagtcaggacaagatgaaaagaaaaacatccaaaagaagtgaaattggtgacagaatgagaggagcaaagcataccagtgtagtaagtggaatgtttgaatgactttgccaggtcagagcaagtaatatttctgtatctgagtttttgtttgtgttttgataaggctaatgaaattgcattccaggtaggggttaacgtcaaatttccatggctggtagctgtgcttttggcatatcacagtgttgtgtcactactacaaggtaaagcatctacagcggagaatgagcttgaaaatgagagacctattgtgaataaatatgcccatgagagcatatttaataagcctctataacatgcagccaaaccagacattcactcctgcagagaaatgttgccctggagaaaaagagatatataaagataggctatcacccttcttttgctgcagtactaagcatagcaagaaattagaatcatttacattggaaatttgaaaattccctttatatacacaactttactgtgtataaataaaaaatatttattaatgcagtgatgtccgtcaggttgttttaggaatggcttctgcaattagaaaaatagcttgctagaatgtaaatgttctgttactggtaaatgtactgcacacattcattggacgttaaaacaagtgagtagccttttttacctgccagcagcatggctgtgtgcagccactaggctgagacaataaattaccaaaaattataatgtaccgagctgaaaatgctcagtacattatgtggcatattctggatgtgatgagaaatctcattgccatttgggacactgacatcccagaagtaatccacaactgctttgcaaaagcaaagtgactgctcagatgaacagagcagagtactcactcactatggtggcatcagctgcaaagcaaaattaactgtcccatgatcatgttgatggttttctagatactgccaacatgttagctctttctgatgctgatgagtttcaaacacgaacagacacccttgatgtgggtttgctaagaacatagaagaacaggaagaaaagttgccaggttcacacatcccaggaaaaaagaagcataaaaagcattagcagtcagtgactgatgataatgctgcaataatgggaatggttttgtttctaaaccaaattatttctaaatcaaatcatttattgctttgtttctaaagcagttgagtcactaagtttgtgaactgtaggagaacacatcaagattgaatcctgtgttaagcagaaggtaaaaccagagccaggcgcagtggctcgtgcctgtaatcccagctactcaggaagctaaggcaggaggatcatgtgaggccaggagttcaagactagcctgggcaacatagaaagaccctgtctctaaaaaatcttcttttaattagcaaggtgtggggccttgagcaaattgcttgggcccaggagtttgaggctgtggtgagctgtgatcacaccactgcgttccagcctgtgtgacagggcaagacctcatgcctaaaaaataaagagaaagcagagtaaaactggactctgagatacgactaaagttctgtgtgatacgtgtgccttatttagctcaagacattcctggagcacctataaaaactgacttgtaatccaggctatgtctctttagcttcgtaatctttggcaaggccattggattcttcagctgtacaattaggagactcgatcaggtgattgcctttctcagctgtcagttctctaatttcaggcttggtagcttgtaggaactgaaattgcaattaaaacctttataaactcaaactaaatcatgaattacagaaaaagtccattcttccaaaacttgatgttaccacacttacaagtttaaaatatgaagtcgactgtttaaaggattctgcatatattctagtgtgcacattcagaaacatttttcttggaaaaagtacccaacactttttataactgcacatattaatttattgccagaataaattgcattgcatgctaaataaagtcagataattcaaatcc

SEQ ID NO: 17371 - DNA, 3265 bp, Homo sapiens
atatatagggtcttatatgtttcttaataaattgatcccattactttatagtcacagctcctattagaagttttaatgaagactctccatgagcttaggcttcaaattacttgttttggaaaaggtcatcttgtcctttataaactgtaaattcatatattatttagctttaatatgcaaatacaatatccttgagttcatcctattaatttagaaactcccaggaggtaagatgggtggttggagcgcattctttggttattttcattagcattaagtccttattctttataggtggatttaattcttgaaaatattcaaaagtaattcagagtcaaggtgttggggatggagagaaaggaggaacagagaggaaaaaaattagcatttgttgagtgttgacgatttgtagagcattttgacaagcacttaatatacatcatcattcattttgatcctcttaattaccttgcaaagatttgattcttttttttttttgagacagagtcttgctctgtcacccaggctggagtgcagtggcttaatctcagctcactgcaacctccgcttcctgggttcaagtgattctcctgtttcagtctcctgaggaactgggattaaggtgtgtgccaccacacccagctattttttttctatttttagtagagagagggtttcaccatgttggccaggctggtcttgaactcctgacctcaagtgatccacctgccttggcctctcaaagtgctgggattacaggcatgagccaccatgcccggctgattttattatttttttaaaaaacatatgaaaccaagactcagagaagtaaaataactcatttaggatcatacagaatggtaaagtcaggattcagacatagatttctcccactccattattcattttttacactacgcaatgtatacaatagcttttggttaacaaaggcaaggtgactataaaatcgtgagattaaagcatttcaattttttgatatattaccgtttatgaagagtagagaggtttttttgtgtaaataaaaaaaactgtaggaaacatctgtaggaaatatcaagatttaatgtttaactagattttcaaggtaaatttacatttatttagctaagtgttatattaaagttatttgtcataacatacctcaaatatttatttatagttcatatttaatacagaacaaatctagtcttcgtgttaacatcgggtctcggcagagtttctgaaatgaaacattatgaagaaaggtagttcagatttgttgaatctgagctttagggatttcaagtgtatttttttttattttcctctttcagaatattaacatctctattagttttttgatgaatatgagttttaagattcctaataagggttttaagtgaacacacataaaatacatatcaaaccactgatcccgattgttccctttagtcgctgtgacattgttacctttagtggcatgcacttggaaatgtcagccttcagagaagggggagttacatggagtaaggcctcatggatgtcatggtggtcctccatgttcaccaaccaccaagaaaattcttcttcagtccacaattccagcttgcgctctttggtgcacttggagccagaaagtgtctttttggccctgttttgtagaaaccgtgcatgtaccaaagagaaactttagagtttggatggagctgaagcattgatgggaattccctagtgcacccaggagcaggaggcaagcccaagcctcgggtggtagccaattatattttgtgatcgtgtatgtacttaaaacatcagagatgacacagcacatgaatataactattgatatgtaggtgcatactgagtattctaagtagcagatagataccaaaatactgtataatcccagaattgcctaaactgcaggtttgctagttctctgttatacagaccagtaggtagcctttccacacatttgtgttttctcttccataataagagagtgctgcggctggcaggcaaaggtagttgcctcatgcactttatctttttgtctttttctcttcttcatcttttgggatgctgctggctgtatctgtcccaaacttcttgttgcattagaatcagatctgtgtatgtttgaggaggttttattttaaagacttcagttttactcagctctaggaagggtcaaatacaacaacaacaacaaaaaacagaaaacaaaaaaccctccctaggtgtttgcttttgcaacattaaaagaaatgccttggtgctaaaaagtatttaatgacgcatgttcaccactaaaaagcgccactgaattcacagtatttcactgctaagtggctgcatgtactttgtgtttggaaatctgaagaattttccagaaaacaagcatccattactctcatttcaacagttactccatctatgctgcaaaaatgaagcgtgaaaggggggatacttttctatggaatactcagtgcttttgatatttattttagcaagaataatcagatgccaaaaataatttcagagaaaggtagaaaaaatatttcagataaccttttcttatttcttctccaaaaagattacacccatgtaaggtatttttaacactggggttttgaaggtgttatcttttctggtatcctatcactacatgttaaaattgaaggagaaaatattattgaaactaaagtaattgcagggacacattaaaccaaaggggtgaacaaaagaggtttaaagtttgtatctagaaatgaaaaataagaatcattggtaagactagtaccgattattggcaattggtaattgataattggtaagagtagtaccaaatagtgggcatttttcttaaaatacatacctctaccccaaaccccaaatgttaatttagaatcctgaaacaggcaggtcaggctctgactcttttgtttaaggaaatgtaatactgtgtcaactaaactggcattaggttcttagtggagtgtgtgtttgtgtgtgtgtgtgtgtgttttgtgtagaggtatgtttgtgatgaaaggttttgcactgttgcataaagaagtttgattttgtgatttttaaaatgatattcatttggagactttttaaggtaatttaaaagatgtataatttccgtgtgtttaatgaaatctgttgtcgatgtactaatcttggtttacagcatcttgaatacttgattattgaaaattaagaaaaaagttaaaaatgaataaagtgtgttggactg

SEQ ID NO: 17372 - DNA, 2572 bp, Homo sapiens
  CDS (260)..(1582)
gcttccggctttcgctcgcttccatatccgctcctctagtcgccctccgctggccccgccttcgtccccggaagattgggtcctctggcgagccactgtttgccgtttgatcgggcaccaaataaagtttctttattcaaaagcactttttttttaaagccacaccacccccattctcagctcctccttcgcggcggtaccgcctctgtttctgcggcgattgaacagccgagctttgcggccgggatcgcggaaagtgatggctgtcgtcccggcgtctctctcaggacaggacgtgggatcatttgcatatcttacaattaaagacagaataccacagatcttaactaaggttattgatacattgcatcgacataaaagtgaattttttgagaaacacggagaggaaggcgtggaagctgaaaagaaagctatctctctcctttctaaattacggaatgaattgcaaacagataaaccatttatccccttggttgagaaatttgttgatactgatatatggaatcagtacctagaatatcaacagagtcttttaaatgaaagtgatggaaaatcaagatggttctactcaccgtggttgttggtagaatgttacatgtatcgaagaattcatgaagcaattatccagagtccaccaatcgattactttgatgtatttaaagaatcaaaagagcaaaatttctatgggtcacaggaatccatcattgctttatgtactcacctgcaacaattgataagaactattgaagacctagatgaaaatcagctgaaagatgagttttttaaacttctgcagatttcactgtggggaaataagtgtgatctgtctctctcaggtggagaaagtagttctcagaataccaatgtactaaattcattggaagacctaaaacctttcattttattgaatgatatggaacatctttggtcattgcttagcaattgcaagaaaacaagagaaaaagcttctgctactagagtgtatattgttctcgataattctggatttgagcttgttacagatttaatattagccgacttcttgttgtcctctgaactggctactgaggttcatttttatggaaaaacaattccatggtttgtttctgatactactatacatgattttaattggttaattgaacaggtaaaacacagtaatcataagtggatgtccaagtgtggggctgactgggaagagtatattaaaatgggtaaatgggtttaccacaatcatatattttggactctgcctcatgagtactgtgcaatgcctcaggttgcacctgacttatatgctgaactacagaaggcacatttaattttattcaagggtgatttgaattacaggaagttgacaggtgacagaaaatgggagttttctgttccatttcatcaggctctgaatggcttccatcctgcaccactctgtaccataagaacattaaaagctgaaattcaggttggtctgcagcctgggcaaggggaacagctcctggcctctgagcccagctggtggaccactggaaaatatggaatatttcagtacgatggtcccctttgacttgatttaggagctctcagttgcatagaaagatctggtgagcaccttttcatccccagaaaaggagcacgtgaattgagtcgcctggcggctctgtacgcgctcagggaagcttagcttcttggtgcccatctacgtgcactggatgatttttcttttgaacattttgccccactacactgttttggggatagctgggttaagcaagttaaagatatttacatttatattggaattttagcaactttttttcaggttaaatatataatttcaagtgcttttaatgaacttatttttaattggctagggagcaaaaaataagtgagttctgcttttagttagttaaccttgttcttttcttaaatagtacactgcatggtatttaatattccaggaagcatgggattttattttgcttgattttgggcacatgaaataatagctctaggaaaatgcgcatcttaatgactctttgtaaagagaggcatttcttacaactgtgatgtttgcttacataaaagttacctcataagttaattctaacttttattcttgaattttatttcatttcaatagcttgtttcatttgcacgcctttgtattttgattgacctgtagaatggatgttaggaaactcaaaattgaacacagtgaaacaaatggtatttgaagaaatgtaatatcttttatattctatttatgatatccataatcaaatgagattattttaccacataaatgttttaaatatcagatttttagtttgcagttttaggaaaatgctttagatagaaaaggttcttatgcattgaatttggagtactaccaacaatgaatgaatttattttttatattcttacacattttattggtcattgtcacagatagtaaatactaaaaatttcaggtcagtttgttttgaaactgaaattggaaataaatctggaaatgttttgttgcactaaaataataaaatgaattgtactg

SEQ ID NO: 17373 - protein, 441 aa, Homo sapiens
MAVVPASLSGQDVGSFAYLTIKDRIPQILTKVIDTLHRHKSEFFEKHGEEGVEAEKKAISLLSKLRNELQTDKPFIPLVEKFVDTDIWNQYLEYQQSLLNESDGKSRWFYSPWLLVECYMYRRIHEAIIQSPPIDYFDVFKESKEQNFYGSQESIIALCTHLQQLIRTIEDLDENQLKDEFFKLLQISLWGNKCDLSLSGGESSSQNTNVLNSLEDLKPFILLNDMEHLWSLLSNCKKTREKASATRVYIVLDNSGFELVTDLILADFLLSSELATEVHFYGKTIPWFVSDTTIHDFNWLIEQVKHSNHKWMSKCGADWEEYIKMGKWVYHNHIFWTLPHEYCAMPQVAPDLYAELQKAHLILFKGDLNYRKLTGDRKWEFSVPFHQALNGFHPAPLCTIRTLKAEIQVGLQPGQGEQLLASEPSWWTTGKYGIFQYDGPL

SEQ ID NO: 17374 - DNA, 2728 bp, Homo sapiens
  CDS (123)..(2234)
ggtggctggttctgcgccggatccgggagaggggcgggcgccattgtgcttcgctgccgactgcatttcctcagtcacgggcctagaactccaaggagaaaggcggcgaaaaatctttaagaatggagtctaaaccttcaaggattccaagaagaatttctgttcaaccttccagctccttaagtgctaggatgatgtctggaagcagaggaagtagtttaaatgatacctatcactcaagagactcttcatttagattggattctgaatatcagtctacatcagcatcagcatctgcgtcaccatttcaatctgcatggtatagtgaatctgagataactcagggagcacgctcaagatcgcagaaccagcaacgggatcatgattcaaaaagacctaaactttcctgtacaaactgtactacctcagctgggagaaatgttggaaatggtttaaacacattatcagattcatcttggaggcatagtcaagttcctagatcttcatcaatggtacttggatcatttggaacagacttaatgagagagaggagagatttggagagaagaacagattcctctattagtaatcttatggattatagtcaccgaagtggtgatttcacaacttcatcatatgttcaagacagagttccttcatattcacaaggagcaagaccaaaagaaaactcaatgagcactttacagttgaatacatcatccacaaaccaccaattgccttctgaacatcagaccatactaagttctagggattccagaaattctttaagatcaaatttttcttcaagagaatcagaatcttcccgaagcaatacgcagcctggattttcttacagttcaagtagagatgaagccccaatcataagcaattcagaaagggttgtttcatctcaaagaccatttcaagaatcttctgacaatgaaggtaggcggacaacgaggagattgctgtcacgcatagcttctagcatgtcatctacttttttttcacgaagatctagtcaggattccttgaatacaagatcattgaattctgaaaattcttacgtttctccaagaatcttgacagcttcacagtcccgtagtaatgtaccatcagcttctgaagttcccgataatagggcgtctgaagcttctcagggatttcgatttcttaggcgaagatggggtttgtcatctcttagccacaatcatagctctgagtcagattcagaaaattttaaccaagaatctgaaggtagaaatacaggaccatggttatcttcctcacttagaaatagatgcacacctttgttctctagaaggaggcgagagggaagagatgaatcttcaaggatacctacctctgatacatcatctagatctcatatttttagaagagaatcaaatgaagtggttcaccttgaagcacagaatgatcctcttggagctgctgccaacagaccacaagcatctgcagcatcaagcagtgccacaacaggtggctctacatcagattcggctcaaggtggaagaaatacaggaatatcagggattcttcctggttccttattccggtttgcagtccccccagcacttgggagtaatttgaccgacaatgtcatgatcacagtagatattattccttcaggttggaattcagctgatggtaaaagtgataaaactaaaagtgcgccttcaagagatccagaaagattgcagaaaataaaagagagcctccttttagaggactcagaagaagaagaaggtgacttatgtagaatttgtcaaatggcagctgcatcatcatctaatttgctgatagagccatgcaagtgcacaggaagtttgcagtatgtccaccaagactgtatgaaaaagtggttacaggccaaaattaactctggttcttcattagaagctgtaaccacctgtgaactatgtaaagagaagttggagcttaacctggaggattttgatattcatgaactacatagagctcatgcaaatgaacaagctgagtatgagtttatcagctctggtctctacctagtggtgttattgcacttgtgcgaacaaagcttttctgatatgatgggaaatacaaatgaaccaagcacacgtgtccgatttattaaccttgcaagaactcttcaggcacatatggaagatctcgaaacttcagaggatgattccgaagaagacggagaccataacaggacatttgatattgcctaacttcatataagacagatggatgatctgtgaacataagtgtttattaaaaatggcaattaaatataaattacttttgtgggggaatgcctaataaatacattgactatatataaaatgaatatatacatacacatgtatgcctgtatatatatattcattctccagtgttgctgaattaaaattctgctggactttttaacatagcaaatccgatgtttataaactggtaatcaaaaaggttttttcttttaggtgagtgggaaagtattacccttgttttaaatatctaagcaatgcctatcaacccttttttgtgttatgattactgtagtcatatttatgaaaaaaggtttgtgttttactcttgctagtgagaaaagtgggacaaaatatacttttgaaataaaatgctatatggcacctaattattttttcttttaaaatgccttaagttgcagtctcattttgataatcatttgcttccagtgttt

SEQ ID NO: 17375 - protein, 704 aa, Homo sapiens
MESKPSRIPRRISVQPSSSLSARMMSGSRGSSLNDTYHSRDSSFRLDSEYQSTSASASASPFQSAWYSESEITQGARSRSQNQQRDHDSKRPKLSCTNCTTSAGRNVGNGLNTLSDSSWRHSQVPRSSSMVLGSFGTDLMRERRDLERRTDSSISNLMDYSHRSGDFTTSSYVQDRVPSYSQGARPKENSMSTLQLNTSSTNHQLPSEHQTILSSRDSRNSLRSNFSSRESESSRSNTQPGFSYSSSRDEAPIISNSERVVSSQRPFQESSDNEGRRTTRRLLSRIASSMSSTFFSRRSSQDSLNTRSLNSENSYVSPRILTASQSRSNVPSASEVPDNRASEASQGFRFLRRRWGLSSLSHNHSSESDSENFNQESEGRNTGPWLSSSLRNRCTPLFSRRRREGRDESSRIPTSDTSSRSHIFRRESNEVVHLEAQNDPLGAAANRPQASAASSSATTGGSTSDSAQGGRNTGISGILPGSLFRFAVPPALGSNLTDNVMITVDIIPSGWNSADGKSDKTKSAPSRDPERLQKIKESLLLEDSEEEEGDLCRICQMAAASSSNLLIEPCKCTGSLQYVHQDCMKKWLQAKINSGSSLEAVTTCELCKEKLELNLEDFDIHELHRAHANEQAEYEFISSGLYLVVLLHLCEQSFSDMMGNTNEPSTRVRFINLARTLQAHMEDLETSEDDSEEDGDHNRTFDIA

SEQ ID NO: 17376 - DNA, 2619 bp, Homo sapiens
aggatgcctggtggggcagaagtccctgggtctcgttcccgtcaggggcgagtgaaccttcacaacctcccggggctttggaatttgacttaatgatgaagggcaacatggaccactggacaaagacctggagttcccactacctgcaccgctctggccaatcccatttggaaatcagtcagcaagatccactctcctctggactctgagcccccgggaggagaggatgggagaggtcaagcgtgtgcaattctgttgcagcctcacaaccaacaagcagccgtgttccgacggctctgcgggaagcccagagggactcccgcggctcaaacgggggcagagacgtgcagggccccggggaacgtgaaggtgagagacagaacataccgtgaagaagccactgagagtgggagacagaggcaggaacagggatgacactggaggacagcaggcctgcctggaggccagcattctctacaaccttccacaaaccaacagcaaagcccgctccgggccacgtgcctggcagctgctcggccactgccccgctcctccctaggcaaaatcccagggaagcaccttgcgtcgtttccatttcctcacctcttactcttccttgaacagtccccccaagaaactgcctacccaccatcaacaactggcacagggcagatccacgggtcaggctgtgtgcacctgaccgcttcataacccctgcgtgggcagccagcaccctccatcagaaatcgtttgatcccgtggcctctgggtctccatcattcgagctcgggagcaacatcccatcaccatctcctctcctcggtgggcccctcctcgtgttcacccctgcactggggggaacccaggctccactcacagaggagccaacctctgggcagcctgccagctcgctgtgaaagtcctcacggccctgactcctcctggagctctgctggcagcacctaagtgcccactcagacctgaatggtggcaccagcggatgcatgaaatgccagcccagcacccgccccggtctctcccagctcagcagcagacaccgctgtgcactaggcttgagggccacctcccaggagctgcccctgactccattctcttgaccggtctgttcatcagacctcgaccacggcccctgcccctgctctcctgcccgttctcccgcctggcctaggagaagccacagcaaaccccacgttccccgccacaaagagaaggaagtccagagtcagtgccaggctgccacggctcaggggcccagcccaccacagcctttcatgcccccccacacactcctgcccaggagctgaaagagccccacactgccgccagcccctacccagccctaagactcttggcagcacatcttgctgccgggaagcctctgacacggatcgtcagtgcacgtccagctcctccaccaaaatcgaagcttctcgtgggcagagacgccacccggcatagcagcgcatccccatcacccatcaacctgcacttggcaagcacctccaaacagagagagcacacacactccgccggcagccgaaggagctgcaggatggtgctgagagtgggagcaggccagaacgaagctctaacacagaagagccgggtgctggggagagacggggaggacaggtgggaggactcaggcccctccccaggcaggatggggaggccacgacacttgggccagcttggagggtggcgggggaggagaagagcagatgcagactgcacctgctgggggtgacgacggtgcggcgtggccagcccagccactggcaggcccacaggtcagctggatggggcagaggtggggcccaccccaacttccaccgggccttgcctcccagattcctgagccaaggtttaataacagaaaagatggagctctaggggagcaagggacgccgaccaagcaagccgcagcagagaggactgtgctggagccacatcggtggcttctccgggaggtaacgtcctgtgcagactcccagccacaccctggcgctgcctcggctgcctccctgaatgtcagcggcctgagggaccccactcggcagggagcgggggctgcttgtgggaacacacagggtctgattccaagtgagaggggtgactggtgtggcttcagacggcaccaaccacgcaaaggatacacagcttctcgtcgtcctgaaatgtgaagtaaagcttaacaaagaaggggtgatccaggcgcgacatgacatcccgctctctggttacataggggaccttgttctcttttatgatatgtcgcttctccagaattttaacttcaggtgagagagaagtgagttactatcagaaacaacaaaaaacactaaagacatgactcacaaaggtaactggtacaaattaaagtctttcaaacattgtacacaacagcctggtggtctctaaagccaacagtgtcctgtaccctgaaatcagcacagaaacaccggccctgccaccccagccgccctgcacggagccgcttgccctgctcccggacgcacagctccctgcagcccatactcactcgcatattctctggaggttgccagttctcgagccaggacaacctggttgggaaag

SEQ ID NO: 17377 - DNA, 2473 bp, Homo sapiens
actcttcgctgccttttctgcattcctgacttctaaaagatgccttaaggcttaagggatgccatatttttgataaggcctctggtaggtaccacagccaagaggaccagagatcatggcccttccagtatgggggcgatagagacatcggggacctgggatatttgttttgtgcagagatctcctgcctgctgtcaccatgagaaacagtggagtggagtggatggatggcctgacttgaagaaagggccctggaaagttttctactttgctattttgaaattttttcccttcttatagagactttgaaatacttttgtaaatgtgtgtagttgttaatggaactttgccttttgcaaagtcggaaagagtcggcttttccatgtgaggctcgcagagctgaaaggggagctacgtccaccagcctgtgggtcttttggttttttttttgttgttgttgttgtttttttaagatggagtttcactcttgttgcccaggctggagtgcaatggtacaatctccgctcactgcaacctccgcctctcgggttcaggtgattctcctgcctcagcctcctgagtagctgggattacaggcgcccaccaccactcccggctaatttttgtatttttagtagagacagggtttcatcatgttgtccagactggtctcgaactcctgatgttaggtgacccgcacacctcggcctcctgaagtgctgggattacaggcgtgagccaccactcttggcccagcctgtgggttttgatggggatgtcttggctgctgtcttggaggcacagtgtctccccatgtgtgtgtttcttggcccagagtgactcccagtattcctagtccttccccacaggatagtcacatccattatttacttttgttgtcagctgggaggggaaactgaagcctggacacgtctccccaagggctcagtgttcatgggtgtgtaagatccattgactggaccccagaaagcaccctgaggggcagtgcagagagagcccaggaagcccctccactagaggaggcccttggtctggctgaggaccacgtccaccctgggcctccaggcctgcttttcacattaaaggcggggcagtctcctctcaaaggagttctcccttgagcactttgggctctggggcagagttgggctaggagatctgggtgaatcctttagtcacagctagtctcatgttcctcttctgtcaaaggggtcatggccccagtgtgtcctacctcagagttgtcagggtcaaagtaacaggcactgggacaaatatgaagcctagctttgtgcttcctttcaaattcagggcctcctttctactccattccagcctttttttcctgtcagaatccctcaggaaggacctttatcttctggagtgagtggcagttccactgggttcagtgaaagagtcgcccatggggctctgttccccaggagtcctttgtattttggtgaacaaattcttaccaaagcatgagattcggactgtagaagttcagactgcctcagttcagactgcctcatggggcagtctggaggtcagctggcttctggtgtctctcatcacaccactgcggacgctgtctgtagagcagccttggtgtgggtgactctgaagctggagtgatgggaccccagctatccttgttttttaccgccttgtctggcactgtgaccacgcttcagggctgcttctgggggtcttggtccctggatgtgccatttccttgcccttctgaccctcacacttcttccaaagtcttgagcagagttgggggccaatggtagcattgctgtcatctctgggaggagagtgagtatacaagtcagtgacagttcagccaggctcccttgggtttgggaagaggcactgcccttctgtgctgtggatcctgcttgtctgctctggagtccccccacccttgccaggagcttcacaaaccagagacgggctgtcagcaagagctcagacaggatgtggtgcaagtgcaggtgcacgagtttaaccctcagctgcaggagctagtctcaggtgttctggggatgcctcaggctaagaattttgccgactttctgggcttggttggctaatgccaaatgcccctgcttaaatatcacaaggtgctgattctccttttttctttttttcataccaatgtgctcaaactttgagctaggtcttgtgagtttgcctagcactcagacctgtttaagtaacgttctttacattgaaacaagtcaaccgaagctttgtggtgcaggagctgagggtgccccagactcagtgggagccctggttgggccccaaactctcccagcagggtcctcggtttcctcatttgtgaaataaatgagtgggccacgacgttaataagcccaagagaactgtgaaggtggtagtcccttgccctaattggtgctcaataaagttgttggcataaacg

SEQ ID NO: 17378 - DNA, 5232 bp, Homo sapiens
  CDS (8)..(1111)
atgcaaaatgtcagacacaggtagtccaggtatgcagagaaggagaagaaaaatcttagatacgtcagtggcatatgtgcggggagaagagaacttagcaggctggcggccccgtggagacagcctcatccttgagcaccagtgggagctggagaagctggagctcctacatgaggtggaaaaaacccgccactttttgctgctgcgtgagagacttggtgacagcatccccaaatccctgagcgactcgttatcccccagcctcagcagtgggaccctcagcacctccaccagtatctcctctcagatctcaaccactacctttgaaagcgccatcacacctagcgagagcagtggctatgattcaggagacatcgaaagcctggtggaccgagagaaagagctggctaccaagtgcctgcaacttctcacccacactttcaacagagaattcagccaggtgcacggcagcgtcagtgactgtaagttgtctgatatctctccaattggacgggatccctctgagtccagtttcagcagtgccaccctcactccctcctccacctgtccctctctggtagactctaggagcaactctctggatcagaagaccccagaagccaattcccgggcctctagtccctgcccagaatttgaacagtttcagattgtcccagctgtggaaacaccatatttggcccgagcaggaaaaaacgaatttctcaatcttgttccagatattgaagaaattagaccaagctcagtggtctctaagaaaggataccttcatttcaaggagcctctttacagtaactgggctaaacattttgttgtcgtccgtcggccttatgtcttcatctataacagtgacaaagaccctgtggagcgtggaatcattaacctgtccacagcacaggtggagtacagtgaggaccagcaggccatggtgaagacaccaaacacctttgctgtctgcacaaagcaccgtggggtccttttgcaggccctcaatgacaaagacatgaacgactggttgtatgccttcaacccacttctagctggcacaatacggtcaaagctttcccgcagatgcccgagccagtcgaaatactaagtgactctgccgagtgccctcactcgccttcgagagataaagaaagcgttacctctcatttctctttgtgattcttgacggtgactcttgtatgtaatcctgtggcttaactacttctccctccttgtccagcacttttctagctctcccgttccccatctccattgctctgtactcttttcttttttcttgtgctgaggatctcgttagtagcatgcggcctaacaaaaggaaaaaatgtttttaaacacacacacacacacacacacacacacacacatacacagacaaaaacacaaaaactctgaggggatctggtgaatctccaaattattgtgggtgtactttggcttccttttgtatgataggtccccatcatgaccacctctgatgtctgtgctgctgtcaccaggcacctttgtttttcaagacaacatactttttttttcttttctctgtttgtgatatcactttaatttttcttgggtggcttagagactaagggaggagacatctggcctttttagaacctgagaggaaaaaaagagtctttttttcccctctgtctctttttgccatggctaatccctgcatttccattcagggaaaaggtggtagtgagcatagaactgcaacagttatattctgagtcaaagttggggctttttacggcataattatggaatttttatttactggtagagaggagacgagaggctttttcagtgggcctgggacagtggctgctcttgactttgtgtgaagggaaatgccaaggatgcttctggtggacttcaggggaccccagggtttggccgtgggccgtgatggcagcaggcggtgggatgcttgtagctcctcacagcaggattcctgcccactgttttttctctgttgggagggaagctcttttctaggagtgtctcagttctgcttttggcattagtgatggtggtggtacagttggaattagtgccatgtcatacacaaatgttccacaaggcgggagtgtttcactttctggtgataaacttgatggtcattgttatgattaagataatgccgggcaggccgggcacggtggctcacgcctgtaatccaagcacttggggaggccgaggcgggcagatcacgagatcaggagttcaagaccagcctggccaatgtgatgaaaccccgtctctactaaaaatacaaaattagtcgggtatggtggcacatgcctgtaattccagctgcttgggagcctgaggcaggagaactgcttgaacccaggaggcagaggttgcagtgagccaagatcgcgctattgcactccagcctgggtgacagagcaagactctgcctcagaaaaaaaaaataataataatgctgggtagtgaccttgtgattgttacagctccctttgatcaaagaaatatagctttcaggcataaacctggaagtctccctctgaatccagcagttgttttcattgatgcttgtcaggttgaagatgctttcagtgatgctctctatactcataaataagcaaatgtggcaggctttgctttctggatcccaggattaaaactaaccgtgaccactactccaaacaaaacacaatatgcctaggggcacggatgaacgtccagggagcccgggccccaggctttgttgcgtgttccctgctcctctccatctggtgtggaaacactgcccagggagaaaggaggaagctcactgtggacagtcttctttccttctgacagaccaggtcatctggcttccgagatcatcagagaagataagtctgtctctttcagctgccagtaagttttccaggatgagaggggaaaaagaaagcctccagtgacttcagttgctttgccagttgtcttgggattgttttacaccatcctttacttcccttgctcagacctctctgtttcaccattgctcaggcattcaggaaagtatctgctcactcccacttggtgagtcctcggccttgaggttgctgactctcaggcgttaggcagctggatgacttcccgcttcacgcagcaaaggccaggggcttgcgcgcctctgcagagttgttgctagggagacttgtgtcatcatccacaaccttgtttctcacttcctggttgggctcatctctgaagaacaggtctcccagcttcgctccttatcactgcattgtgaagaggaggaaaagtgaatcacggagagagaaaggaaaggatagaatcacaggctgcgtctgcacctgaaaagtgacccgcggaaactctatggcggattttttttttaactttcttcttcctgttaaaacataggtcactaactgtgatgttatttgttttctaagtggtatgtgagattttctaatgtagttagaagtttcattgtctgatggacacaatatgcccttccggttctattcaaaccagcaggatctgtcggtgcttagagatggctgcctggactggaatcaaatctaatttcagggaaatgaagatggaatttgaaggtcacttttaaaattaagtcattgatgctgctgttacagagtgtgacagaggatccatgtctgtgacacaggacggtgggaagcctgagagagagtgaaattatgtgatacactgaaatgacttttgtttttcttctaactcatacaaaactggtttggaaagtctttgctttggaagcgtcagacattagaacaggccaaactggactgtctgttcatagcgtgcctgaataagaaggcctcttagggagccagagggagcagagtggtcgtgtcctgcgtgctcttcaccctctggggcgcccctgctgcggctggcaggtgcggacagcctttgctggtccccagcacgtccagggtgggtgctcccttgcccgacagaaccatccccactgtgaggctgtgagagatttgtggcaggaactgtttatgaggctctagttgttgctgttgtggcgggaaagttaagaaacatagcccttaaggaaaccacctttatgtattttcttaaagcacgcctttaaataagcaaaaactttaaaaggcaggaaagagaattcttaggcaaattcagagaaataagtgctagttaatactaatcacctcctcctctgtctctcatcctcctttctcccatcaaagcaaaatatggcctcaccaccagccccaaatcagtgctcagaccctctctgtgtctgtgtgccctcctgggagtcagtcagcgctcaggccaggactgtgcagggccagccagcccatgcgctagtcaggagcacaggcaaggggtgcttgtggcagtggccgggcacctgagccccagctcgttgttaaacgtgctgacggcaaggggcaatggagtgagtttcccaactaagaaaccactattatatattttttcccttcagtcacatagacttcagacaactctcctattttttatggatttttcagctcatttcagatgaaggaactaagtcattgtgaactgtctcttgagatctaaaaacaagatgacttttcctggcacatattccaaagcaaagactttgttgcctgctgcttattgtctaatttacagggatatttaattttgtcaggtctatgtatatttatccagctatacttacttgcacagtggattggagagaaaggattctccagtgtgcacactcatcggtactctttctgcatttccctcgtgctgtgtcccgctcgggttccaatggacagtatcagggcttgtttgacttaggtctttcagttttcctttcggttcccttttaaaaatgtgattgttaacctgcctcttgaaagattcaaccgggtgtggtggctcacgcctgtaatcccagcacattgggaggccaaggcaggtggatcacctgaggtcagaagtttgagaccagcctggccaacatggtgaaaccccgtctctactaaaaatacaaaaagtagccaggcgtggtggcgtgtgcctgtagtcccagctacttgggaggctgaggcaggagaatagcttgaacctgggaggtggaggctgcagtgagttgagactgcaccattgcactccagcctgggtgacaaagcaggactccgtctc

SEQ ID NO: 17379 - protein, 368 aa, Homo sapiens
MSDTGSPGMQRRRRKILDTSVAYVRGEENLAGWRPRGDSLILEHQWELEKLELLHEVEKTRHFLLLRERLGDSIPKSLSDSLSPSLSSGTLSTSTSISSQISTTTFESAITPSESSGYDSGDIESLVDREKELATKCLQLLTHTFNREFSQVHGSVSDCKLSDISPIGRDPSESSFSSATLTPSSTCPSLVDSRSNSLDQKTPEANSRASSPCPEFEQFQIVPAVETPYLARAGKNEFLNLVPDIEEIRPSSVVSKKGYLHFKEPLYSNWAKHFVVVRRPYVFIYNSDKDPVERGIINLSTAQVEYSEDQQAMVKTPNTFAVCTKHRGVLLQALNDKDMNDWLYAFNPLLAGTIRSKLSRRCPSQSKY

SEQ ID NO: 17380 - DNA, 2377 bp, Homo sapiens
attaaaaaggaagctcaaggccaggcgcggtggctcacgcctgtaatcccaacactttgggaggccgaggccgacgtatcacgagattaggaggtcgagaccagcctggccaacatggtgaaaccctgtctttactaaaaatacaaaaactagccgggcgtggcggcgcgcgcctgtaacccatgctactcggaaggctgaggcaggagaatcgcttgaacccgggaggcggaggttgcagtgagccgagatcgcgcctctgcactccagcctgggacagagcgagcctccgtctccaaaaaaaaataaggaagctcaagatgaagagtcagaagtggtaacttgtttgttgcacaagaaacaaatttagcattctatttaggggatccagattaccaaaaaaaaaaaagaagtgaagttatttctgcattaagtatattaataaaactttatcactaaaaacaattctgtaagaggaacgccaaggaaaaaaatatttgagtttttagagaagtcattttttaaacttttagaggttgtgacatttaagtaacataattttatttagtacctagtatgcaaagacattgtactgggcatggcagcaaatagaaagctttgtaaatcgcagtgtcccatctaattaacccgcattctaacaggtggttttattttgctggaccgcaccacagtcaggtaacaccaagaatatcgctaatgtaattttttaagttgatatatttaggattccataaaagtcactgaaaataactgagagcatgacatgtcacaaaacaagggaaagaaatcattttgaggatcagtcgctttacatcttttgtaactaatttaatccccaaaggaatccaataaagtaaaagttattctaaattgaattttaagcatgagaatgtggaaattactcgtcaaaagtcaaaaataatcgtgcagcagggcaaagactaaaggctggcatcagaatccatattcttttcactgttgatgtgctagggctgcaggaacaaaatactgcaaactaggcagcttaaacaaatttattgtcagaggtctgactggaagtcccaaatcaaggtattggcagggttgattccttctgagagctgtgatgggagcctgttaatgcatctcagcgtctaggcattccttggcttgtggcagcatgcccccgccagtcttcacatgacgttttccatgtccgtgtctgtctgcacacttagcgttctttttatgaggacatcagtcatattggagtacagtagacgctactttaatatgacctcatgttaactaatcatatccacaacaaccctgtttccaaataaggtcacattataaaatactggaagtgaggtctttaacacatgaatttgaaagggggacacaatttaacccataacacactgtatcctgaaataactatccaatgtaatttttttaaaagacacaaaactagccgaaattataaaaggttatgattgcaatcctggtatccagttacattctccctcctgcagaagctgtggagaatcctgtctcagaaaaccaatttctattttgtcacatgtccatctatgcaaaatacatgtactttgtccctgacatagggcaacaatgctgaatttactaagactcatttttgcgcatggtttgatagggaattaagatttactaggtattctgtcattgtcctcattactgattattttaactgtgtctcaaacacttggatagtacactatagtgttataagctgtttgacatgtcgcttcctaaattctcaagttatatatatgtgtgtatatatgtcatgtaacaggcacaactgttttcatgtgtatcactttattgcacttcacaggtatcatatgtttcttacaaagtggaggtttgtggcagccctgcatggagcaagtctgtcagcaccatctttctaacagtatgtgctcacttcatgtctctctcacattttggtaattcttggaatgtttccgttattaaatcagttatagtgatctgtgattagtgatctttgatattactgtcataattgcttggggggcaccatgaaccacccctatataagacagcaaactgagtcgataaatgttttatgtgttctgaccactgcactgaccagctgcctccctatctctctccttctgctcagacctccctatccttgagacacagcaatactgaaattaggggccaggcatggtggtggctcatgcctgtagtcccagctacttgggagactgaagcaggaggattgcttgagcctaggagttcgaggctgcagtgagctgtgatcacgccactgcacttcagcatgggcagcaaagcaagaccctgactc

SEQ ID NO: 17381 - DNA, 2886 bp, Homo sapiens
  CDS (326)..(1057)
tcatgataaaacatctgtttccactcatactcgaagtggtaatctaaagcggccaaagattggaaagcggtttcaggattctgaatttagcagttctcaaggtgaagatgaaaagacctcccagacttcacttacagcttcaataaacaaattggagtctactgcacgcccatcagagagctcagaagaattcctggaagaagaacctgaacagagagggattgaatttgaggatgaaagcagtgatagagatgcacggccagcactggaaacccagccacagcaagagaagcaagatggtgaaaaggaatctgaattagagcctatgaatggtgagataatggacgattctcttaagacctcacttataacagaagaggaagactccactagtgaagttttagatgaagaattaaaattgcagccttttaattccagtgaagactctacaaatcttgttccactggtggtagaatcttcaaaaccccctgaggtagatgcaccagataagaccccacgtatacctgactcagaaatgttgatggatgaaggcacatctgatgaaaaggggcacatggaagagaaattgtccctacttccaagaaagaaagcacatcttgggagttcagacaatgttgctactatgtcaaatgaagaacgatctgatggtggttttccaaactctgtgatagctgaattttccgaagaaccggtctctgagaatttgtctcctaatactacttcctcattggaagaccagggtgaggagggggtatctgagccccaggaaacatctactgctcttcctcagagttctttgatagaggttgaacttgaagacgtgccattttcacagaatgcaggacagaagaatcagtcagaggagcagtctgaagcatcttccgagcaactggatcagtttacacaatcggcagaaaaagctgtggatagcagctcagaggaaatagaagtggaagtgcctgtggtagacaggcggaatttaagaagaaaggccaaagggcataaaggacctgctaagaagaaagctaagctgacctgaaggaagaagaaagtggatgataaatcctcttctttgtaacatagttgttgtttttaaaatatggtaattaataaacagcatggggcacaggacaaaaatttccaaaatttcaatttgaacttacttactatgcagttttttgcttccctttagaacgtagaattcaccattgtttttaattttccaggctatttttggtaaatgcaattttttatttttattaaccatgtttcaattttgggaaaccagatcatattatattttctttatcaggtggtacatctgaccattatttcaaaaatataattaaaaagctgtgaaagtagtaggatttccattacttataaggatcacagaaatcttttatactaagggttttaatagtaaaacttggtgagggttctagaagttttaaatttcaaaactaatcaccaattttttaaaatgtaggcatgcctaaacaaaaataagtgtcaataaattagaaaaaatataacttcaagtaaatgagagcacaaaaacagaaacttacggtcaaaggttcatgaagatattttggttttggcctcttaatcctagatatagatgcagttttttcctttgacttcactatctatggaaaggtacacataaaatctgtttctgattcattctatcatctgatgttaacagtactgtcagggatttaactgtggcatgtggggactaattatttaaaatttcatttgaagtattagtttgctgtaattttttttgtctgcatatgtgcagacgcctagaagtttagactttcacctttaatcaggtaaaaatcacaactatactttggagacatggtttaatttggacttctggtcctgatcagatagataaattaagctggagattttacttttatcccaacccagttaacatctatatttcagaagtatgaggctccttcctaaggcatctccttaaatcttgccacctccctaattctacagtcttatttatattcccccacagctttcatctacttctgtaactcatggagtgattctccaatcaacagatcttcctgcctgccggcttatgcccttgatgtccatttttgggtaggtttggaggtgcaccccacaatgttagacctatatggcaggagtaaaactgcccccagtgttagacctatatggcaggggtaaactgcctttgggggagctgtggttacaagggcttcaatcatattggaggcttcaatcatcctttgatttgtactgagtactggttgcaagctggcctgttaagtatatattgtgttgccataacaaaggcctaggaaaatttgaagaaaaaaaacactgaactgttattttttgtaatttatttaaaaatggacaaaatggttattagaatccaaagataatctaaaaacagttctactctttggaaatattatgtgtactcaaatttgcacttaagttggagaatgttttgagaccatttaaattgttttaaaaatagcttgatcttgatccttatgcaaaagaaactaagactttgtgtcattatttgaggtagctaaggactgatgttgaaagtgtattcagtctatagtaagctgatgtcaggtcagtaaattttgtttggggatgttggtattttcgatcaagttaaaatcttaaagcagacaaaaatagtaaacgctcctatttgtgttagattttgaacaattgtattaccctatattttctttaattagtcaaaggtaagccagattatttcattctaaatgaaaattaaagcactttggccatttattttttcaacaaatgctaatactaagt

SEQ ID NO: 17382 - protein, 244 aa, Homo sapiens
MNGEIMDDSLKTSLITEEEDSTSEVLDEELKLQPFNSSEDSTNLVPLVVESSKPPEVDAPDKTPRIPDSEMLMDEGTSDEKGHMEEKLSLLPRKKAHLGSSDNVATMSNEERSDGGFPNSVIAEFSEEPVSENLSPNTTSSLEDQGEEGVSEPQETSTALPQSSLIEVELEDVPFSQNAGQKNQSEEQSEASSEQLDQFTQSAEKAVDSSSEEIEVEVPVVDRRNLRRKAKGHKGPAKKKAKLT

SEQ ID NO: 17383 - DNA, 3626 bp, Homo sapiens
  CDS (97)..(2142)
gacggcttagccgcggtgcagactgcggcggcggtggtctgaggaagttctatcttggcgctaaagcggagacgcatcccccgacccgaggctacgatgagcacaccggccgtgccccaggacctgcagctgcccccgagtcagagggcgcagtccgcattcaaagagcaaagaagacaaaaactcaaggaacatctgttgagaagaaaaacgctttttgcatacaagcaggaaaatgagatgttatccagtagagatcagagagttgtgacatctgaggaccaagttcaagaagggactaaagtgctgaaacttaaaacaaaaatggctgataaagaaaacatgaagagacctgcagagagcaaaaataatacagtggtggggaaacattgtattcctttaaaaccttcaaatgaactaaccaattcaactgtagtaattgacacacataaacctaaggatagtaatcaaactccgcatttgttactaactgaagatgatccccaaagtcaacatatgacattaagccaggcatttcaccttaaaaacaatagtaaaaagaaacaaatgactacagaaaaacaaaagcaagatgctaacatgcccaagaaacctgtgcttggatcttatcgtggccagattgttcagtctaagattaattcatttagaaaacctctacaagtcaaagatgagagttctgcagcaacaaagaaactttcagccactatacctaaagccacaaaacctcagcctgtaaacaccagcagtgtaacagtgaaaagtaatagatcctccaatatgactgccactactaaatttgtgagcactacatctcagaacacacaacttgtgcgacctcctattagaagtcatcacagtaatacccgggacactgtgaaacaaggcatcagtagaacctctgccaatgttacaatccggaaagggcctcatgaaaaagaactattacaatcaaaaacagctttatctagtgtcaaaaccagttcttctcaaggtataataagaaataagactctatcaagatccatagcatctgaagttgtagccaggcctgcttcattgtctaatgataaactgatggaaaagtcagagcccgttgaccagcgaagacatactgcaggaaaagcaattgttgatagtagatcagctcagcccaaagaaacctcggaagagagaaaagctcgtctgagtgagtggaaagctggcaaaggaagagtgctaaaaaggccccctaattcagtagttactcagcatgagcctgcaggacaaaatgaaaaaccagttgggtctttttggactaccatggcagaagaagatgaacaaagattatttactgaaaaagtaaacaacacattttctgaatgcctgaacttgattaatgagggatgtccaaaagaagatatactggtcacactgaatgacctgattaaaaatattccagatgccaaaaagcttgttaagtattggatatgtcttgcacttattgaaccaatcacaagtcctattgaaaatattattgcaatctatgagaaagccattctggcaggggctcagcctattgaagagatgcgacacacgattgtagatattctaacaatgaagagtcaagaaaaagctaatttaggagaaaatatggagaagtcttgtgcaagcaaggaagaagtcagagaagtcagtattgaagatacaggtgttgatgtagatccagaaaaactggaaatggagagtaaacttcatagaaatttgctacttcaagattgtgaaaaagagcaagacaacaaaacaaaagatccaacccatgatgctaaaacccccaatacagaaacgaggacaagttgcttaattaaatataatgtgtctactacgccatacttgcaaagtgtgaaaaaaaaggtgcagtttgatggaacaaattccgcatttaaagagctgaagtttttaacaccagtgagacgttctcgacgtcttcaagagaaaacttctaaattgccagatatgttaaaagatcattatccttgtgtgtcttcattggaacagctaacggagttgggaagagaaactgatgcttttgtatgccgccctaatgcagcactgtgccgggtgtactatgaggctgatacaacataagggaaataaagctctgttagggaatggggtttttattatttgtggggtgttttgttttgagtagctttatattgctcttaggtctggagttggccatgtacctatgtatcctaagcattcacggcagtgagctcctttactaacattcatgttatggcaagagttgtcctctacattggaaagctaatcctaccttgtcagtttcaaccaactgagttttttctttaagaaaggtaaattttgtcagctagtttactatgttccttgaatataaacaggttataatactaccctgttcactttactaaatataagtacagtaatgatgcataattagaaaatgaggtattctaggtaaaatgtatgtttgccttgacatgtttttaaaagttatgatgtacctccctgcctttaaacagaatacttttttcttttttttggcctttctcagattagtcaaaaattctatagaatgactcacttcgaatactaagacacaggaggtttagcctgctttcttaccaaattcatgttacccagacttgtgttctcttgcgtcccttggactgcctgttgattgatggaaagtgtctgcactgacacttttcgtcagtagtctgtagtttcgtggcctcttttgattataactggggtcaccaagaaggtttacttaattaaataccgcatttctaagagaagatactttgtgtaagaaaagatgccacatttagtggtttaacttttgtaacttcacttgatagtttttaagcaattagaatggagttagggaaagaacatatcatactgaacaaatgtcattctagtttagatagcatttctaagataactgatactaatacttgttttcttccctataacataaaaaacttcactgttaagtcatgtcccttgaaacatgatagttacatacacagttttctctccacacataaataacaccactaaagttgttttgtaaggttccaaactaatatggcatatatcaactctacagtttcaaataaatgactttttaattgtaaaagattagttgaaaaactgtatgaatgtgaagatcacatgcttagtcatttctatgttcattccactttgtatatcttttctatttattgacttctcatgttctagagagtaggacttttattccgtgtacctgatatatatacaattaaaatatctgtataattatgttttaatgaggtttatttcaacagatattttatgaaatgcagtttaaccacagtgaatgaattttagctttgcttttgaaatacattgtaagatttgacttgaggtttttgacacttaagtacatgcttaatgatatattttcaaaagtcatcagtctacttacataaactttacctaatttttttcactttaacaaaaacataactatgcccttgttttttcatactttgacccaaaatatgccattttgaaataaaatttaagctttg

SEQ ID NO: 17384 - protein, 682 aa, Homo sapiens
MSTPAVPQDLQLPPSQRAQSAFKEQRRQKLKEHLLRRKTLFAYKQENEMLSSRDQRVVTSEDQVQEGTKVLKLKTKMADKENMKRPAESKNNTVVGKHCIPLKPSNELTNSTVVIDTHKPKDSNQTPHLLLTEDDPQSQHMTLSQAFHLKNNSKKKQMTTEKQKQDANMPKKPVLGSYRGQIVQSKINSFRKPLQVKDESSAATKKLSATIPKATKPQPVNTSSVTVKSNRSSNMTATTKFVSTTSQNTQLVRPPIRSHHSNTRDTVKQGISRTSANVTIRKGPHEKELLQSKTALSSVKTSSSQGIIRNKTLSRSIASEVVARPASLSNDKLMEKSEPVDQRRHTAGKAIVDSRSAQPKETSEERKARLSEWKAGKGRVLKRPPNSVVTQHEPAGQNEKPVGSFWTTMAEEDEQRLFTEKVNNTFSECLNLINEGCPKEDILVTLNDLIKNIPDAKKLVKYWICLALIEPITSPIENIIAIYEKAILAGAQPIEEMRHTIVDILTMKSQEKANLGENMEKSCASKEEVREVSIEDTGVDVDPEKLEMESKLHRNLLLQDCEKEQDNKTKDPTHDAKTPNTETRTSCLIKYNVSTTPYLQSVKKKVQFDGTNSAFKELKFLTPVRRSRRLQEKTSKLPDMLKDHYPCVSSLEQLTELGRETDAFVCRPNAALCRVYYEADTT

SEQ ID NO: 17385 - DNA, 2373 bp, Homo sapiens
  CDS (100)..(2274)
attgactgcagccctcataaaactgtcaagaagactgcgaatgaatttccctgtttgccaaagcaagtggcttggattctggccacaagcaaggttttcatgtatccagagttacttccagtgtgttccctgaaggcaaagaatccccaggataagatcgtcttcaccaaggctgaggacaatttgttagctttaggactgaagcattttgaaggaactgagtttcctaatcctctaatcagcaagtaccttctaacctgcaaaactgcccaccaactgacagtgagaatcaagaacctcaacatgaacagagctcctgacaacatcattaaattttataagaagaccaaacagctgccagtcctaggaaaatgctgtgaagagatccagccacatcagtggaagccacctatagagagagaagaacaccggctcccattctggttaaaggccagtctgccatccatccaggaagaactgcggcacatggctgatggtgctagagaggtaggaaatatgactggaaccacagagatcaactcagatcgaagcctagaaaaagacaatttggagttggggagtgaatctcggtacccactgctattgcctaagggtgtagtcctgaaactgaagccagttgccacccgtttccccaggaaggcttggagacagaagcgttcatcagtcctgaagcccctccttatccaacccagcccctctctccagcccagcttcaaccctgggaaaacaccagcccgatcaactcattcagaagccccttcgagcaaaatggtgctccggattcctcacccaatacagccagccactgttttacagacagttccaggtgtccctccactgggggtcagtggaggtgagagttttgagtctcctgcagcactgcctgctgtgccccctgaggccaggacaagcttccctctgtctgagtcccagactttgctctcttctgcccctgtgcccaaggtaatgctgccctcccttgccccttctaagtttcgaaagccatatgtgagacggagaccctcaaagagaagaggagtcaaggcctctccctgtatgaaacctgcccctgttatccaccaccctgcatctgttatcttcactgttcctgctaccactgtgaagattgtgagccttggcggtggctgtaacatgatccagcctgtcaatgcggctgtggcccagagtccccagactattcccatcactaccctcttggttaaccctacttccttcccctgtccattgaaccagtcccttgtggcctcctctgtctcacccttaattgtttctggcaattctgtgaatcttcctataccatccacccctgaagataaggcccacgtgaatgtggacattgcttgtgctgtggctgatggggaaaatgcctttcagggcctagaacccaaattagagccccaggaactatctcctctctctgctactgttttcccgaaagtggaacatagcccagggcctccactagcagatgcagagtgccaagaaggattgtcagagaatagtgcctgtcgctggaccgttgtgaaaacagaggaggggaggcaagctctggagccgctccctcagggcatccaggagtctctaaacaaccctacccctggggatttagaggaaattgtcaagatggaacctgaagaagctagagaggaaatcagtggatcccctgagcgtgatatttgtgatgacatcaaagtggaacatgctgtggaattggacactggtgccccaagcgaggagttgagcagtgctggagaagtaacgaaacagacagtcttacagaaggaagaggagaggagtcagccaactaaaaccccttcatcttctcaagagccccctgatgaaggaacctcagggacagatgtgaacaaaggatcatcaaagaatgctttgtcctcaatggatcctgaagtgaggcttagtagccccccagggaagccagaagattcatccagtgttgatggtcagtcagtggggactccagttgggccagaaactggaggagagaagaatgggccagaagaagaggaagaagaggactttgatgacctcacccaagatgaggaagatgaaatgtcatcagcttctgaggaatctgtgctttctgtcccagaactccaggtgagagctggagaatattctcaagtatttcgtggactcagtaatatgtatcacttattgatatgccacctgcttgcttgctgcactatggatagtcctaaaatcatttgtatttgatttgtgaatgcattatgggacatgattgtggagttgaggtgaaatgagatggaaaggatgaaattttacttattatattaaactcgtttacacatt

SEQ ID NO: 17386 - protein, 725 aa, Homo sapiens [sequence omitted]

SEQ ID NO: 17387 - DNA, 2667 bp, Homo sapiens
atgtgacctgttgactttgtatctgcacgtgggcacgagtgatgttcagtttgctaggcactagtcatagtgttatggacgtggtggagtgtaaggtcttgatgaattacggcagtatgcagaaaaggaaccaaggccagagagacaaataatgcctcatgtcccactgctttaaaattacattaatttataaaatggccactatgggctctttttgactgtttctcggagtaggaacaaaataagacattaaatggtggcttgaagagaaagatacacattttcagaagaaagaaaggggagggctgcagggagcctgtcttggcgggagctctccagtctgttggattagcacagggacacgcttatggtgccatgacgccgaaactagtcatcccccatctccagcataggcaacggcctgcaggggtgagtgtcagaaaagacttactttggaagaaaagggtttttttttgtttgtttgttttttgtttttttttgtttgtttgttttgggtttttttcctgaaatttcctgatacctttttcagaatgtcacccttgtaaataggcacctaaagccaagttggtcagcagagctcctgaccacggctgcctctgcgtgacaaggacatttgcagctgcctttggaaggctcttcacattaaaaaacaataattatgtaagtgtgtttcatagcttgagtcaagctttcaaggatcactgctcctttgtgcattgtgcatccctttggggaaagaaacagaaaattattctctttctatagagtcaagcaattccagcagaagtgaagaaatgttagtttcccagaaatcgcagtggaatagaatacaatactgtgttaaccaactttctgtataaatgcatcagtattcccttacgtatgtctatatattttataacagaactgttagtgaaaatgtgcttgtttaagctgggtcactatgcaagagttacttccagtagaatgtagtgaatgtaattccctagtcggatattagggatgctgtagacccaagttctacattccagatgtccgtgcctatagtatactggatttattcttcatgttgcttagatgcagttagctctggagggggatagctgcatcccttacttctgtgactagcaaaggacaaagtcccagcgcacagaatatgaaaacataccctgtgttagccaatcaagttacagcaatgctgtcacaaagggagttttagaaaactggggagtcattgtccgtagacagccattttgatttaggaaacaggtgtattagcatgagccttaggtcatgaactgcttttaaagattgagtttgaatatgggatctgtccacgaggaagagaaaatggctttacctttaggacaatctcattgtggactgctttatttatattattagtaacgctgttttaagtgttattctttttattgtattttatttataaaaaatgcctttatatattgaaatatataaatatatatatataaacacacacacacacacacacacacacacacacatatatatatatatatatatataattgcctttatatttaggcggtatgagttctccctaagcgtgagttggctctgccctgcgcaggcacccaaacagtcctacctaatgtcacttcaccaggaaatgagaggacatggtacagtgtgggagacagcactaacacgtgctgaataactactgtgtaccaggcactgtgttcggtgcttgttactgttaactcatttaacccccacaactcatctacaaagttggcattaaaatccccaagtcactcagtgagccatgggacctgaatccgaacctagtttatctggagccataatctgggctcctcccatttttccatactgctttccaaaagcattgcggttcactctttggatggaaccagtcccgttccgtatgctgtgatctatccctgccgtggaattcctccgaggctccaactccgcagccggagaagctgctctctggcctccgcgggcagagctctgcttatgacttcgtcttccagaggtccacatttctccccttgacgccccctgtctaccacctccacctggaaatttgatctttactgtgctcagtgatcacgaaattggtcaagcctattcatgttccttctcatctagaattctgtgtgattgttttagcataaactgccccgctcccactgtatcatttcacgatctccttttaatgtttttctttcagttttgcactgacagtctggtgacaggtgctgccagggtgcaagttacattgcaatgttctaaaccttttgaagtgttcttagcaaaagcctttctttctgggtgtttttgtcgaatgagtctatgaagactcaatgcatccatcttgggctgatcatgccacagatctcattccagctatagtactgccaagaagtgaagtttatcattgaattttacctgtgttgctctcttttaaagtaatgactttgagatgcatgctttgtatcatattgaaaagtatgttttattttccttaaagttgtaatattgtgtgtgaaactgtacatattttaaatgatgtagctttggcaggttttatttggttgatatgattttatattaaaagagaaggctgctttcatat

SEQ ID NO: 17388 - DNA, 2593 bp, Homo sapiens
  CDS (6)..(1685)
ggaagatgtttgttcgagctaccagtccagaatctaccagtaggagttctagtaaaactggacgagatactccagaaaatggagaaactgcaattggtgctgaaaattcagaaaaaatagatgagaattcagataaagagatggaagtagaagaatctccagagaaaataaaagtacagacaacaccaaaagtagaagaagaacaggatttgaaatttcagattggagaactggcaaataccctgacaagtaaattcgagtttctaggcattaatagacaatccatctccaactttcatgtgctgctcttacagactgagactcgaattgcagactggcgggaaggggctcttaatggaaactaccttaaacgaaaacttcaggatgcagcagaacaactaaaacagtatgaaataaacgccactcctaaaggctggtcctgccactgggacagggatcatagacggtatttctatgtaaacgaacagtcgggcgagtctcagtgggagtttccagatggtgaagaggaagaagaagaaagccaagcacaagaaaatagagatgagactcttgccaaacagaccttgaaagacaaaactggcactgattcaaattcaacagaatcctctgaaacttccacaggttctctttgtaaagaatccttttctggtcaagtttcttcttcatcactcatgccacttactccattctggaccctccttcagtcaaatgttcctgtgcttcaacctccattacccttggaaatgccaccacccccacctccacctccagaatcacctccaccccctcctccaccacctcctcctgcggaagatggtgagatccaggaggtagagatggaggatgagggaagtgaggagccccctgccccaggaacagaggaagatacccctttgaaaccttcagcacaaaccacagttgtaactagccagagttcagttgattccaccatctctagttcttcttccactaaaggaataaagaggaaagctacagaaattagcactgcagtggttcagaggtcagctaccattggcagttctccagttctctatagccagtcagctatagctacaggtcaccaggcagcagggattggaaaccaggcaacaggaattggacatcagacaataccagttagccttccagcagcaggaatgggtcatcaggccagaggaatgagcctgcagtcaaattaccttggactagcggcagcacctgcaattatgagttatgcagaatgttctgtcccaattggagtgactgctccctcattgcagccagttcaggcccgaggtgctgtgcctaccgctaccattatagaaccaccaccaccacctcctcctcctcctcctccaccaccaccagctcccaaaatgccaccacctgaaaagacaaaaaaaggaaggaaagacaaggcaaagaagagtaagaccaaaatgccatctttggtaaaaaagtggcagagtatccagcgtgagttagatgaagaggacaattctagttccagtgaagaggatcgggaatcaactgcacagaagcgaattgaagagtggaaacagcagcagctggttagtggcatggcagagagaaatgctaattttgaagcccttcctgaggattggagagcaaggctgaagagaaggaaaatggctccaaacacatagtttttaagtttttaaaacttttttgtattattgtttgttttgtgttcagttcaaagtcttaaccagttttattgtcaaataaactataaatgttatgggggagatcttataaatttcctgggcaagagtgtatgcatacaaagttttcacttttgtgaaatgtaatttttctgtttttgcaaagggatgaggtgattggaattgctttgaccatgctgcctttattctcaaactggcaaacttagcatgttaggtgtattaacctcatcagtcttgaagaacatgtggctcatgagtataacacttctgtagaggactccctgacaaaagtgaagaattaacttctcctccagaacaagtgcaattcagaaggcagctctgcattctaccttgcttgactggaattgtctgaagctttttctggcctcttttctctagtcggccacccctgaagtgctgaggtctaagtggtttacctcgtgctgatagatggccacactctttagagtagttctcataagttctagaactggtagctcggtcgtttcgcacactaggtggcatacaggcagcagcaggtgttcatatccttgattttgagaatttcccctcaagtatgtggcagtaaatacaacaagacactctatgtattaatgtctccattgtcttaaccctgttccaaaacaaaattcacctcctttctttatgtgaatgtattctccataaaattccagtatttaaaaagcagtttactgttctgtactttctgttgtatcacaatcaggtaaaagtcactttaaactgaggaaacggcaaattgtgttttaaagctctttgtatttctccagtttctgaccttgtaaatttgtatatatgcactaataaagctttttttataaaaaaac

SEQ ID NO: 17389 - protein, 560 aa, Homo sapiens
MFVRATSPESTSRSSSKTGRDTPENGETAIGAENSEKIDENSDKEMEVEESPEKIKVQTTPKVEEEQDLKFQIGELANTLTSKFEFLGINRQSISNFHVLLLQTETRIADWREGALNGNYLKRKLQDAAEQLKQYEINATPKGWSCHWDRDHRRYFYVNEQSGESQWEFPDGEEEEEESQAQENRDETLAKQTLKDKTGTDSNSTESSETSTGSLCKESFSGQVSSSSLMPLTPFWTLLQSNVPVLQPPLPLEMPPPPPPPPESPPPPPPPPPPAEDGEIQEVEMEDEGSEEPPAPGTEEDTPLKPSAQTTVVTSQSSVDSTISSSSSTKGIKRKATEISTAVVQRSATIGSSPVLYSQSAIATGHQAAGIGNQATGIGHQTIPVSLPAAGMGHQARGMSLQSNYLGLAAAPAIMSYAECSVPIGVTAPSLQPVQARGAVPTATIIEPPPPPPPPPPPPPPAPKMPPPEKTKKGRKDKAKKSKTKMPSLVKKWQSIQRELDEEDNSSSSEEDRESTAQKRIEEWKQQQLVSGMAERNANFEALPEDWRARLKRRKMAPNT

SEQ ID NO: 17390 - DNA, 2699 bp, Homo sapiens
  CDS (296)..(1651)
cattaatcctccactcaaccttcaagaaactcaagtcactatagaagaaatcactcctcttgtccccccacaatcaggagataaagggcaagaagatctcacaagctattttcttgaagcacttctaaaatacatagtcattcaggtaaaaagtttagaatggaagaacaaagaaaaccaagaaaggggattttcatttttgttttcacattttaagaaatattacttgccttatatttttccaaacatctgtaaggaaaacagtttatatcatcctatacttgacatcccgcagatgagaccaaagccacattatgtcgtgataaagaaagatgctgaaaccaatgaagcaatctattgtacaaaggagcctttcattaaggctcgtgttattgtcattcgttggctggtttctttctggctggagccaaaaccacatacaggacctcatattcctgggatggaaggtgaagtcttgccaaagaatattcagagagcagctgctagtttagtatccagagaagaaagcaaaaatgataatgctgataaaacagacagaactacagaacctgaacagtctcattccaatacaagcactctcacggagcgagaacctagctcatctagtctctgtagtattgatgaagaacatctcacagacattgaaatagttcgcagagttttttcttctaaaaggagtaatgtaaactttgtgacagagatatttcgtcaggcatttttattaccaatttgtgaagcagcagctatgagaaaagtggtaaaagtatatcaagaatggatccaacaagaggaaaaacctttgttcatgcaagagcctgaagaaattgtgatcacttcttcagacctcccttgcattgaaaatgtcacagaccatgatatttcaatggaagaaggagaaaaaagagaagaggaaaatgggaccaatactgctgatcatgttcgaaattccagttgggcaaaaaacggctcctaccaaggtgctcttcataacgcctctgaagaagccacagaacaaaacatacgagctggtacccaggcagttttgcaggtgtttattataaactcatcaaatatatttcttcttgaacctgcaaatgaaataaaaaatcttctggatgaacacacagatatgtgtaaacgcattcttaacatttatcggtacatggttgtacaagtatcaatggacaaaaagacttgggaacagatgctgcttgtgttgctcagagtcacggaatctgtactgaagatgccatcacaagcttttctacagttccaagggaaaaaaaatatgaccttggcaggtcgacttgcaggaccacttttccagacccttatagttgcctggatcaaagcaaacctaaatgtgtacatctcccgagaactttgggatgacttactgtcagtattgtcatcgctgacctattgggaagagttggccactgagtggtcactgactatggagacattaactaaagttttagctaggaatttatatagtttggatctcagtgatttaccattggataagctgagtgaacagaaacaaaaaaagcacaaagggaaaggagttggacatgaatttcagaaagtttcagttgacaagtcattttctagaggatggagtcgtgattagcttggccaagccccaatgagacagaggagtgcaacaaccactggttctccaggaaccgaaaaggcgaggagtatagtacggcaaaaaactgtcggctaatgaagaaaagccatatgatcacatcaatagatgcagaaaaaacatttggcaaaatccaacacccatttaggataaaaactctcagcaaggtagaaataaggagaacttcctcaacttgataaatctattaaaaaataaaaacacaggacaacttacctctagcatcatacttaatggtgagaaactaggtttttttctgctgagatccacaacaaggcaaggatatctcactattcctgtaagacaggaaaaggaaataaaaggtctacagattgagaagaaataaataaagctatctttgtagatgacatgattatttatgtggaaaatttcaaagtgacaacctcctgaaactaataagcaattatagcaaggttataggatgccagattaatatataaaagtcagtcgctccttccataccagcaatgaacaactggaatgtgaaactgaaagcacagtaccatttacattagcatcaaaaatctccaaaacaattaggtataaatctagcaaaatatttacaagatctatatgaggaaaactatgaaactttgatgaaagaaatcaaagaataaataagttgagaggtctagttcatgtacatggatagaaaaactcactattggcaagatgtcatttttttccctacttaatctgtagattcaacacaatctcagttgattttgttcttaacaagttattttgtggatattgacagaatctaaaatttatatagaaaggcagagcatgagcaacatggcaaaacctgtctctacaaaaaatacaaaaactagttggatgtggtgtcatgtgcctgtagtcccagctacttgggagcctgagatgggaggattgcttaagttcaggaggtcaaggctgcagtgagccatgattgtgcccctgcactctctagcctgggtaacacagcaagatcttgtatcag

SEQ ID NO: 17391 - protein, 452 aa, Homo sapiens
MRPKPHYVVIKKDAETNEAIYCTKEPFIKARVIVIRWLVSFWLEPKPHTGPHIPGMEGEVLPKNIQRAAASLVSREESKNDNADKTDRTTEPEQSHSNTSTLTEREPSSSSLCSIDEEHLTDIEIVRRVFSSKRSNVNFVTEIFRQAFLLPICEAAAMRKVVKVYQEWIQQEEKPLFMQEPEEIVITSSDLPCIENVTDHDISMEEGEKREEENGTNTADHVRNSSWAKNGSYQGALHNASEEATEQNIRAGTQAVLQVFIINSSNIFLLEPANEIKNLLDEHTDMCKRILNIYRYMVVQVSMDKKTWEQMLLVLLRVTESVLKMPSQAFLQFQGKKNMTLAGRLAGPLFQTLIVAWIKANLNVYISRELWDDLLSVLSSLTYWEELATEWSLTMETLTKVLARNLYSLDLSDLPLDKLSEQKQKKHKGKGVGHEFQKVSVDKSFSRGWSRD

SEQ ID NO: 17392 - DNA, 2739 bp, Homo sapiens
ttactgtgtgtttctctacctacctctcattctcaccttcttttcctagctttttttttctctttatttttcccctaggattctcctcatttcaagcccttcttccttctcctgctcttccctctattccttctcttccacttgttctgctcctttctcacttctttcacctcttattcttctttctgcccaatatttgtctccaattttcatatagttctgcctctttcttccccccgtctctgctgccccctagcttcccctgttaaatcccctcttccctgctatatccacctgtcccctctctggcatccccagatcccagttctccccaggctgtggttctccctgtgctctccttgtcactggctgcccctcttgctctcccagcaccatgctgctctgtctgccctggctccaaatccctccttctctccccaactctccatctgaggagcctccccttttctgcccctctccctatcttgctgaactttatctctctagaaacccagtttttctctaaatttctctagttgcttttctccccctgctcctttctcagcatcttcatgcactgtctctgcaaatccctcatccaccatctactttgccatctgttttgttttgttttttgttttttgagatggagttttgctcgtcgcccaggctggagtgcaatggtgcgatcttggctcaccgcaacctccgcctcccgggtaaaagcgattctcctgcctcagtctccagagtagctgggattacaggcattcgccaccatgcttggctaattttgtattttttagagacagggtttctccatgttggtcaggctggtctcaaaactcctgacctcaggtgatctgcccgcctcagcctcccaaagtgctggaattacaggcgtgagccatcgcacccagctgccgtctgtttatgggtctccttcattcttctttcccatttcaccatttttctatttcctctcctccacacattcatagggaggggactgcagtcagatccccacctcaagagcccatttcctgtgggatggaatttgggacaagagaaaccttaacgtcctgagatagaagtcacgtccccacactcgatatcaggagaaggggaggcctggggagcagaagggcccccgatcaaggaggaaaaaggcaggagaaagtcaggagaggggcagggtctgcaggatcccaggaccaggaagagttcacggcctccctgggactggggctgcgtcgctgcgctccaggagctgacgagggagcggagcggatgggaagctcccagggcgggaatcaaccttgcggtgaggactttaaaaaaggtgcgggccagtgcaggggacactgaaggatttgaggcaggaaaactccgcgataagagctgtctatatggccctgtggcagaagcacgggggacacgaccccatggaactgtgtccattaaacctctttgtcttcataaattacccagtctcgggtatttctttattagcagcgtgagaacagactaatacagtaaattggtaatggtatagagtggggtgctgctataaggatacctcaaaatgtggaagcaaattttgaactgggtaacaggcaaaggctggaacagtttggagggctcaaaagaagacaggaagacgttggaaagtttggagcttcctagaaaatggttgttgaatggttctgaccaaaaagtccaggctgaaggtggtctcagatggagatgaggaactttattggaactggagcagaggtgagctgcaggggcggagccctcatggagaacctctgctagagcagtgcagaagtaaaatgtggggttggagcccccacacagactactcactactcgcctagtgcagccgtgagaaaagggccaccctcctatagaccccagaatggtagattcaccgacagcttgcaccatgtgcctggaaaagtagcagacacaacaccagcctgtgaaagcagccaggagaggagctgtaccctgcaaagtcacaggggcagacatgggttccctgcaagaccattggaaccaacctcttgcataagtgtgacctggatgtgagacacggagtcaaaagagatcactttggagctttaagatttgactgccctgctggatttcagactggcatggggcctgtgacctgttttggccaatttctcccatttgcaacgggcgttatttacccaatacctgtgcctccattgtacctaggaaataactaacttgctttttattttacaggctcataaacagaagagacttgcttgtctcagatgaaactttggactgtggacttttgagttaatgctgaaataagactttgggggactgttggggaggcatgattggttttgaaatgtgaggacatgagatttgggagggaccaggggcaaaatgatatggtttggctgtgtccccaccaaatctcatcttgaattgcagctcccatgatccccacatgtgggagggacccggggggaggtaactgaatcatgggggtgggattttcccatgctgttctcatgatagtgaataaatctcatgagatcttatggttttataaagggcagtttccctgcacgggctctctcttgcccgccaccacgtaagacatgtgtttgctcctccttcaccttctgccatgattgtgaggtctctctagccgtgtgaaactgtgagtccattaaacttctttttctttat

SEQ ID NO: 17393 - DNA, 1335 bp, Homo sapiens
  CDS (656)..(1042)
tttagtttaaaaagaaaaaatgcagggtgatttcttattattatatgttagcctgcatggttaaattcgacaacttgtaactctatgaacttagagtttactattttagcagctaaaaatgcatcacatattcatattgttcaataatgtcctttcatttgtttctgattgttttcatcctgatactgtagttcactgtagaaatgtggctgctgaaactcatttgattgtcatttttatctatcctatgttaaatggtttgtttttacaaaataataccttattttaattgaaacgtttatgcttttgccaacacatcttgtaacttaatatactagatgttaaggttgttaatgtacaaaaaaaaaacccttatactcacctgcgttttcatttgtttgacatttgtctattattggatttcattatcatatgaacttgtcagtgggaaacaaactgtctaaaaatttttctcttacgtttaacatacaatcatgtgaaatttaggcagagttcgataaattactggcaaaaacaaaactcttttataaagattttctaatgttgactttaatactctaacatggtacaaaccaaatggtaaaatcccaagtcatttcttttttcatctctattcagcaacagaattaagtggatgaagatattctactgtgcattaaatcttgaactttataaaacatgtacaaaaattgtacaagataagttccacctggtaatgtctttccctaatacagggttgcgcttgcattggaccctagggatttgcactaaaattatatcaaggtctcagatgagcttagtgcacaagcactatcactttaaatactattatttgctaccacagcaactatatatttccatagcttttggctgggggcgggggacatttttattacaacttgaaattgctttgctggtttcatatttatttgttgtatttaaaaaatacattgttgtaagagtgattttttcaatatattttattcctgggggggatcatgctacactctcaaaagaaaattaagaaatcattcagatcatcccccctttttaagtagtgtgaattgcaaaacccaacatatttttttttactgtcagttgcggtttatttattctttaactgtctgttttagtagtttaatgattatgaaaaatgtatctgtgtgtgatttgctatttattaaattttaagtactttgctgaatgtcattttaaagcatgtttgaagtcttgtgtatttgtctgtgttaatgctgtcaggaggaactgactaagatgttttaatatgtatcaaaaattaaaatgatttttttt

SEQ ID NO: 17394 - protein, 129 aa, Homo sapiens
MKIFYCALNLELYKTCTKIVQDKFHLVMSFPNTGLRLHWTLGICTKIISRSQMSLVHKHYHFKYYYLLPQQLYISIAFGWGRGTFLLQLEIALLVSYLFVVFKKYIVVRVIFSIYFIPGGDHATLSKEN

SEQ ID NO: 17395 - DNA, 2478 bp, Homo sapiens
  CDS (114)..(1757)
gactcaccctgggccgggggtgaggcttggactgtttctttttccaaaagaggagctcaaaagagaaagttcatctagaaatctcaaagccatgtctcaggatgaactagagtatgcccttacagggatcagtgtcattcaaggatgtgactgtggacttcacccaggaggagtggcagcaactagaccctgctcagaaggcgctttacagggatgtgatgttggaaaactattgccacttcgtatctgtggggtttcacatggctaagcctgatatgatccgcaagttggaacaaggagaagagctatggacacagagaatttttccaagttacagctacctagaagaagatgggaaaactgaagatgtcttagtgaagttcaaagaataccaagacaggcattctagacccctcatattcatcaaccacaaaaaactaattaaggagagaagtaatatttatggtaaaacatttactctaggcaagaaccgtattacaatactatgtgaatataaacctgatggaaaagttttgaaaaatatttcagaactagtcattagaaatataagccccataaaagagaagtttggtgacagtactggatgggagaaatcactcctcaataccaagcatgagaaaattcatcctgcagtgaatctccataaacaaacagaaagagttctcagtggtaaacaggagcttattcagcatcagaaggttcaagctccagagcaaccatttgaccataatgaatgtgaaaaatccttcctgatgaaaggaatgctatttacacatactagagctcacagaggagaaagaacctttgaatacaataaagatggaattgccttcatagaaaagtcaagcctcagtgtccatccaagtaatcttatggaaaagaagccctctgcctacaacaaatatgggaaattcctctgcagaaagcctgtttttattatgcctcagagacctcaaacagaagagaaaccctttcactgtccttactgtgggaataactttagaaggaagtcatacctcattgaacatcagcgaattcacacaggtgaaaaaccttatgtttgcaatcaatgtggaaaggccttccgtcagaagacagccctcacccttcatgagaaaacacatatagaggggaaaccctttatttgtatcgattgtgggaagtccttccgccagaaggccaccctcactagacatcacaaaacacatacgggggagaaagcctatgaatgtcctcagtgtggaagtgcctttaggaagaagtcatacctcattgatcaccagagaactcacacaggagagaaaccgtatcagtgtaatgagtgtgggaaggcatttatccagaagacaaccctcactgttcatcagagaactcacacaggagagaaaccctatatttgcaatgaatgtgggaagtccttctgccaaaagacaaccctcactctccaccagagaattcacacgggggaaaaaccctatatttgtaatgaatgtgggaagtccttccgccagaaggcaatcctcactgttcatcacagaatacatacaggagaaaaatccaatgggtgtcctcagtgtgggaaagccttcagtaggaaatcaaacctcattcgccatcagaaaactcacacaggcgagaaaccatatgaatgtaaacagtgtgggaagttcttcagttgtaagtcaaacctcattgtccatcagaaaactcacaaggtagaaaccacgggaattcagtaagtaatgtggctttttttgtaaaaaaatgttaagtcatagtaaaccctgtagatgatgttgcttgcaagcgtaatatccaacagtttaaggtactataccacatggtaacctactgtttgccagcctgtaaaacacacacacacacacacacacacacacaaatattattagacaaattagatgacaaaaatcattaagaagtccaaactttttttttattactagcttcagcagacaaaaacttcctctgtcaaggtgttataaacatttaaaatcacattttccatttccatacatatctttttgttcatcagtaataactagttggccaactgactgtggtccatggactacacagtgagtagaggttctttaaaagaaggaggtatgaactgtatttctcattgcaaatacaaaataaaaattagttgttacctcctcacagttgaccatgattctgacttctaacattacaaattagtttttactattataaacctttctataaattggattatatatcatgtattctttcatatacagcttattaccttcatcatgtccgtgagtctaatcattagtacgtgtggcagaagtttatttatttttatccagtatagaattcaattatatgattatatcacaatttatccattctgctgttgatggacttttacattgtttacagcttagggtcataataaatcatgcttctgag

SEQ ID NO: 17396 - protein, 548 aa, Homo sapiens
MPLQGSVSFKDVTVDFTQEEWQQLDPAQKALYRDVMLENYCHFVSVGFHMAKPDMIRKLEQGEELWTQRIFPSYSYLEEDGKTEDVLVKFKEYQDRHSRPLIFINHKKLIKERSNIYGKTFTLGKNRITILCEYKPDGKVLKNISELVIRNISPIKEKFGDSTGWEKSLLNTKHEKIHPAVNLHKQTERVLSGKQELIQHQKVQAPEQPFDHNECEKSFLMKGMLFTHTRAHRGERTFEYNKDGIAFIEKSSLSVHPSNLMEKKPSAYNKYGKFLCRKPVFIMPQRPQTEEKPFHCPYCGNNFRRKSYLIEHQRIHTGEKPYVCNQCGKAFRQKTALTLHEKTHIEGKPFICIDCGKSFRQKATLTRHHKTHTGEKAYECPQCGSAFRKKSYLIDHQRTHTGEKPYQCNECGKAFIQKTTLTVHQRTHTGEKPYICNECGKSFCQKTTLTLHQRIHTGEKPYICNECGKSFRQKAILTVHHRIHTGEKSNGCPQCGKAFSRKSNLIRHQKTHTGEKPYECKQCGKFFSCKSNLIVHQKTHKVETTGIQ

SEQ ID NO: 17397 - DNA, 2587 bp, Homo sapiens
attatgatggaagattaaagtgtggtgacatgattgtggccgtaaatgggctgtcaaccgtgggcatgagccactctgcactagttcccatgttgaaggagcagaggaacaaagtcactctgaccgttatttgttggcctggcagccttgtatagattttggaaattggtttcaaatcttgcatcttccttttttagatttttgaaagaaaacccttttgtttcattgtgtttgtggtttaggagctgctgacactgctggtatacacagggccaaaacccactaagattgtccgtttatgtttatttaaatggtttcctaagttagttacatttcttttagcttggaaacagtcttccactaacctttgtgagtttatattttcagaattcagacttagttgttaaaatgttacctatggtaatgagcaaagctcacccaaactgtgccccagatggagtaaagaccttctggtgggtctttgttttcagtaactgaatcatagaacgagttctgtatccctcaggcctgatgtcagcaaagccagtaacaacagcgtgtactgccactgtcataaccaataccatgaatgaatatactttaaattttggtgataactgttccccatttttttttgaaccacagtctcactctcacccaggctggagtgcagtggcacaatctcagctcactgcaagctccgcctcctgggttcacgccattctcccacctcagcctcccgagtagctgggactacaggcgtgcgccaccatgcccagctaattttttgtacttttagtagagacggggtttcaccgtgttagccaggatggtctcgatctcctgaccttgtgatctgcccgcctcagcctcccaaagtgctgggattacaggtgtgagctgccgcacccggccgttcccattttttattggtgccaacatttcaaaacttcatactgtttataaactgattttctggtttatttctactgtaatctctcaatattcatagaagatgaagaaataagtctgacaacactaaagaaatttcttaatatactattattagaatagtagaggataaaagataatgttatccagttacaaaggaatttggatgataattataacttaatgttagagatggtaaagctgcacttacttgaacagcccaaaagcattaaaaatctatttccagaggaatgttttgctatgtagggaaattttgaagtagtttttgctaaaaaattatttctagagttgtgttattcttagcagtaatcttggctagaaatgtttttgtgatttatgcgattaaacgaaatgataaagataaaatcatattattaaatacctatatatcacagctaagtaggagaaagggagacctttttattttgttcaggtaggagtatttcttgtgtattttagaaacaattatttttcccattatttcttatgagattagttgtttcaagtaggagacagaaaagttctgttttgttggaaatgtaggttttagatgtatctttcagtcagctctcagtcactagactatttcatattttttgaaatgtttttgaaaattatgactagcccattttttgtcctttattcaacatacttatcctctgaacacataaataagtgaataagataaaaatatctttaccttattaatattatacatacttgaaaaaaatttcatttagaaacctagttcagaatctgagcaaatttacaagtgacctctgtaataaatggtattgataatcagagaatgtatttcagaatactacagtacaatatattatgaagcatgaccactttattttgaaacttagcaattgtattgctggggtttattgtatctgtagcatgtcactgattatttcagttagttttataatgatttttaaaaaacatatctatttggaataagatacagcaacaatcattgctactgacttgttcaaccccttagttacactgtatgatcaacatataacaagatacagtggaatggcccatacagtatattactgttgtgtgatgattggctttggaagcagtttgattttgaaatgctttgatattctaattgacatggaacaagttttttccctgctccccaaatagaattttgtaaccaactttgctatttttttaaagttcgtaagaatgtgtcatttcttggggagtagccatccatcaacaaatatcctgactgctactttgttatatacaaaatacttacattgaacctggtggcataatgagtattttgaaagaagaaatttcttcactctcatttttatagaaatcttggaatcagcttaagctgtagcttttatgacaaaagacagtcatttttggtcagagtgatatttggtgacggaaacttgttcataatttattgttactatagaactatttggattttctcatttttagttctgatagttaaatattttggtttgttctgtgccttcagtttaaattatttcaggatttttcagatgtttaaataatggtgtgaatcattcaggatggaaataaaagtcatcctttctgtaaaaaaaaaaag

SEQ ID NO: 17398 - DNA, 2776 bp, Homo sapiens
ttgttggttgaaatgtaagtcttttcctaaagttttaatcagaggtagccatcactaagacttaagccacctgtggttctcttaagtttcactgaagccagaagaaggaaattaccacaacttgtattatactaattatcttcattattaacgatcatattagagccactgacatgtcccaaattatattaaaataaaaacctgcattgctctgacatgaagctcaattcaatgtaataaacaaattaggtattaaacgttataatttaaaaaacttctacgatatcaccagaaatcctggtgaaatttaattttttcccttttttaggtcagtggccggtgggatagatttttctaaactttttcctgctatgattttgaaggcaaatacatagagcacagttcagtaaaagagtttccaagccttttcactggagcatttacattttgattctgttgtcatttgaaatagaacatctgcagggagataatgagcttaagttacaattgactttggaaaaaataacagacttttgtgtttcctcaatcatgtagtcaatagggaattctccagttatgtgaacaatcacagtcttttaagacaatacttagatctaaatgcaaaatctagcatgcagaggctttttaaggattttagactgtctccaaagaacttggctcgagatggattacacagatttacaaatgcagttttcaactgtgacatcaaactgatcttatctcatttcatgttactcaactgtgcccgtaggaccccaagaggtggaatattttgtctacattattttaaacatctatagatatgtgtggatgtgtgaataatgcctaaatttctcatcttttaactagtttgtttttatcatacagacacagcctgttcataagaccagctttagacaacttagaactcaatgctctgaagattcagggaggccaacatagaaaaagatcttccaaaatatggggtggtccaacccatctcatccctctctagctggaaaactatagagaaagggctgtgactgccttgaccactgcctggcacaatgtaggcactcggtatttgttggatgaataagtggctgaatcagtgaatagacaaaaaacatggattttgccttctgaaaatctcacaaattttaccagcttatattatactgattgtcactatgatttctaagtttcatggttagaaccatattttgagtctatataaaaactttttagatgtatgaatttgaaatttcattaattactttaaaggcttcaaagatttgaggacatttgaacagtggataaggaacaatgtttggggatacagagtttttatgctgagttgaactcaacctttctagttctttatacaagcttcctgaattatctggcaggaatgattcaaacataaaaccccatttttaaattttataaaagatattttcatttttatataaaaagatcatcaggcatattatcccctttgatatttattaacaaccattctctaagaaattcataataattggagacaccatccctaaatctcttcctattttcaaaagatcatttatcctttcatatttgattcctggaatacactaagctgaagtttaatcacatacttactcagatgtttccatgtgtttattcatttaacaaatacttattgtgtacctagtgcatgctaggttctggaaatgcaacagcaaacaagacagacacaatccctcttggaggttactgtgagaaactctccaacatttactctagcaataactagagagtttactgtccattgggtcctcttcacacctgatagaaaaaataaaattcctcaccccatggaagtcatgaaatactccctgcacagatttgtgtgagcttgcttttctaaaaccactgctcaaaaatgctgcttagtttatctataaaccacggttataccccagtgaggtaggtaagtaatttattcataactaacatttatgcagctctattttctagccactgtgctgagtgcttttatggactatctcaccaaatcccttcaacaactctattcagtaggttccattttatagatacaaaaactgaagcacagatatattatgtgacttgtccaaggtcacacagctagcaggtggaactgggatttgaacccatgcaatctgacacaagagttcatgtgtctaatcattatctgtggtttgggggacaccattacattaaaatgaatgagtcactaagtgagtcactgtacataaaatacttggaaattgtaaagtaatatacaaaagatattaacaaagtattattcatggtaaacaaatcacatcagtagcaaacacagggtgggaactcaatcttatgttatagcttactcttaagaagaatatgtgaagccaggaacatggttaaaggtacagaccagaaaatttctgacatgtgataaatatttcagtgacttttcagatttatttcttgttagccgctgtgtctatttggtgctacaaaaactgaaagaaacaaaatccctgatgtaagggcttataataaatacacagtttggagatgaactaaggatattttacatttacgggaaaggattggacaatagtatcattttctcaccatttgcatgtacatcatgtctttccaattgttttcattatttttctgaaagagctgcaaaattgtgcagtggttcaacctgaccaaagtggtattatgctgctgggaagtaaaagtattagacacc

SEQ ID NO: 17399 - DNA, 2990 bp, Homo sapiens
  CDS (258)..(1736)
gcggttcctctaggaaaattcctttgtgcagatcaggcccgtggattggtgagtgaatcctaaccacgtcttccctggcctgtcttcactcttctccccagaatcaccacttctgcactggtgtctgaaggtgtattgagtgattttgtggagggcagaagtaggaagtctttgggacaaaactgtatttaccttgggatctgtgaacaagaggaacctcagcagccaggacaggcaggagcagtggaatagctactatggcttctggaatcctggttaatgtaaaggaggaggtgacctgccccatctgcctggaactcctgacacaacccctgagcctggactgcggccacagcttctgccaagcatgcctcactgcaaaccacaagaagtccatgctagacaaaggagagagtagctgccctgtgtgccggatcagttaccagcctgagaacatacggcctaatcggcatgtagccaacttagtggagaagctcagggaggtcaagttgagcccagaggggcagaaagttgatcattgtgcacgccatggagagaaacttctactcttctgtcaggaggacgggaaggtcatttgctggctttgtgagcggtctcaggagcaccgtggtcaccacacgttccccacagaggaggttgcccaggagtaccaagtgaagctccaggcagctctggagatgctgaggcagaagcagcaggaagctgaagagttggaagctgacatcagagaagagaaagcttcctggaagactcaaatacagtatgacaaaaccaacgtcttggcagattttgagcaactgagagacatcctggactgggaggagagcaatgagctgcaaaacctggagaaggaggaggaagacattctgaaaagccttacgaactctgaaactgagatggtgcagcagacccagtccctgagagagctcatctcagatctggagcatcggctgcaggggtcagtgatggagctgcttcagggtgtggatggcgtcataaaaaggacggagaacgtgaccttgaagaagccagaaacttttccaaaaaatcaaaggagagtgtttcgagctcctgatctgaaaggaatgctagaagtgtttagagagctgacagatgtccgacgctactgggttgatgtgacagtggctccaaacaacatttcatgtgctgtcatttctgaagataagagacaagtgagctctccgaaaccacagataatatatggggcacgagggacaagataccagacatttgtgaatttcaattattgtactggcatcctgggctctcaaagtatcacatcagggaaacattactgggaggtagacgtgtccaagaaaactgcttggatcctgggggtatgtgctggcttccaacctgatgcaatgtgtaatattgaaaaaaatgaaaattatcaacctaaatacggctactgggttatagggttagaggaaggagttaaatgtagtgctttccaggatagttccttccatactccttctgttcctttcattgtgcccctctctgtgattatttgtcctgatcgtgttggagttttcctagactatgaggcttgcactgtctcattcttcaatatcacaaaccatggatttctcatctataagttttctcactgttctttttctcagcctgtatttccatatttaaatcctagaaaatgtggagtccccatgactctgtgctcaccaagctcttgaaccttcttacacactcagccccttctgtacagcacctcttgtccaggtgcatctcatacacctgaactcatttgcatcattttaaccatcttttccttgctgtctcccttctttctatttgaacgtccttcactcatcagtaaaatgtaataattgccttgtgccatattgtccccaatattttattgacatttgatagcaatttttttcatcattttccgtactcctaaggaaaactgacctatacctcataaaatgagaccgctatttaggtattacttctgccagatatttatcacccaattgcctctgacactgactaagaagatgaagaaaagcttttcaacagcctttctatatcatcgtgtgataattgttcaccaatgaatgagtccttagccctgtgtcagtttaccctcgatgcccttatttgtgagttaaagagaaaatatcataaatggtatactcttaagtatagaggttttgtatctagaggatctcagttcaactcctgtctctccatataccagcagtgtaactgtgaataacatacttaaatggctgtgcttatttccttttcttttcttttttctttttttttttttttgagatgaagttttgctcttgttccccaggctggagtgcaatggcacgatctcggttcactgcaacctccacctctcagattcaagcaattctcctgcctcagcctcccaagtagctgggattacaggtgcccaccaccacccctggctaaatttgtattttcagtagagacggggtttccccatgttggttaggctcgtctagaacctctgacctcaggtgatccacccgcctcggcctcccaaagtgctgggattacaggcgtgagccacggcgcccagcctgtgcttattttcttaaaataatttttgtattaaaaacttcacattaaataagtgctaatgttttattgcatagtagggtgactagagttaacaataacctattgcatatattttgaaatagctagaagagaggattttgaaagttctcaacacaaagaaacgacacatatttgaggtgatggatatgctaattaccctggttcggttattacgcaatgtatacatgtatcaaaacatcacactgtaccacataaatatgtatatttattatttgtcaattaaaagcaaaataaaacaaaaaaccttcatctaatactttggatcattgtgaaaaaataaattcctgaagtataaagcatct

SEQ ID NO: 17400 - protein, 493 aa, Homo sapiens
MASGILVNVKEEVTCPICLELLTQPLSLDCGHSFCQACLTANHKKSMLDKGESSCPVCRISYQPENIRPNRHVANLVEKLREVKLSPEGQKVDHCARHGEKLLLFCQEDGKVICWLCERSQEHRGHHTFPTEEVAQEYQVKLQAALEMLRQKQQEAEELEADIREEKASWKTQIQYDKTNVLADFEQLRDILDWEESNELQNLEKEEEDILKSLTNSETEMVQQTQSLRELISDLEHRLQGSVMELLQGVDGVIKRTENVTLKKPETFPKNQRRVFRAPDLKGMLEVFRELTDVRRYWVDVTVAPNNISCAVISEDKRQVSSPKPQIIYGARGTRYQTFVNFNYCTGILGSQSITSGKHYWEVDVSKKTAWILGVCAGFQPDAMCNIEKNENYQPKYGYWVIGLEEGVKCSAFQDSSFHTPSVPFIVPLSVIICPDRVGVFLDYEACTVSFFNITNHGFLIYKFSHCSFSQPVFPYLNPRKCGVPMTLCSPSS

SEQ ID NO: 17401 - DNA, 2665 bp, Homo sapiens
gctcagctggtagtttgacctccgttggtgcaatgccagagatgggattgtcagccaccacactgccaccaccctgcacacagtctgggtccctccgagagaagcacgccaaccttaacatcccctacagcatcttggtgcttcacacaccatttaggaggccaccctaacgaggcaagaggacatgggggtgtgcagaagttctgttcttagtgagaatggctggcctgagaatccagctcacctcctctgcccacagtctggactgcttgtgggaaggccatctcctcctgtctggtggtacctccactctgggcagggagggcctgtctgtgactcgctctggaccccacttcccgctctggccaagggctgtcttctgtgcacatagctcaggagcctgcagcagttccctgtatgggtggatgtcctcaggggccaagaagagaagaatggggacaacagaaacctgctttgtaggggattatgtagactaaaagcctagaagttctgcccacatccttatgacgcagccaatctggagcttcatgtttccttctaaaagtagtaaccgggtagaagtgggtgacccatcgaggacacatgatgtgaggtatttctgccggattctaggttagcaaagactcaaatgggtgactcatgaatgaagggagaacaggcacaggacttaatgaaaagagtttcttgaacttagttttctgaatgggggtggggagttggggcacgtgtgtgtaaggggaggctgcctcactttgaaggaatggtgttggctaacaggatccatgaaattcctaggtcagttgaataataactgaactactggtttgactgtggattatttcctgggtattagtgggacccaacagcacattgctattaatagtatggaaataatggtccctctgtttcattgaattgctgaagtaatgataatgccatgaaccaggagaagatggttgtgggggtttctaggaagcagctgctgtgacaggccaatcccaggcttgcccccgagccctcctgtccttctgggtttgtgtttgccttgcctggtgcttcctccctcattgtgttgttgaatagacctaggcagccttgtatccatagaaagcctccactgctgggccggggagggggttgtggtaagggccctctggaaatcaagcagagaatgcctttgcagtggtctcccgggcattgggcagggcctagccttttgcagcccccagaggaccttgcctgcataaagcactcagaagggttagccacctggtgattttgtctctagtgaaactgtgtttgccgataatcatccacatagccacctctgtcctcgcagtttggatgcctttttttgacacctgcgctaggttcttgtatgctggcttttcttaaaggaacagcagagtagaaaagaggttgagaatgttttctagcaggcagaatgtgcatacatgttttcatgagtgtcctttgggtgctgtttcttttaaatcctctgtgcacagggctctggcctttagtaaactgtttttctgtcttacgtcatgctgactgggtgctaggggctgattacaaaggggaagagttgaacagacatcaggggccgatgaaaccaaaggactaggagtcaggagaacaagtcagggattaggagacagcggtttggtttattgttatccagctggaggactcctaggggcagcagcaggaggaataccagggccacggaggggccaggagtctcacagtggagggcagactctaacagatgccagctgaacgctcgctggccctggatgtcatacgagttggggaccagaaatctgggctcagagaacccgtccagggagatttgaagccatgggttatcttctagagttgatactgataatatattttaatttttattgatgtttaataccttctgaaacaggagggtaagatcagatgggaagcccctctgttgaaggatcttgggaaccttggtggtttttttttttttttggttttttttttttgatcgagctgtggacatccttcttaattcgattctgaggatttgtttaactaaaaagttcccaaacacagaaagggcctccccacctgctttggggagctgtctgtgctgggagtgccaggcatcccatgggacccatcactgccagtgtctgtgcctcccagaggtcagccgtgtctgccctggctctgtctcctctgtgacagggcagagcatttctggtcagtttctccatggtgcctcccacccctttgtaaagtggatggacatgatggaattcagttgtctcaccctgatagcctgggtgttgatattcactttacccgcactcagacacaggcgaccttgaagcagttctcggtgtgtagagtccacgtgacagtccccacagcctccccagatagctgtgtgcctgtgcgctactgctgtgccattttcccaacttggcgtttcactaaatgcagctgatctctctctctgtgcactcgtgatccatgttgaacaatacatgtaggttctttttccacgcaatgtaagaacatgatatactgtacgttggaaagcatttaccttatttatatacctgaatgttcctactacacaaataaacatatattaaattct

SEQ ID NO: 17402 - DNA, 2594 bp, Homo sapiens
  CDS (394)..(735)
taatagactttttcttatcatatccctcatttctttccctgaaataaaaatacacacaagcaaaaaaaaatgatagtttcacatctcttagttcccttgcccaaacaagaatattcttagttccactggccaggattttcctacatagtcagaacttacacattactagaggcacacccaccaaggagtattgtgtctacttttatctgtgcaccagccacaaatacccacattggaaagacccatttgtgatgggtaaacatcccttcctgtctcccacaacccctgtgactgccctgcatgtgttcatgacctccgaaggcccaaattcatgaagcagcaaacccagcagatctccacccccctgcctcaggacctctgctgaagagggggatgaagtgggtctccagggaggcagtgggggccttgttggcagctctgcagttgggaggggcaccgtccggaggagaccaggcctctacacaccccccactctacttatcatccctgctcacacacccttgtccaaggctttatgcatcggatttatttttccaaatcaagaggacagtgatagatgcattttccccaggctgtctcagaaaggtcgctaaatgtatactgttgtcagaattgctgagatctccccccacttttggtttttgcagcagtaaaaactctttccactgtgacttattttctctctcaggcagccagccacctggtcccttgtgctgactctagcacagtggccaggatccaatacgagtccaggggtgaccgcaggatggtgggggcagcgggcttctccacctaccccagccaccaaggccctgacgcactgcctcctgcaccttcagcacatccctgtgcacagctggaagggtgcatggcccgctcacctttgttcagatgggtggaaacgctgatgataccagctcctccctgccgtgcccctgccacggagcaggcattgtgaactggctggtgtttgcagtcccacgtggcatggcctccagcccaacccacagtggagactggagacagggcaatgagtctggtcgggggcacgtggacatgccccataggggccccacccagacttaacaggcaaggtcctgggcattgcgcgacgcaggactcaatgctaaagcaagcctgcctggctctgtgccagggcccctcttctgatttacacatcccatttttacacagacccttccttcttaataaaggctgacagttctgttggcagccaagaacccacaccatgaagacagggagtgaggggcctttgtgcccaactccagcacagctgcgttctggggtgtgtgagaggcatgttcgtgtctgtgcgctggtggtctcgtgagacagttccgaggacggggaaattgcagggtggtgggggcgtgaggcttatatgtggaactgatgcagagttcgcctgcagacggatctggatatacactatgtataattgttacgtgtaatttaaaatatatctgtttgccatcgtcatgagaagattatatgtaaggctctgaagggagagggagatgtacattctgccaggctcctggggaccttatccgagtcatgaaattgatgactgttgatccagtggtgcaagaagctacactccatgtgtcatcacgcttatgactcctaatgtatttttaaggcaaaaaatgtcagccgactccatcttcacccctcgattcctcgagtccagcctttctgtgccagtgcttcactgagccacaacgctctcgccatcgggacccggctgggcctggagtctcggggcacagttgccatggagccctcctgggtcattctacaaatgtgctgagtgccagctgaaaaccccacaggagatggagtaccttggccaagcttaaagagaagattttctcagggtatttattagtgtgtccagcagggtcaggaagcaggatggaaagatgcattcagactgttaatttattaacaaggcaaatgattttgtgtttcttgatgacagactattaagtttgggacttattttcccatttgagaagttataatatatatttaagatgataagtttcctgcttaagttgtgcctttcagcttcaatgagtttaaggagcactaagggtaatgataccaatgagggttggtttattatcaaacctgaatagctgtggtttctccagtaaatattttcttctactgaacatggagccattattaagagttgtgtgttttttattatgtacatttgtatatttttttgcttgtttgatgttctatttttctaatagttttcttttagtttcttaaagttgtgatactagatttagattctgatgctaactgcaaatcaggttggtctctgctgggtctctcctgcttttattttactttaaggacaagtgtagttgtcgtccaccacctttcaaaaaatgtgaaactgccctgcctcccctttttgctgacaacactgtgtacattgaccacttcctaccatactttatgttgtaaaatcaaactcttttgtggtacattatctcatgcttctgcaaattcgaataaattctatggcttcc

SEQ ID NO: 17403 - protein, 114 aa, Homo sapiens
MKWVSREAVGALLAALQLGGAPSGGDQASTHPPLYLSSLLTHPCPRLYASDLFFQIKRTVIDAFSPGCLRKVAKCILLSELLRSPPTFGFCSSKNSFHCDLFSLSGSQPPGPLC

SEQ ID NO: 17404 - DNA, 3568 bp, Homo sapiens
  CDS (865)..(3483)
gtggcttgtggagtggcgaccgttagtgaggcggttgctgagacagacgctgaggcgggtaggaggagcccgagccgtaagggaagccgtgatgagggccgtgttgacgtggagagataaagccgagcactgtataaatgacatcgcatttaagcctgatggaactcaactgattttggctgccggaagcagattactggtttatgacacctctgatggcaccttacttcagcccctcaagggacacaaagacactgtgtactgtgtggcatatgcgaaggatggcaagcgctttgcttctggatcagctgacaaaagcgttattatctggacatcaaaactggaaggcattctgaagtacacgcacaatgatgctatacaatgtgtctcctacaatcctattactcatcaactggcatcttgttcctccagtgactttgggttgtggtctcctgaacagaagtctgtctccaaacacaaatcaagcagcaagatcatctgctgcagctggacaaatgatggtcagtacctgactggggacagaaagtttccttctaccagctgagtggaaaacagattggaaaggatcgggcacagaactttgacccctgctgcatcagctactttactaaaggcgagtacattttgctggggggttcagacaagcaagtatctcttttcaccaaggatggagtgcggcttgggactgttggggagcagaactcctgggtgtggacgtgtcaagcgaaaccggattccaactatgtggtggtcggctgccaggacggcaccatttccttctaccagcttattttcagcacagtccatgggctttacaaggaccgctatgcctacagggatagcatgactgacgtcattgtgcagcacctgatcactgagcagaaagttcggattaaatgcaaagagcttgtcaagaagattgccatctacagaaatcgattggctatccaactgccagagaaaatcctcatctatgagttgtattcagaggacttatcagacatgcattaccgggtaaaggagaagattatcaagaagtttgagtgcaacctcctggtggtgtgtgccaatcacatcatcctgtgccaggagaaacggctgcagtgcctgtccttcagcggagtgaaggagcgggagtggcagatggagtctctcattcgttacatcaaggtgatcggtggccctcctggaagagaaggcctcttagtggggctgaagaatggacagatcctgaagatcttcgtggacaatctctttgctatcgtcctgctgaagcaggccacagctgtgcgctgcttggacatgagtgcctcccgtaagaagctggccgtggtagatgaaaatgacacttgcctggtgtatgacatcgacaccaaggagctgctttttcaggaaccaaacgccaacagtgtagcttggaacacccagtgtgaggacatgctctgcttctcgggaggaggctacctcaacatcaaagccagcaccttccctgtgcaccggcagaagctgcagggctttgtggtcggctacaatggctccaagatcttctgcctccatgtctcctccatttctgccgtggaggtgccgcagtccgctcccatgtaccagtacctggataggaaactgttcaaggaagcctaccagattgcttgcttgggtgtcacagacactgattggcgtgaactggccatggaagcgctagaaggtttagattttgaaacagcaaagaaggccttcatcagagtacaagacctccgatatttagagctcatcagcagcattgaggagaggaagaagcggggagagaccaacaatgacctgtttctggcagatgtgttttcctaccaggggaagttccatgaggccgccaaactgtacaagaggagtgggcacgagaacctcgcgcttgaaatgtacaccgacctctgcatgtttgagtatgccaaggatttccttggatctggagaccccaaagaaacaaagatgctaatcaccaaacaggctgactgggccagaaatatcaaggagcccaaagccgccgtggagatgtacatctcagcaggagagcacgtcaaggccatcgagatctgtggtgaccatggctgggttgacatgttgatcgacatcgcccgcaaactggacaaggctgagcgcgagcccctgctgctgtgcgctacctacctcaagaagctggacagccctggctatgctgctgagacctacctgaagatgggtggcctcaagtccctggtgcagctgcacgtggagacccagcgctgggatgaggcctttgctttgggtgagaagcatcctgagtttaaggatgacatctacatgccgtatgctcagtggctagcagagaacgatcgctttgaggaagcccagaaagcgttccacaaggctgggcgacagagagaagcggtccaggtgctggagcagctcacaaacaatgccgtggcggagagcaggtttaatgatgctgcctattattactggatgctgtccgtgcagtgcctcgatatagctcaagatcctgcccagaaggacacaatgcttggcaagttctaccacttccagcgtttggcagagctgtaccatggttaccatgccatccatcgccacacggaagatccgttcagtgtccatcgtcctgaaactcttttcaacatctccaggttcctgctgcacagcctgcccaaggacaccccctcgggcatctctaaagtgaaaatactcttcaccttggccaagcagagcaaggccctcggtgcctacaggctggcccggcacgcctatgacaagctgcgtggcctgtacatccctgccagattccaaaagtccattgagctgggtaccctgaccatccgcgccaagcccttccacgacagtgaggagttggtgcccttgtgctaccgctgctccaccaacaacccgctgctcaacaacctgggcaacgtctgcatcaactgccgccagcccttcatcttctccgcctcttcctacgacgtgctacacctggttgagttctacctggaggaagggatcactgatgaagaagccatctccctcatcgacctggaggtgctgagacccaagcgggatgacagacagctagagattgcaaacaacagctcccagattctgcggctagtggagaccaaggactccatcggagatgaggacccgttcacagctaagctgagctttgagcaaggtggctcagagttcgtgccagtggtggtgagccggctggtgctgcgctccatgagccgccgggatgtcctcatcaagcgatggcccccacccctgaggtggcaatacttccgctcactgctgcctgacgcctccattaccatgtgcccctcctgcttccagatgttccattctgaggactatgagttgctggtgcttcagcatggctgctgcccctactgccgcaggtgcaaggatgaccctggcccatgaccagcatcctggggacggcctgcaccctctgcccgccttggggtctgctgggctgtgaaggagaataaagagttaaactgtc

SEQ ID NO: 17405 - protein, 873 aa, Homo sapiens [sequence omitted]

SEQ ID NO: 17406 - DNA, 2973 bp, Homo sapiens
  CDS (917)..(1363)
tattccaacagtcatgagtacaaacaggccgtccatgagcttgtgcgttgcgtagcactgacaagaatttgctatggagactcacattggaaactagcagaggcacatgttaatctggctcaaggctacctccagctgaaaggactgtcactgcaagcaaaacaacatgcagaaaaagccagacaaatcctcgccaactccattgtgcctccctatagtgagaatacagatgttttcaagttttccattgagcttttccataccatgggcagagctttactctcccttcaaaagtatccttttgcctctaacttttacaaatagaaatactattcacgtaacacttacacgccaagtaaaaagctgatgctgatggatgacttaggaagtgtgattggaagtatgggagccaaggaagttcaggacatggggtgtagaatctagaaccaagtggaaaatttcctgaacacaattcagatttaaggaagctgcagagaatttgacaaaagcagagagactttcaaaggagctgctacaatgtggaagaattataaaggaagaatggatagaaattgaagcacggatcagattatcatttgcacaggtgtatcaaggtcagaagaagtcaaaagaagctttgtcccactatcaagcagctttggaatatgttgagatcagtaaaggtgaaacaagtcgtgagtgtgtacccatattgagagaattagcaggtgtagagcaagccctgggactccacgatgtatccatcaaccacttcctccaggcacatctcatcatcctgagtagaagcccctctcaagtggaggcagcagactcggcacacatcgtcgcccatgctgctgtcgcttcagggagacacgagcaccatgatgtagctgagcagtattttcaagagagcatggctcatcttaaggattctgaagggatgggaagaaccaaatttctttcaattcaagatgaattttgccattttctacaaatgactggacaaaaagagagagcaacctcgatcctgagagagtccctggaagccaaagtggaagcatttggcgatttcagtcccgaggtggcagagacataccggctcctgggaggagcagacctggcgcaggggaaccacagtggggcccgcaagaaactgaagaagtgtctccagatccagaccctcttatatggaccgcaggacaaaaggactctggccacccagcaggccatgggcatgctgtccacggcccccaaggttgcttcgaagccaaggcaggcatcaaaagccaaagtggccttctgcaccagcatccctcaggacaccctgctggggaaggcccggcccggcacaacagcagactgaggcccccaccctgaaaaagcctaggacattcctgggcactgtcatttagggtgctgtacaaatcacctctgcctagaaaatggaattcaacagtcaggatacagatttccaaggccaactgttggccccaacatgcaacagtgagaccataagcctcccgtgggccacattttgacagtggatgcccttcagggtgatatatgctataaagcagttttctatcacctaagtggtttttcttgccaacaagaatttttacccatcagcactactgtggctgaaaaacttctcttcaacagttcagtgcgccctgtgcaggagtcagcccggcatctgcttgtacacacagctccttgcataggtgtggagttagatctggacagtgaacttcaggaagtcctttcttataggaggctaatagggattgagaataacatgagaagaaaacgctaataaagggaaacctgaacacgctgctgtcagcatgtgttttcaaagtgcagcctgcctcagagttcttcggagcctgaaaaggggtttgagaaagagcccagtaggaggggcaggaggccgacacacctgacttggcctggggcccaggaggcaggtgtaagggagtgaaaagaaaggctagccggaggctgcggggggaagaccgcagactccctgctgcttcgcatccctcctgtggcctccactgcaggcaggacaaacctggatgccacctggagctgcttcctgagttggcacactatcgtgtacacagcagtcttcagccccctggaaggaggccacagtcgtgtgaggatggcaaagtcgaacaggaagctttgagtgccttcctccacgatgtcaacaaggagatccagtgccagatcgaggtggatggaacacccagtggtaggggtgcaggtgtgggcagtgatgtcccttcccctccctcccctggtcccacagactgtggccatgaggctgcaggctggtgctatgacagcagattgcagcacagggccctcccctccagcccccagtgggacatcaaaaccaccctggggccatttgtgcagggcaccacctccagtattgatggggaaaataaactcagtagagccacgacagggtggagagaagcagggaccattgtcttcctcaggagcgtgacagctgaccccacagaccatgcttgctggtacacactggtcccagacccaggcctgtcggacatcagcagtgtgctaaaaacgtgtaagatgtggtcactactcaccgtgtgtcctatctagttgacatgggtggagtcagctaaggggtgaatgttcatatgctcccaattcacgttgaagccctaatccccaaagggatggtattgggggtggggtcttggagaggtgattaggttatgagggtggagccctgatgaatgggattagtgctttataaggagagacaccagagagatgatctctctctccaccatgtgaggacacagtgagaagacagccgtctgcaggcccggaagagagccctcaccaggaaatgaaactgttggcaccttgagacttcccagcttccagaactgtaagaaataaatgtttgttgtttaagcc

SEQ ID NO: 17407 - protein, 149 aa, Homo sapiens; identical to SEQ ID NO: 17129

SEQ ID NO: 17408 - DNA, 4069 bp, Homo sapiens
  CDS (125)..(2284)
ctggaatgaggagctgcagacgacgagggagctgcctcgcaagaacctgcctgagcggctgctccgagaaagggccatattcaaggtgcacagcgacttcaccgcggcagccaccaggggcgccatggccgtcattgacggcaacgtgatggccatcaaccccagcgaggagaccaagatgcagatgttcatctggaacaacatcttcttcagcctgggcttcgacgtccgagaccactacaaggacttcgggggggacgtggcggcctacgtggcgcccaccaacgacctgaatggcgtccgcacgtacaacgcggtggacgtggaggggctgtacacgctgggcacggtggtggtggattaccgcggctaccgggtcacggcccagtccatcatccccggcatcctggagcgggaccaggagcagagcgtcatctacggctccatcgacttcggcaagaccgtggtgtcacacccgcggtacctggagctgctggagcgcacgagtcggcccctcaagatcctgcggcaccaggtgctcaacgaccgtgacgaggaggtggagctctgctcctcggtcgagtgcaagggcatcattggcaacgacgggcgccactacatcctcgacctgctgcgcaccttccccccggacctcaacttcctgcccgtgcctggcgaggagctgcctgaggaatgcgcccgcgccggcttcccccgcgcccaccggcacaagctctgctgcctgcgccaggagctggtggacgccttcgtggagcacaggtacctcctctttatgaagctggccgccttgcagctgatgcagcagaacgccagccagctggagaccccctcctccctggaaaatggtggtccttcctccttggagtccaagtctgaggatcctccaggacaggaggcgggaagtgaggaggagggtagcagcgccagcggcctggccaaggtgaaggagctggcagagaccatcgccgcagacgacggcacagcagaccctcggagccgggaggtgatccgcaacgcgtgcaaggcggtcggctccatcagcagcaccgccttcgacattcgcttcaatcctgacatcttctcaccaggggttcgtttccctgagtcctgccaggatgaagttcgggaccagaagcagctgctgaaggacgcggctgccttcctgctctcctgccagatccctggcttggtgaaggactgcatggagcacgcggtcctgcccgtggacggggcaacgctggcagaggtgatgcgccagcggggcatcaacatgcgctacctgggcaaggtgctggagctggtgctgcggagcccggcccgccaccagctggaccacgtctttaaaatcggcattggagaactcatcacccgctcggccaagcacatcttcaagacgtacttacagggagtcgagctctccggcctctcagccgccatcagccacttcctgaactgcttcctgagctcctacccaaaccccgtggcccacctgcccgccgacgagctggtctccaagaagcggaataagaggaggaaaaaccggcccccgggggctgcagataacacagcctgggctgtcatgaccccccaggagctctggaagaacatctgccaggaggccaagaactactttgacttcgacctcgagtgtgagaccgtggaccaggctgtggagacctacggcctgcagaagataacgctcctgcgggagatctcgctgaaaacagggatccaggtcctgctgaaggagtacagcttcgacagtcgccacaagcccgcgttcaccgaggaggacgtgctcaacatcttccccgtggtcaagcacgtcaaccccaaggcctcggatgccttccatttcttccagagcgggcaggccaaagtgcagcagggcttcctgaaggagggctgtgagctcatcaatgaggccctgaacctgtttaacaacgtctacggagccatgcacgtggagacctgcgcctgcctgcgcctcctcgcccgcctccactacatcatgggcgactacgcagaggccctgagtaaccagcagaaggcggtgctgatgagcgagcgggtgatgggcaccgagcaccccaacaccatccaggaatacatgcacctggccctgtactgcttcgccagcagccagctgtccaccgccctgagcctgctgtaccgcgcccgctacctcatgctgctggtgttcggggaagaccaccccgagatgggctgctggacaacaacatcgggctggtgctgcacggggtgatggagtacgacctgtcgctgcgcttcctggagaacgcgctggccgtcagcaccaagtaccacgggcccaaggccctcaaggtggccctcagccaccaccttgtcgcccgagtctacgagagcaaagctgagttccggtcggccctgcagcacgagaaggagggttacaccatctacaagacgcagctgggcgaggaccatgagaagaccaaggaaagctccgagtacctcaagtgcctgacccagcaggccgtggccctgcagcgcaccatgaacgagatctaccgcaacggctccagcgccaacatcccgcccctcaagttcacggcccccagcatggccagcgtcttggagcagctgaacgtcattaacggcatcctcttcattcctctcagccaaaaagacctggagaatctgaaagccgaggtggcgcggcggcaccagctccaggaggccagcagaaacagggatagagccgaggagcccatggctaccgagcccgcgccagcgggggccccaggagacctgggctcccagcccccggctgccaaggacccttctccgagcgtgcagggatagagagggagccagacggacagccagccagcggccccgtcaccagggagcccgactgcgggagaagggggcgagcctgcgggcggaagaggaagcaaggccctcttcctccacgtctcaccccaccccacccccgtgtcctcctgggagcctggcctgcctgccccgcagaaggtgtttttgcgctggttcaatgaatagatgatgcagaggccccattggagacacgtgaatggcgtgtgcggccatcagttcccggctggggggcaggtgttgcttcggcccccgccctccggccggcgtgtgcgagtgcgcccctggctgtgagtgttgaccgttcctctcccctgtacatagcccgagccagtcctgagtgggtgactcctgagtgggtgacgcgcagacgggatttctcaggtcatttgtatggtcgacatgatggctgctgctttggctgccaccacccccgggcccagcctgtctgaaagttcagggtttaggccgaaaaacccggtggggaggggtggggagccggagctctgtggcggggctggagggctggggtgcactttagtttggggcgggacgggagccgccgttgtgactggcgtggtctggctgctgctcccgaacggaggggtcggggttggcttgctgggccctcagagcccagtgggtggctctgactcggctccctactccctgcacccagctgggcgcagccttggggcctgcggtctgaatgtatccctcccctcagttttaacctgagctgccgaacgcacagtgggccgggggcgaggctgggggaagcggggcccaattacggatcccgggagttacaggtgccgacgtgatgtcgcttctctggtgcccagctcccttcctggtctgagactagctctgggggtggcgggggcccccacacgctgctcccgctccaccctgcccgtgctgctgctctgtgcctgctgtcagagccctggtgggggaggatgtggccaccctgagacccggaggagacgggcgtctgcctgggtttgcggagagccgcttatgggtgtggtccgtccagacaccttgtttcaagggggatgggcgtgagcgggcaagcagagcatccccaccgctgagcaagaactttttcttgtttttaaaccatcacgtcctcatttcacattggaataaagtgagtttttgaaacctg

SEQ ID NO: 17409 - protein, 720 aa, Homo sapiens
MAVIDGNVMAINPSEETKMQMFIWNNIFFSLGFDVRDHYKDFGGDVAAYVAPTNDLNGVRTYNAVDVEGLYTLGTVVVDYRGYRVTAQSIIPGILERDQEQSVIYGSIDFGKTVVSHPRYLELLERTSRPLKILRHQVLNDRDEEVELCSSVECKGIIGNDGRHYILDLLRTFPPDLNFLPVPGEELPEECARAGFPRAHRHKLCCLRQELVDAFVEHRYLLFMKLAALQLMQQNASQLETPSSLENGGPSSLESKSEDPPGQEAGSEEEGSSASGLAKVKELAETIAADDGTADPRSREVIRNACKAVGSISSTAFDIRFNPDIFSPGVRFPESCQDEVRDQKQLLKDAAAFLLSCQIPGLVKDCMEHAVLPVDGATLAEVMRQRGINMRYLGKVLELVLRSPARHQLDHVFKIGIGELITRSAKHIFKTYLQGVELSGLSAAISHFLNCFLSSYPNPVAHLPADELVSKKRNKRRKNRPPGAADNTAWAVMTPQELWKNICQEAKNYFDFDLECETVDQAVETYGLQKITLLREISLKTGIQVLLKEYSFDSRHKPAFTEEDVLNIFPVVKHVNPKASDAFHFFQSGQAKVQQGFLKEGCELINEALNLFNNVYGAMHVETCACLRLLARLHYIMGDYAEALSNQQKAVLMSERVMGTEHPNTIQEYMHLALYCFASSQLSTALSLLYRARYLMLLVFGEDHPEMGCWTTTSGWCCTG

SEQ ID NO: 17410 - DNA, 2278 bp, Homo sapiens
  CDS (117)..(1379)
ggggctggactggcggagcaggtggggtccgcggccgccggagcgttccggtcggcgtctgggcatctcggcctcggcagaaagcgcgaccgccctgctgcgcggggcccgcggcgatgccgttcctgcacggcttccggaggatcatcttcgagtaccagccgctggtggatgcgattctgggctccctggggatccaggaccccgagcggcaggagtctctggaccggcccagttatgtcgccagcgaggagagccgaatccttgttctcactgagctgctggagaggaaagcccactctcccttttaccaggaaggcgtcagcaacgccctgctcaagatggctgagctggggctgacgcgggcggccgacgttctcttgcggcatggggccaatctcaactttgaagacccagtcacctactacacggccttgcacatcgccgtcctgcggaaccagccggacatggtggagctgctggtgcatcacggggccgacgttaatcggagggaccggatccacgagagtagccccttggacctggccagcgaggagcctgagcgcctgccctgcctgcagcgcctcctggaccttggagctgatgtcaatgccgctgacaagcatggaaaaactgctctgctccatgctctggccagcagcgacggggtgcagatccacaatactgagaacattcgtctcttactggaaggaggggcagacgtcaaggccaccaccaaagatggggacacagtgttcacctgcatcatcttcctgcttggtgagaccgtgggaggggacaaagaggaggcccagatgatcaaccgcttctgcttccaagtcacacggctgctgctggcacacggggccgaccccagcgagtgcccagcccacgagtccctcacccacatctgcctgaagagctttaaactgcacttccctctcctgcgcttcctcctggagtccggagctgcctacaactgctccctgcacggtgcgtcctgctggtctggctttcacatcatctttgagaggctctgttcccacccaggctgcacggaagacgagagccatgcggacctcctgcgcaaagctgagactgtcctggatctcatggtgaccaactctcagaaactccagctgcccgaaaacttcgatatccaccctgtgggcagcctggcggaaaagatccaggccctccacttctccttgaggcagctggagagctatcccccgcccctcaagcacctgtgccgtgtggccatccggctctaccttcagccgtggcctgtggatgtgaaggtcaaagccctgcctctgcccgacaggctgaagtggtacctccttagcgagcacagtggctccgtggaagatgacatctgataggtctcaggctacaggaacgggggacacgggcagctcaggtcagcctgttggtagatgctgggacagcattagaagagggtctttttgatctgggagatgagacgggatccttcatgagaaaagccagccaggtagagcctgaagctgtgatcactccagtggtgaagggtgcagctctggttcttccagagagactgcccccttccctccagtggcactccaagtcccccccatgttggaaagaggaacagggcttggattgatgtttataccctctgaattggagggcagtgccagggcatttgcagaagctgggaaggaccaagcctcagcaccccagggctgcggggctcttgttggccgcacgtggcagtgcagctggagaggaagcctggggcacgtcctgtgcggtgccaccaaggccccacccctgccccttttccttccaggttctgttactcacagaagtgtttctggtgggctctgcgggagaagacactaagggccccacaggcttgtttcatggtgttgcaagccaagctggcccctgcctgttcctgtagctctggggccaggtcagccgtggccccacctaccagaactgtgctctgctggcagctgtgcttttgccaaacccagggcctcaacgaccatgacttctgctaaaaagcaatcatgagtgcgtggctggggacagacctctctgaagtgtctcctgttgtgaggggctcactttggagccactgaagagccgactgtgccacccacttgcgagcctcagtcccttccaagctgcactggtcattgggaattgtgtaaacacctctggggataagctgaggtgactaaatgatatatttatattgtaagattaaactgactttcttggcctt

SEQ ID NO: 17411 - protein, 421 aa, Homo sapiens
MPFLHGFRRIIFEYQPLVDAILGSLGIQDPERQESLDRPSYVASEESRILVLTELLERKAHSPFYQEGVSNALLKMAELGLTRAADVLLRHGANLNFEDPVTYYTALHIAVLRNQPDMVELLVHHGADVNRRDRIHESSPLDLASEEPERLPCLQRLLDLGADVNAADKHGKTALLHALASSDGVQIHNTENIRLLLEGGADVKATTKDGDTVFTCIIFLLGETVGGDKEEAQMINRFCFQVTRLLLAHGADPSECPAHESLTHICLKSFKLHFPLLRFLLESGAAYNCSLHGASCWSGFHIIFERLCSHPGCTEDESHADLLRKAETVLDLMVTNSQKLQLPENFDIHPVGSLAEKIQALHFSLRQLESYPPPLKHLCRVAIRLYLQPWPVDVKVKALPLPDRLKWYLLSEHSGSVEDDI

SEQ ID NO: 17412 - DNA, 2794 bp, Homo sapiens
  CDS (70)..(2337)
agagagagaggaagtcggacgtgggcgaggggcggggtgtctggactggaacctctgggcccacatgccatggacaatattaccaggcagaaccaattctacgatacccaagtcatcaaacaagaaaacgagtcaggctacgagaggagaccactggaaatggagcagcagcaggcctatcgtccagaaatgaagacagagatgaagcaaggagcacccaccagcttcctcccgcctgaagcttctcaactcaagccagacaggcagcaattccagagtcgaaagaggccttatgaagaaaaccggggacgggggtactttgagcaccgagaggataggaggggccgctctcctcagcctcctgctgaagaggatgaagatgactttgatgatacccttgttgctattgacacctataactgcgacctccacttcaaggtggcccgagatcggagtagtggctatccgctcacaattgagggctttgcatacctgtggtcaggagcccgtgccagctatggggtcagaaggggccgtgtatgcttcgagatgaagatcaatgaggaaatctccgtgaagcaccttccgtctacagagcctgacccccacgtggtccgtatcggctggtccctggactcctgcagcacccagctaggcgaagagcctttctcctatggctatggaggcactgggaagaagtccaccaatagccggtttgaaaactacggagacaagtttgcagagaacgatgtgattggctgctttgcggattttgaatgtggaaatgacgtggaactgtcttttaccaagaatggaaagtggatgggcattgctttccgaatccagaaggaagccttggggggtcaggccctctatcctcatgtcctggtgaagaattgcgcagtggagttcaacttcggacagagagcagagccctactgttctgtcctcccggggtttaccttcatccagcaccttccccttagtgagcgtatccggggcaccgttggaccaaagagcaaggcagaatgtgagattctgatgatggtgggcctgcctgctgctggcaagaccacatgggccatcaaacatgcagcctccaacccttccaagaagtacaacatcctgggtaccaatgccatcatggataagatgcgggtgatgggcctacgccggcagcggaactatgctggccgctgggatgtcctgatccagcaggccacccagtgcctcaaccgcctcatccagattgctgcccgcaagaaacgcaactatatcctagatcagacaaatgtttatgggtcagcccagagacgaaaaatgagaccatttgaaggcttccagcgcaaagctattgtaatttgtcccactgacgaggacctaaaagaccgaacaataaagcgaaccgacgaggaagggaaggatgtcccagatcatgcggtcttagaaatgaaagccaacttcacgttgccagatgttggggacttcctggatgaggttctgttcattgagctgcagcgggaggaagcggacaagctagtgaggcagtacaacggggaaggccgcaaggctgggccaccccctgaaaagcgctttgacaaccgaggtggtggtggcttccggggccgcgggggtggtggtggcttccagcgctatgaaaaccgaggaccccctggaggcaaccgtggcggcttccagaaccgagggggaggcagcggtggaggaggcaactaccgaggaggtttcaaccgcagcggaggtggtggctatagccagaaccgctggggtaacaacaaccgggataacaacaactccaacaacagaggcagctacaaccgggctccccagcaacagccgccaccacagcagcctccgccaccacagccaccaccccagcagccaccgccaccacccagctacagccctgctcggaaccccccaggggccagcacctacaataagaacagcaacatccctggctcaagcgccaataccagcacccccaccgtcagcagctacagccctccacagccgagttacagccagccaccctacaaccagggaggttacagccagggctacacagccccaccgcctccacctccaccaccacctgcctacaactatgggagctacggcggttacaacccggccccctataccccaccgccaccccccaccgcacagacctaccctcagcccagctataaccagtatcagcagtatgcccagcagtggaaccggtactatcagaaccagggccagtggccgccatactacgggaactacgactacgggagctactccgggaacacacagggtggcacaagtacacagtagccagtgtgacccagaggctcccggaggcccctgccggcttcctccaccagcgcctgcctcggcccctcctctgcccccgccagatcccgtggtgctggggatggggtcatcccagggctgcctccctccagcccactgcctcccctctgaggggcttccttcccctccatagggccaggcatttttttctggattcaaacaggcaacaatgaccttttactttctgtttgtccccacctccccagccttccacctcctgttcttcctaccttcttcctttttgactaaataatccccacctcccttgatcatacagtgaggctacagtgactgaggggagaatcccctcctgttcactctcccaaccctgctccagcccctcagcttcccagaccctcatgcagttggttgtaaattctcccaggagctgttttactgtctacttttcaggatt

SEQ ID NO: 17413 - protein, 756 aa, Homo sapiens
MDNITRQNQFYDTQVIKQENESGYERRPLEMEQQQAYRPEMKTEMKQGAPTSFLPPEASQLKPDRQQFQSRKRPYEENRGRGYFEHREDRRGRSPQPPAEEDEDDFDDTLVAIDTYNCDLHFKVARDRSSGYPLTIEGFAYLWSGARASYGVRRGRVCFEMKINEEISVKHLPSTEPDPHVVRIGWSLDSCSTQLGEEPFSYGYGGTGKKSTNSRFENYGDKFAENDVIGCFADFECGNDVELSFTKNGKWMGIAFRIQKEALGGQALYPHVLVKNCAVEFNFGQRAEPYCSVLPGFTFIQHLPLSERIRGTVGPKSKAECEILMMVGLPAAGKTTWAIKHAASNPSKKYNILGTNAIMDKMRVMGLRRQRNYAGRWDVLIQQATQCLNRLIQIAARKKRNYILDQTNVYGSAQRRKMRPFEGFQRKAIVICPTDEDLKDRTIKRTDEEGKDVPDHAVLEMKANFTLPDVGDFLDEVLFIELQREEADKLVRQYNGEGRKAGPPPEKRFDNRGGGGFRGRGGGGGFQRYENRGPPGGNRGGFQNRGGGSGGGGNYRGGFNRSGGGGYSQNRWGNNNRDNNNSNNRGSYNRAPQQQPPPQQPPPPQPPPQQPPPPPSYSPARNPPGASTYNKNSNIPGSSANTSTPTVSSYSPPQPSYSQPPYNQGGYSQGYTAPPPPPPPPPAYNYGSYGGYNPAPYTPPPPPTAQTYPQPSYNQYQQYAQQWNRYYQNQGQWPPYYGNYDYGSYSGNTQGGTSTQ

SEQ ID NO: 17414 - DNA, 2545 bp, Homo sapiens
  CDS (688)..(1581)
ttatgtatactcaacattgtcttttctccattcgtgttggtcatcatagttttttctacactactctcttctcccttactccctcttttcacccttcctgtgttcttggtggggtttccccgacctattcagagttggccaggagcagcaggcaccacagcctgtgtgtgtgcagatacagtgtactactaccaaatggtgcccaggttgactgctgtactgcagactgcaatggcagctggaagtttaggtctcctcctacctggatctcattacttgggccgttttcaggatcgtttaatgtggataatgattctggaatgtggctatacttactgctctattaacattaaggggttagaattgcaggaaacatcctgtcatactgcagaagctcgcagagttgatgaagtttttgaagatgcttttgagcaagaatacacaagagtatgttcccttaatgaacactttggaaatgtcttgacaccctgtactgttttgcctgtgaaattgtattctgatgccaggaatgttctatcaggcataattgattctcatgaaaacttaaaagaatttaaaggtgacctcattaaagtacttgtgtggatacttgttcaatactgctccaaaaggcctggcatgaaagagaatgttcacaacactgaaaataaagggtaagcacctctaatgttgcctgctttgaacactttgccacctcccaaatccccagaagacatagacagtttaaattcagaaacttttaatgactggtctgatgataatatttttgatgatgagccaactatcaaaaaagtaatagaagaaaaacatcagttgaaagatttgccaggtacaaatttgtttattccaggatcagtagaatcacagagggttggtgatcattctacaggcactgttcctgaaaacgatctttacaaagcagttctattaggataccctgctgttgacaaaggaaaacaagaggacatgccatatattcctctcatggagttcagttgttcacattctcacttagtatgcttacccgcagagtggaggactagctgtatgcccagttccaaaatgaaggagatgagctcgttatttccagaagactggtaccaatttgttctaaggcagttggaatgttatcattcagaagagaaggcctcaaatgtactggaagaaattgccaaggacaaagttttaaaagacttttatgttcatacagtaatgacttgttattttagtttatttggaatagacaatatggctcctagtcctggtcatatattgagagtttacggtggtgttttgccttggtctgttgctttggactggctcacagaaaagccagaactgtttcaactagcactgaaagcattcaggtatactctgaaactaatgattgataaagcaagtttaggtccaatagaagactttagagaactgattaagtaccttgaagaatatgaacgtgactggtacattggtttggtatctgatgaaaagtggaaggaagcaattttacaagaaaagccatacttgttttctctggggtatgattctaatatgtatttatgactatgcatcgctgaggcaacagatcagaaaaggcagacaaagagaagtgactaagattttgcctaatggtgattgagatggctgccaggaaacttttatttaaagaaccaaggaagtagagggaatttacactgggagagtgcttagccttcaagaattattgatccaagtgggaaagttaaatcctgaagctgttagaggtcagtgggccaatctttcatgggaattactttatgccacaaacgatgatgaagaacgttatagtatacaagctcatccactacttttaagaaatcttacggtacaagcagcagaacctcccctgggatatccgatttattcttcaaaacctctccacatacatttgtattagagctcattttgactgtaatgtcatcaaatgcaatgtttttattttttcatcctaaaaaagtaactgcgattcttgtaacttgaggacttctccacacccccattcagatgcctgagaacagctaagctccgtaaagttggttctcttagccatcttaatggttctaaaaaacagcaaaaacatctttatgtctaagataaaagaactatttggccaatatttgtgccctctggactttagtaggctttggtaaatgtgagaaaacttttgtagaattatcatataatgaattttgtaatgctttcttaaatgtgttataggtgaattgccatacaaagttaacagctatgtaatttttacatacttaagagataaacatatcagtgttctaagtagtgataatggatcctgttgaaggttaacataatgtgtatatatttgtttgaaatataatttatagtattttcaaatgtgctgatttattttgacatctaatatctgaatgtttttgtatcaagtagtttgttttcatagacttcaattcataaactttaaaaaacttttaataaaatattttccttccttttc

SEQ ID NO: 17415 - protein, 298 aa, Homo sapiens
MLPALNTLPPPKSPEDIDSLNSETFNDWSDDNIFDDEPTIKKVIEEKHQLKDLPGTNLFIPGSVESQRVGDHSTGTVPENDLYKAVLLGYPAVDKGKQEDMPYIPLMEFSCSHSHLVCLPAEWRTSCMPSSKMKEMSSLFPEDWYQFVLRQLECYHSEEKASNVLEEIAKDKVLKDFYVHTVMTCYFSLFGIDNMAPSPGHILRVYGGVLPWSVALDWLTEKPELFQLALKAFRYTLKLMIDKASLGPIEDFRELIKYLEEYERDWYIGLVSDEKWKEAILQEKPYLFSLGYDSNMYL

SEQ ID NO: 17416 - DNA, 2417 bp, Homo sapiens
  CDS (740)..(1957)
gactgcagagccggggctgggctaggcgcgcgcttggagagcattgcgcgcggctgggcccgcggccggcggctcctcctcccactctgctcctcctcttttttctcctcctccgcctcctcctccgcctcctcctcctcctcttcctcctcctcttcaattctcccggtggctcgactcggctcgcaggcttcggagaaacccctactccagtcgccgactcagcgcccaagagggtcgccttgggctgggggcgcaccccagggaggggaggggtccaggcagctgggccgccgcggacacctagcggcttcagggtgaaccccgaccgcagccgtcgccgcctcgggcagagtttgcgcccttgctttgcgccccgggcgctgaagccgggcgggcgatgcccgcggcgtgaaagcgcccgcggcgggcgccgacctctgtcctagtctcctgctccccccgccccgcttgtcccgtgcccttgtgaccctggctttggcgccgtcgcccaggcgccccgcaatgtagctgcccctgcgcctcggcgggaggcgtcctgccccgcgagcgcccggggcccggagcccggcctgggggctcagccgagctcgggcggggccggggccgcggtggcgatgcaccgggcccgttagcgccaggagcgccaggcagctgaggcggggggcaagccctccctcggaggagccgcgcccccggccccgccggtcccgccgcgatgctgttccacagtctgtcgggccccgaggtgcacggggtcatcgacgagatggaccgcagggccaagagcgaggctcccgccatcagctccgccatcgaccgcggcgacaccgagacgaccatgccgtccatcagcagtgaccgcgccgcgctgtgcgccggctgcgggggcaagatctcggaccgctactacctgctggcggtggacaagcagtggcacatgcgctgcctcaagtgctgcgagtgcaagctcaacctggagtcggagctcacctgtttcagcaaggacggtagcagctactgcaaggaagactactacaggcgcttctctgtgcagcgctgcgcccgctgccacctgggcatctcggcctcggagatggtgatgcgcgctcgggacttggtttatcacctcaactgcttcacgtgcaccacgtgtaacaagatgctgaccacgggcgaccacttcggcatgaaggacagcctggtctactgccgcttgcacttcgaggcgctgctgcagggcgagtaccccgcacacttcaaccatgccgacgtggcagcggcggccgctgcagccgcggcggccaagagcgcggggctgggcgcagcaggggccaaccctctgggtcttccctactacaatggcgtgggcactgtgcagaaggggcggccgaggaaacgtaagagcccgggccccggtgcggatctggcggcctacaacgctgcgctaagctgcaacgaaaacgacgcagagcacctggaccgtgaccagccataccccagcagccagaagaccaagcgcatgcgcacgtccttcaagcaccaccagcttcggaccatgaagtcttactttgccattaaccacaaccccgacgccaaggacttgaagcagctcgcgcaaaagacgggcctcaccaagcgggtcctccaggtctggttccagaacgcccgagccaagttcaggcgcaacctcttacggcaggaaaacacgggcgtggacaagtcgacagacgcggcgctgcagacagggacgccatcgggcccggcctcggagctctccaacgcctcgctcagcccctccagcacgcccaccaccctgacagacttgactagccccaccctgccaactgtgacgtccgtcttaacttctgtgcctggcaacctggagggccatgagcctcacagcccctcacaaacgactcttaccaaccttttctaatgactcgcaacccctcaccccacaatttctttaaaaaagaaattatctttagttgaattccaagtgtattttaaaatagaggctttgagcaactaactaaccacattttaggatctcgcctggaaacagaggtaaaaaaaagaagtgtgcgcccggctaatgcagcggtgtggaccgaggaacaacttggaagatctacctgcaacacaacatttgtgtcactgtacagttttgtggactgagcgaggaaaaacaacaaataatttaagttggctagagcttctgtattttcaaagactgccacgtgccttaggaatactgttttatctccatactttggatgacttgttcatttttctctccctctttttctctgtatatttatgaccagagcaaaaatgtaaaaaacaaaaaaaaacaacaaaaaaagtttgttactttgaatagtcctaaaaag

SEQ ID NO: 17417 - protein, 406 aa, Homo sapiens [sequence omitted]

SEQ ID NO: 17418 - DNA, 2277 bp, Homo sapiens
  CDS (142)..(1914)
ttttacaaaacgctctccttgttgaagaagaaggacccccgcatttatcagaaagatgccaccttctataacagaacagcatcgtcatcagacagtgaggaggacccagaagccttggagaagcagaagaaagtgcggcccatgtacctgaaggactacgagaggaaggttatcttggagaaggcaggcaaatatgttgatgaggagaactcagacggggagacttccaatcacagactccaggagacatcgtcgcaaagttatgtggaggaacagaaacagctcaaggaaagcttccgggcatttgtggaggacagtgaggacgaggacggcgctggggagggcggctccagtttgctgcagaaacgtgccaaaaccaggcaggagaaggcccaggaggaggccgactacatcgagtggctgaagggacagaaagagattcggaacccagattccctgaaggaactgacgcatctcaaggaatactggaacgaccctgagttggatgaaggggagcggttcctgcgggattacatcctcaacaaacgctatgaggagggggaagaggaggaggaagatgaagaggaaatggaggaagagaagggggtccacggtcccccagtccagctggctgtggacggctcctcagacgaaggggagctgtttctgaagaaacaggaggactttgaacagaagtacaatttccgtttcgaggagccggactcagcatcggtcaagacctacccacgcagcatcgcgtcctccgtgcgccgtaaggatgagcgcagaaaggagaagagggaagagactcgggagcgaaagaagagggagaaagcaaagaagcaggaagagctcaagcagctgaagaacctgaagaggaaggagattctggccaagctggagaagctgcggaaagtaacaggcaacgagatgctgggcctcgaggagggggaccttgaagacgacttcgaccctgcccagcacgaccagctcatgcagaagtgctttggggacgagtactacggggccgtggaggaggagaagccacaatttgaggaagaagaagggcttgaagacgactggaactgggacacgtgggacgggcctgagcaggagggagactggagccagcaggagctgcactgtgaggaccccaacttcaacatggacgccgactacgaccccagccagccgaggaagaaaaagcgcgaggcccccttgacgggcaagaagaagcgcaagtcgcccttcgccgcggccgtggggcaggagaagcccgtgttcgaacccggggacaagacgttcgaggagtacctggatgagtattaccggctggactacgaggacatcatcgacgacctgccctgtcgcttcaagtaccgcacagtggtgccctgtgactttggcctcagcactgaggagatcctcgctgctgacgataaggagctgaaccggtggtgctccctaaagaagacctgcatgtacaggtcagagcaggaggagctgcgggacaagcgggcgtacagccagaaggcccagaactcatggaaaaagcggcaggtcttcaagtcactctgccgagaagaggcagagacacctgcggaagccacagggaagccacagagagatgaagccggcccacagaggcagctgccagcccttgatggcagcttgatggggccggagagtcccccagcacaggaagaggaagcccctgtatcaccccacaagaagccagccccccagaagcggaggagggccaagaaggcacggctgctgggccccactgtgatgcttggtggatgcgagttcagccgccagagactgcaggcctttggcctcaaccccaaacggctgcacttccgccagctgggccggcagcggaggaaacaacaggggcccaagaacagctcctgagcaccagggagcaggcaggggcctcaggctcctctcctcaaatcaagccctggacaggtctcgcacccacaagtactatctgctgcagagatcctctcatctgtggccaggcacgcctgtaatcccagcactttgggaggccgaggtgaaaggatcacttgagcccaggaattggagaccagcgtgggcaacttagcgagactccatctctacaaaatgtggtgacacatgcctgtagtcccagctactcaggaggctggggaaggaagatcacttaaggccatgagtttgaggctacagagagctatgattgcaccactgcactccagcctgggcaacaaagcaagaccctgtctcttg

SEQ ID NO: 17419 - protein, 591 aa, Homo sapiens [sequence omitted]

SEQ ID NO: 17420 - DNA, 4130 bp, Homo sapiens
  CDS (612)..(2633)
caatgttcccgagcctgatggacatatcatatcaccactgttggcaggattttatatgttttggaccatgatcattttgttacaggtcttgattcctatttctctctatgtttccatcgaaattgtgaagcttggacaaatatatttcattcaaagtgatgtggatttctacaatgaaaaaatggattctattgttcagtgccgagccctgaacatcgccgaggatctgggacagattcagtacctcttttccgataagacaggaaccctcactgagaataagatggtttttcgaagatgtagtgtggcaggatttgattactgccatgaagaaaatgccaggaggttggagtcctatcaggaagctgtctctgaagatgaagattttatagacacagtcagtggttccctcagcaatatggcaaaaccgagagcccccagctgcaggacagttcataatgggcctttgggaaataagccctcaaatcatcttgctgggagctcttttactctaggaagtggagaaggagccagtgaagtgcctcattccagacaggctgctttcagtagccccattgaaacagacgtggtaccagacaccagagcaggtcatggtggactttgctgctttgggaccattaacatttcaactcctacacatactgccctttgactcagtaagaaaaagaatgtctgttgtggtccgacaccctctttccaatcaagttgtggtgtatacgaaaggcgctgattctgtgatcatggagttactgtcggtggcttccccagatggagcaagtctggagaaacaacagatgatagtaagggagaaaacccagaagcacttggatgactatgccaaacaaggccttcgtactttatgtatagcaaagaaggtcatgagtgacactgaatatgcagagtggctgaggaatcattttttagctgaaaccagcattgacaacagggaagaattactacttgaatctgccatgaggttggagaacaaacttacattacttggtgctactggcattgaagaccgtctgcaggagggagtccctgaatctatagaagctcttcacaaagcgggcatcaagatctggatgctgacaggggacaagcaggagacagctgtcaacatagcttatgcatgcaaactactggagccagatgacaagctttttatcctcaatacccaaagtaaagatgcctgtgggatgctgatgagcacaattttgaaagaacttcagaagaaaactcaagccctgccagagcaagtgtcattaagtgaagatttacttcagcctcctgtcccccgggactcagggttacgagctggactcattatcactgggaagaccctggagtttgccctgcaagaaagtctgcaaaagcagttcctggaactgacatcttggtgtcaagctgtggtctgctgccgagccacaccgctgcagaaaagtgaagtggtgaaattggtccgcagccatctccaggtgatgacccttgctattggtgatggtgccaatgatgttagcatgatacaagtggcagacattgggataggggtctcaggtcaagaaggcatgcaggctgtgatggccagtgactttgccgtttctcagttcaaacatctcagcaagctccttcttgtccatggacactggtgttatacacggctttccaacatgattctctattttttctataagaatgtggcctatgtgaacctccttttctggtaccagttcttttgtggattttcaggaacatccatgactgattactgggttttgatcttcttcaacctcctcttcacatctgcccctcctgtcatttatggtgttttggagaaagatgtgtctgcagagaccctcatgcaactgcctgaactttacagaagtggtcagaaatcagaggcatacttaccccataccttctggatcaccttattggatgctttttatcaaagcctggtctgcttctttgtgccttattttacctaccagggctcagatactgacatctttgcatttggaaaccccctgaacacagccgctctgttcatcgttctcctccatctggtcattgaaagcaagagtttgacttggattcacttgctggtcatcattggtagcatcttgtcttattttttatttgccatagtttttggagccatgtgtgtaacttgcaacccaccatccaacccttactggattatgcaggagcacatgctggatccagtattctacttagtttgtatcctcacgacgtccattgctcttctgcccaggtttgtatacagagttcttcagggatccctgtttccatctccaattctgagagctaagcactttgacagactaactccagaggagaggactaaagctctcaagaagtggagaggggctggaaagatgaatcaagtgacatcaaagtatgctaaccaatcagctggcaagtcaggaagaagacccatgcctggcccttctgctgtatttgcaatgaagtcagcaagttcctgtgctattgagcaaggaaacttatctctgtgtgaaactgctttagatcaaggctactctgaaactaaggcctttgagatggctggaccctccaaaggtaaagaaagctagataccctccttggagttgcaagtattctttcaaggttggaagagggattttgaagaggtatctctccaagcaagaatgacttgtttttccataagggacatgagcattttactaggcttggaagagctgacatgatgagcattattgtatgtttgtatatacatttgtgatagagggctagagtttgacctagagagagtttaaggaagtgaaatatttaattcagaaccaaatgcttttgtaaagctttttggattttgtaaaagcattttcattctcttagaaattcaagtattttcaaggggagtcatttgagatatatttattttactaggagatcttatattctagggaaatgctttaaatggtcaggctccagtcggaatttttttaagaaaaaagtagtttttaatacattggttaggactcagaggaaatacggaaaaaacattgtagatggttaatttacagataaaatcccaagagccttttaaacaacaaggtacctaaaatagggtataattatactgcttaaaatacagttagtgcctattaatagctttttatttcctatgggaagatgcttttggtcttctggctgaagatgtaggcatacctctcactcatttcagtgttttcctgaggtggagccttcattggaaaggggaaagagggattctagggtttcatcagggaccaggaatgcattcctctgtcaggttccaatcaagagaagaccttttatgagatctgcctctgtatagatgttgtcagttaggaaactgaagccataggtcaggcagacatcagctcagcctgtggcccattgggtgatttcctgtattttaaaactgacagtagcctgatcaaagtgatacaatcaatttcaaaacaatcttccagagaccacttgaaggttcatagtttttacaataccctgagacttctcaggtgttggagcctctaaaatatgagatataaacagaaactaatacaagttgttctctggaggtttctatgaggttcttagaaaaatttggttttaaaatcatttgaggacaggaatgtctatagcaagtttactcctattgcgaatcatgtatgctggctttagttgtaacaaacgattttattctaagtaaggccaggtgctactataaaatcatatattcctattgaagttcttttgaagtcctatctctatttattatatttgaaagttgtcagccaccagtcatccagaatttccttcctgaatctccatgctcatatgcaatgtctacatcaaggtcttcttaatgactattattctcagggtttagttttctaccttctgcctactattttggtctgacatttttgtagccttctgttattattggaaatagtctcttacataagctgatttcgagaactttcaaaatctcacatagctagtggaagttgctttctgctttcttatgactgtttttataaataaactgtttcataaat

SEQ ID NO: 17421 - protein, 674 aa, Homo sapiens
MVDFAALGPLTFQLLHILPFDSVRKRMSVVVRHPLSNQVVVYTKGADSVIMELLSVASPDGASLEKQQMIVREKTQKHLDDYAKQGLRTLCIAKKVMSDTEYAEWLRNHFLAETSIDNREELLLESAMRLENKLTLLGATGIEDRLQEGVPESIEALHKAGIKIWMLTGDKQETAVNIAYACKLLEPDDKLFILNTQSKDACGMLMSTILKELQKKTQALPEQVSLSEDLLQPPVPRDSGLRAGLIITGKTLEFALQESLQKQFLELTSWCQAVVCCRATPLQKSEVVKLVRSHLQVMTLAIGDGANDVSMIQVADIGIGVSGQEGMQAVMASDFAVSQFKHLSKLLLVHGHWCYTRLSNMILYFFYKNVAYVNLLFWYQFFCGFSGTSMTDYWVLIFFNLLFTSAPPVIYGVLEKDVSAETLMQLPELYRSGQKSEAYLPHTFWITLLDAFYQSLVCFFVPYFTYQGSDTDIFAFGNPLNTAALFIVLLHLVIESKSLTWIHLLVIIGSILSYFLFAIVFGAMCVTCNPPSNPYWIMQEHMLDPVFYLVCILTTSIALLPRFVYRVLQGSLFPSPILRAKHFDRLTPEERTKALKKWRGAGKMNQVTSKYANQSAGKSGRRPMPGPSAVFAMKSASSCAIEQGNLSLCETALDQGYSETKAFEMAGPSKGKES

SEQ ID NO: 17422 - DNA, 3133 bp, Homo sapiens
  CDS (113)..(1879)
agcgaccgaactctggcggtggtggttaagacggcgaaggcggcagcggcggcgacagctctggggtttgcgtctcggggtgtgtcggccgccgctgctgcttgggcctggtatgtacagatggctggttaggattctcggcaccattttccgtttctgcgaccggtcggtgccccctgcccgggccctcctgaagaggcggcgctcagacagcactctgttttctacagtggacactgatgaaataccagccaaaagaccaagattagattgctttattcaccaagtgaaaaacagtctctacaatgctgccagcttatttggattcccattccagctgaccacaaagcccatggtaacttctgcttgtaatggaacacggaatgtggccccttcaggagaggtattttcgaactcttcatcttgtgaactgacaggttctggatcctggaacaacatgctgaaactgggtaataaatctcctaatggaataagtgactatccaaagatcagagtgacagttacccgagatcagccacgcagagtcctgccttcctttggttttactttgaactcagaaggctgtaatagaagaccaggtggccgtcgccatagcaaaggtaatccagagagttctttaatgtggaaacctcaggaacaggctgtaacagagatgatttctgaagagagtggcaagggtctgaggcgtccccattgtactgtggaggagggtgttcaaaaagaggaaagagagaagtaccgaaagttattggaacgacttaaagaaagtggtcatggaaactctgtctgtcctgtaacttcaaattatcacagttctcaaagaagtcagatggacacattaaagaccaaaggctggggggaagagcaaaatcacggagtcaaaacaactcagtttgttccaaaacaatatagacttgttgaaacaaggggacctctatgttcattgagaagtgaaaagaggtgttcaaaggggaaaattactgatacagagaagatggtcggaatcagatttgaaaatgaaagtaggaggggataccaactggagcctgacctatcagaagaagtgtcggcccgactccgcctgggcagtggaagcaatggcttactcaggaggaaagtgtcaataattgagacaaaggaaaagaattgctcaggcaaagagagggacagaagaacggacgatctccttgaacttacagaggacatggaaaaggaaatcagtaatgccctaggccatggcccacaggatgaaatcctaagtagtgctttcaaattgcgaattactcgaggagatattcatacattaaagaactatcactggctcaatgatgaagtcattaatttttacatgaatcttctggtggaaagaaataaaaagcaaggctatccagcacttcatgtattcagtactttcttctatcctaaattaaagtctgggggttaccaagcagtgaaacgatggaccaaaggggtaaatctctttgaacaagaaattattctggtgcctattcatcggaaggtacattggagcctggtggtgattgacctaagaaaaaagtgtcttaaatatctggattctatgggacaaaagggccacaggatctgtgagattctccttcagtatttacaggatgaaagtaagaccaaaagaaatagtgatctgaatcttttagagtggacccatcacagcatgaaaccacacgagattcctcaacagctgaatgggagtgattgtggaatgtttacttgtaaatatgcagattatatttctagggacaaacctatcacatttactcagcaccagatgcctctcttccggaagaagatggtgtgggaaatccttcatcagcagttgctgtgagaaaactttgcctggtccctctagctgctggtggttctttcacagacatttccatatacctcatgcattgtgggttaaaaagtccctgcatcacttctgttctcacaggtactgagctgtcaaaagtgcatgaaggcctctcactgtactctagtcctgacttggggtgcagagggctgcttgcaatcctgtttgtaaggctgtgcctgctcagagctttggactgttcaacccacacaagaacaaacgctaactaatattttttttaagagattcttttccctatgaatgtgggaaatgcaggatttattctgtgaattgtttgtttctgtgtgtttgttcagcgtattcattcactcactcgtttgcaaacataatgggcagtggtcatttactgctgctcttttacagttagctctaaattacttgtttgaactatttatttctgaaaggaatgttactcaagctgccactccctgctgaagagcaggagggaactctcactgggggcggaaggaagtggagctggagcagtaactgccaacatgaagctggagggtttgggattttttttgtttttgtttttttgaggctcaaaaaatgctgggagaaatgaaaatgctgtgggatagggctcctgttgcctttcagaggaagtctgacactacagcgttggcacagtgccgtgaacagtggaactgtgcccaagggactctgactatccaagcatcttccgaagagtgttgtggtcaccttaaagagacttccctttctggaaatgtggtgacttggcttagtcttcaaactggattcatggatttgaagtaactgtaaaccctaaatcttcattttcatcccagatctggttgagtataaacctcagaattgtaggggctggcctgagctgtttatttcaaaagatactattcaatttaaagctatttttcctcagagtttttgttttctatatattaagtctaaattaagttttctactcattaagactaacatctccccactccatccccactgaaatttgtggaagaaaatttagtacttggctctgaggttgccagttatacaataatctattttgcatatgaaagtttgtatttaacttttttgttcattaaaaaccttactgatatggttataacttcagacagtttagagttggtcagaacatattttgcaagatctagtgcctagtgttgcttttctgatgtaataaaaggtggtctggcagaacct

SEQ ID NO: 17423 - protein, 589 aa, Homo sapiens [sequence omitted]

SEQ ID NO: 17424 - DNA, 2437 bp, Homo sapiens
  CDS (65)..(2221)
aagttttcacatatttccttcaacgtccacagctgaatcctcaccagctgctaatgtttctgtaatggatggaaagatgcaaccaaacagctttccgtggcagtcccctttaccatgcagcaatagcctccctgcaacgtgcacaactggccagagtaaagtggcagcctggttacaggactcggaagagatggacaggtgtgcagaagatcttgcacattgccagtcaaaccttgtggaacttagcaaactcctgcaaaatttggaaatacttcagagaactcagtcagcacctaactttactgacatgcaggctaactgtgtagatatttcaaagaaagacaagcgggtcacaagacgatggagaacaaaaggtgtcagcaaagatacaaaaatacaactgcaggttcctttcagtgctaccatgtcaccagttcgcttgcattcctccaaccccaacctttgtgcagatattgaatttcagactccccctagccacctcactgaccctctggaaagttcaacagattatacaaagctgcaagaagaattttgtctaatcgcacagaaagtgcattctcttttgaagtctgcatttaatagcatagctatagagaaggagaagctgaagcagatggtttccgagcaggatcacagtaaaggccacagcacgcagatggcacggctccgacagtcactgtctcaggcactcaaccagaatgctgaactaaggagtcggttgaacagaatacattcagagtctattatttgtgatcaggttgtcagtgtaaatattattcctagccctgatgaggctggtgagcaaatccatgtcagtctccccttatcacagcaagtagccaatgagagccgcctctccatgtcagagtctgtttctgagttctttgatgcccaagaggtgctcctctctgcaagttcgtcagagaatgaggcttcagatgatgagtcttacatcagtgatgtgagtgataatatatctgaagacaacaccagtgttgcagacaatatttctcggcaaatcctgaatggggagcttacaggaggggccttccgaaatgggcgtcgagcatgcctgccagctccttgtcctgacaccagtaacattaacctgtggaatatcttgaggaacaacattggtaaagacctgtctaaagtctctatgcctgtggagctaaacgagccgctcaacaccctgcagcacctctgtgaggaaatggaatacagcgagctcctggacaaggcttcggaaactgatgatccatatgagcgcatggttctcgttgccgcatttgcagtttcaggatactgctccacctatttcagagcaggaagtaagccattcaacccagtccttggggagacttatgaatgcattagagaagacaagggattccgctttttctcagaacaggttagccatcatccacccatttctgcctgtcactgtgaatcaaagaattttgtgttttggcaagatatcagatggaaaaacaagttctgggggaagtcgatggaaatcctgcctgttggaacactgagtgtcatgcttccaaagtatggagattactatgtgtggaataaagtcaccacttgcatacacaacatcctcagtgggagaagatggatagaacattatggagaagtaaccatcagaaataccaaaagcagtgtttgcatttgcaaactcacatttgtcaaggtgaattattggaattctaacatgaatgaagtccagggggtggtgatagatcaggaggggaaggcggtgtaccggctgtttggaaagtggcatgaaggactctactgtggtgtggccccctctgcaaagtgcatttggagaccaggttccatgccaacaaactatgagctgtactatggcttcacaaggtttgctattgagctcaatgagttagatccagtactaaaagatctccttccaccaacagacgcccggttccggccagatcaaagatttttggaagaaggaaatttagaagctgcagcatcagagaagcaaagagtagaggaactccagagatctcggagacgatatatggaagaaaacaatcttgaacatataccaaaattttttaaaaaagttattgatgccaatcaaagagaagcctgggtttctaacgacacctactgggagcttcgaaaggaccctgggtttagcaaagtagacagccctgttctttggtagactgggaatgtagagctagccaacatatcacattctgaatgaataaataactatgcacaattatgtttcttatagctatgtgtggtttctgggtcaactgaaaacctaccatttgcttttctattcatctttataatggactttcagaagtgcattagacaaggcccctaaccactttgggatcctttctgttttgctgcaaccatattcctt

SEQ ID NO: 17425 - protein, 719 aa, Homo sapiens [sequence omitted]

SEQ ID NO: 17426 - DNA, 2290 bp, Homo sapiens
cgggtcctgaggaatcctacacaagctacttatatcagtgatcactaggataatccatagaacttttgggaaagaagtttaagacctttctcccaccatttcagcaggataaattccaactggattagaaaatgaaatgttaataatgcaaataagtacatatttatatctgtatataaaatacagttgatatttgcctggtgtttaggtgtctaaaggactttctaagcataaaggcaaaaaaaagtcataaaaatgctatagcagtttgagactctatgcaggaaagggcatcatcacgtgcatggatgaatctgtatctaattttaaacaatttccaatggtgcctgtttccttttctttgaaaatctctggagaaatagttcctcttgctgtgtctttctttaggcaagaatttttactaattgatgtgtagtctgaatcctggctaagtataaaccttttattttttatacctgttcttagtgaaaatgaaactgtgactttttttttaattccttttgttggtcaaaaactacaattaactcttctgagtttcttctctggctgaacaaacaatggtcccattggcctttcagggaactccaggccgtctcaaaaaccttcatgtttcatttcttttcagagctcccaaaaagaatagcttgctcttgacgttgtacatgttagtggaatgatcaggactactttgcaaagatgaaaaatttgtgtttctagtgatttgaaaatagaaatctgatgtaactattagatattgggaaagaaggtgacgaaggtaggtatcaccgaaagcacttaacaattctgaataattctgtacttgattgcatttatgtgtatcataggaacagttgggtttccttgagtgttaaattatttattcacttattccacttcaagccagctaaatgattgtttccctgatggcaaaagtctcagattgattgcacagtttatttggttggattgtttatgctctttttattatttattcttatttcaccaatgaaaatatcactaagttctttggtttgttgacctgattgtacctactttgacaaatcactgcctttctggacccagttttctcattaagtggcagtgataacctgtcatacttacagatataaaaacatgaaagttaaagtattgggtaatactttcctcctatcttttttttattttgaaaaagataaaaaattggcataatgtattagttaagatggaataatcatatgttgatatccagccatttcttctctcaaatgataggaagatttttatgtgaaactacttgtgagagatcttaacaatttgtagttagagaaagcactattatatcatttggaaatgcaagaaacaagttacctttggggcaacagaggcccttgtcattttctcaaaagaaggaagcatcagcattttgatgatgatgttgagattgtagaaatgatgaaggtgaaaaagttattctagcttatgtttagcaaaatgaaatgaacccaaataataaaacagttacaacattgaatctctttgggagaaaaaaaaaagatagaatgctaatgtccttcagaacttcttaaaccagaaccttaaaaaaaagagaagcttttaaaaaatcataatagtttatgatcttgaagggtttaaaagtatttgatgaagatgtcttttgaatttatttgtaggtcttcttgtgtatttaaaagctaagttatcttgtaatcatttttttctatacctttgtcagtaacctcttagtgatgaaataaaaaagattaggtaatcatccagcaatggggaagaagttaaggaacaaagagctcagattaaactagtttttagaatctaagcatttctgcatgaatttgaatcatggaaaacaaaatgtagcactccaacatttgatgcaaaactaaaagtggaatactgctttgatatttgaatgaattgaaaaataattaacatccttggaactgtatgtaaagaaggacttcacaagtattatagatacccccaacctcagcccttttcccatgtatctctttgatcacatccctacctcatagatcacccatgtgctgaagactttcagttctgtatgttcattctagatctcctgaactcaagatcagaatatctttctgacttctgactgtgtatttctggatgttatacaagaacctcagctcaaactcagtattccctaaaccattgtttttgaaactttatgttggatgtgaaatctgtattgtagaataacatt

SEQ ID NO: 17427 - DNA, 2107 bp, Homo sapiens
  CDS (117)..(473)
gtccggcgcgcagaggaggaggagaaagctgaccgcttaggcccgggtagtggtcgtcgtggttttccttgtagttcgtggtctgagaccaggcctcaagtggaaacggcgtcaccatgatcgcacggcggaacccagaacccttacggtttctgccggatgaggcccggagcctgcccccgcccaagctgaccgacccgcggctcctctacatcggcttcttgggctactgctccggcctgattgataacgtgatccggcggaggccgatcgcgacggctggtttgcatcgccagcttctatatattacggcctttttttttgctggatattatcttgtaaaacgtgaagactacctgtatgctgtgagggaccgtgaaatgtttggatatatgaaattacatccagaggattttcctgaagaagataagaaaacatatggtgaaatttttgaaaaattccatccaatacgttgaagtcttcaaaatgcttgctccagtttcactgatacctgctgtttctgaatttgatggaacatgtttcttatgacagttgaagcttatgctaatctgtatgttgacaccttgtaattaaaatacgtaccatgagtactctgactctttattgttgtaagaaaaatagttcatcatcagagaatggtcagtttccattcacccatctgaaagattttaagatgaggttgaattctagtttagagttaacagactacccaaatctggcccactgccaataaagtctcattggaacacagccatgctcatttgtttacatgttgtttatggcgactgccatgctgcaagagcagaattgagtagttgtgatagagacctatggcctgcaaagcctaattaatatgtagccctttcagaaaaggtttgcctgcccctgtcctagtgcaaagtgaatttagagtgagccagattatggaggattctgtgactcttgccaaataattttgacttcatcctgtaggtattaagtcattaaggcgttttaaatcatacagtcaggtttgtatttctgagctgtctataatgaatgatatagaaggtggtttcgaaggaggagactccagacaaggaaaacagaaatcttatgttgccaagttgtctttgctcttaggtgggttatcctggagaaaatggactcaggagctaatactgtctacagtggagcttggtgcaattagaagcaaaagactgtacctaactggaatgaggttactttttatggcttatcaaatgcttgtcctggcccgatgcagtggctcatgcctgtaatcccagcactttgagaggctgaggcagggcagattgcatgagcccaggagttcgagaccaacttgggcaacatggtgaaacactgtctctgcataaaatacaaaaattagctgggcgtggtggcacgttcctgcaatcccagctactcataaggctgaggtgggaggatctattgagccctggaattcgaggatgcaattaattgtggttgtgtcacagttcactgcagcctgggtgacactccagcctgggtgacaaaggagaccccgtcaaaaaaaaaagtacttgtcccaaaagtttttgtttcctagcttagaatttataatcagattaggttttggagataaagtatatgtggtatttttttttttttttgagacagtcttgctctgtcatcaggctggagtgcagtggcgcaatttcggctcactgcaacctccacctcctgggttcaagcaattctcctgcctcagcctcccgagtagctgggactacaggtgcgtgccacgacgcccagctgatttttgtgtttttagtagagacggggtttcaccatgttggccaagatggtctcaatctcttgaccttgtgatccacctgccttggccttccaaagtgttggaattacaggcgtgagccaccgcgcctggtctatatgtgatttcaaattaggtggccttataaatataagcagatggtttctgggcaaaatcaaatgatttctgtctctattttcttgagtactaattgtaaaaactgaaattaggttgaggaaagtgctttagaaataataaagatgtacaaat

SEQ ID NO: 17428 - protein, 119 aa, Homo sapiens [sequence omitted]

SEQ ID NO: 17429 - DNA, 3207 bp, Homo sapiens
aaagctagttgagagagcatactctggtttttcatctctcacagtagtcaaagaagttacatatacaattagaatttgttgtttctgttgccagaaactcaatacaatttgtcacatcaggaaaggttttttgttgttattgttgttgtttttgagacggaatttcacttcactcttgttgcccaggctggagtgcaatggcgcgatctcggctcaccacaacccccacctcccaggttcaagcgattctcctgcctcagcctcccaagtagctggaattacaggctttgtcactacgcctggctaattttgtatttttagtagagatggggtttctccatgttggtcctgctggtgtcgaactcccaacctcaggtgatccgcctgcctcagcctcccaaagtgctgcgattacaggcgtgagccactgcacctggcccaggaaaagttttttacatacgaattaaagatgcttctttatgcaaatttttaaaccccaggtttgaagtaggataaaaggtaacattaaatctgagatcatttctagctctggaattctgtgattgtaatgagttttgatttctaaatgttttttcctttcataatttcagggttagtcagcaacataaaatcaacctaatgacagcagacaacttatccatctgtttttggccaaccttgatgagacctgattttgaaaatcgagagtttctgtctactactaagattcatcaatctgttgttgaaacattcattcagcagtgtcagtttttcttttacaatggagaaattgtagaaacgacaaacattgtggctcctccaccaccttcaaacccaggacagttggtggaaccaatggtgccacttcagttgccgccaccattgcaacctcagctgatacaaccacagttacaaacggatcctcttggtattatatgagtaggaagtgattgcaaacaggctggatttggacaaaaagcaaatctagacatgcatgtttcagggttcagtagtatacttcatgtttcatacagataattcacattcaaaattacattttctctttgaactagatggtattccttattcacttacattacaaatctaagaccatgtgataagcatgactggagaggtttaatttttataaacaaaaatagctataaagtacaaagctgctgctgcatgcaaccttattgcaatcagtatatcattcctgtggcaatttctgtcaccttatattgtgaataaaatttttctatagaaattaaatgatttaaaaactcacctatatgaaacatttaatgcttttcagcctgctttctggctgattttgttatttgatgtgctaatttgggcaacttaatttacattctggcagtcggtgtagataactaaaagcccagttaagtattttataatttcaggctactgaggccatgcttgggatgttgtttgaaagaaagaaaaaatacacttgacatatttcacatttctgtaccttcatctttacttccaagtaaacccgtggatgatttgatgagggataaatgaacctatttcttttacacacataccaaggacatgcttgtggctaaagtgagttgataatgttgtgcaaaggatagttgtcaccaactcatttctttatggtccataatgaaataaaaattttgtatactgttaattctgtaaacagatgcatgttcaaaagatctatgatggtcttgtaatcttaatctaatatattttagatattttaattttttccctcttggggaacacatttagtatagtgtagaaaatacttccatgacattttcatataaggttatataacttttcatacataaacatgaaatttgttgtagaaaattctttaaaccaaacatttaaatctaggacttcaatttaatttgttccttgaatctatttttatgtggcccttaaaaaatatccaaaaaacccattgctaatatagcaataagaatactttgggtactgacagactctttggagtgtttatattacaaatttgtattcatattcttttctgtgatgtgttgtactaaaatccaaaatggcttttgcaccatttttaagccaattttttcctttgatgttggtaccagaattactataagtgactgctgcttttgggggtaaacattttgttagtgaagataaaaccagaacactaaattatggataaaattttcagaataggtggcacaggtaaatttcactaggttatattttgtgtagtaaagaaaaaaattatttggtcaatgttatcttaattcatactacaatttaagattatcttatgtgtattatagtaaatagatgattttcagattcaaggctcctaagagtttgatttgctctgttttttcctaaaataaatattgtctctcccaactgttaagttctaggtattgtacttccaattttaacttcagaaccaagatgttggcatgaaccaggctgctgttgaagtacatgtatattataaattatcttatttgtgttatactcttacatgttatcttttctaagaaaacaaagtccctattattcctattgcaaagcacacaggaattaagaaagtacagtaatttttaaaaaaaaatccggtaaatgtagtattcttaacctgttctatattacttatacctattgtctatatagctttaatttatagttgtcagtttaactattggcatgtctggcaaagaaaattaaactttaagagttttataaactgtttctaggttgctaaagaatttatttttctactatatatggtatagacaaagcatcaaactatgtacaggaaaaaagcctgactatttctatttggaagtaggctgaaaagagaattttcaaaactgttcgtgtcttcagttcattctgtcataactttgctattgtaatatgtgaataccagtttatttaagctgttctcttttatactgtattaatttaatgttcatctgcgtttagtaccatttttgttattaaaactggcatttaccgtttttcacattaacccaccttgcaccttcccccaaacttatctccacttttctatgcattctatcattgatttgacacacttcatagtgagtcatttaaatactctacgtttggttcaattaaccagtaggttacagttattgaaaattaaagtacagtttaaagctc

SEQ ID NO: 17430 - DNA, 2977 bp, Homo sapiens
  CDS (114)..(2189)
aacaaggaaatgagcaaagtaagaagacaccaattgagaaatctgattttgctgctgctacacatcctcgtgctttttacctcagtaaaccagatgaaactccaaatgcttggatgtctgattcaggaacaggattgacttactggaaactagaggaaaaggatatgcaccactctttgcctgaaactttagagaagacgttcatatcattgtcttccacagatgtgtcaccaaaccagtctaatactagtaatgagatgaagctaccgtcactgaaggatatttattataaaaaacaaagggaaaacaagcagttacctgagaggaatctcacttctgcttccaacccaaatcatccaccagaggtcctgactctagatcctacgttacacatgaagccaaagcagcagatttcagggattcaacctcacggccttccgaatgcccttgatgacagaatatccttttccccggactctgttctagagcctagtatgtctagtccctctgacatagactcattttcacaagcaagtaatgtcacttctcagttacctggatttccaaaatatccctcacacacaaaagcttctccggtggactcttggaaaaatcagacattccaaaacgaaagtaggaccagttccacgtttccgtcagtatataccattactagtaatgatatctcggtcaacactgtagatgaagaaaacactgtcatggttgcttcggcctcagtcagtcagtcccagcttccaggtacagccaacagtgtcccagaatgcatttcattgacttccttggaagatcctgtgatattgtctaagattaggcagaatctgaaggaaaagcatgctcgacacatagcagatcttcgagcttattatgaatcagaaataaatagtttgaaacagaagctggaggcaaaagaaatctctggagttgaagattggaagataaccaatcaaattcttgtagacagatgtggccaattagatagtgctttgcatgaagctactagtcgcgtgagaacacttgaaaataagaataacttactggaaattgaagtgaatgatttgagagaacgcttcagtgcagccagcagtgcttccaaaattttgcaggaacgaattgaagaaatgagaacaagcagtaaagaaaaagacaataccatcattcgactaaaatctagactgcaagatttagaagaagcatttgagaatgcttacaaactctcagatgataaagaagctcaactaaaacaagagaacaaaatgtttcaagatcttttaggagagtatgagtcccttggaaaagaacacaggagagtaaaggatgcattaaatacaactgagaataaattgcttgatgcatatactcagatttctgatttgaaaagaatgatttcaaaacttgaagctcaggtcaagcaagtagaacatgaaaatatgttaagccttcgtcataattctagaattcacgtgagaccctcgcgtgccaacacactagcaacttcagacgtcagcaggcggaaatggctgattccaggtgcagagtattccatctttactggccagcctctggacacccaggacagtaacgtggataaccagctggaggaaacctgtagcctagggcaccgttcacctctggaaaaggattcttcacctggaagttcatcaacaagcttgttgataaaaaagcaaagagagacttcagacacgccgatcatgagagctttaaaagaacttgatgagggaaaaatatttaaaaattgggggacacagacagagaaagaggacacctcaaatataaatcctcggcaaactgaaacttcagttaatgcaagtcgttctccagaaaagtgtgcccaacagagacaagagagacttaattcggcctcacagagatcatcatctttaccaccttcaaatcgtaaatcaagtactccaacaaaaagagagattatgctaacaccagtgactgtggcttatagtccaaagcgatcccctaaagaaaacttgtccccaggatttagtcatctgcttagcaaaaatgagagcagtccaattcgatttgatatacttttggatgatttagatactgttcctgtgtctacattacaacgtaccaatccaagaaagcaactccagtttcttcctctagatgactcggaagaaaaaacttattaatcatagctcttgccctgaaccggtgccaaatggagtgaagaaagtatctgtgagaacagcctgggagaagaataaatcagttagctatgaacagtgtaagccggtttcagtcactccacaggggaatgattttgaatatacagcaaaaattcggaccctagctgaaacagaacgattttttgatgaacttacaaaagaaaaggaccagattgaggcagcgctaagcaggatgccttctcctggaggacgaatcactttacagacaagattaaatcaggaagccttggaagatcgtttggaaaggattaatcgagaactgggttcagttcgcatgacgctaaagaaattccatgttttgcgcacctctgcaaatctttgagatttgtagccattaaattttgagacatttttgtttgcactaatgtataattatgcagtcagaaaaggcaaactattttgtactgtttataagccttcaaacagtagttttacaatcatgctattcttacacttgctattttatacttcaaatagccacatattttcaagatatttttgttatgctcaggaatctcttgtatattttactatttaaaaagcattatttttaaatagtatctgtctccaatttatatcaagaataaggaaatataaacagaggaagcagcttgtttctaaacaaatagtgttatccttttacaattaactgcacatcaattttatagacttgttctacattgtaaatacaattcagtttttaaaaaataaagcttaatagcttccat

SEQ ID NO: 17431 - protein, 692 aa, Homo sapiens
MSDSGTGLTYWKLEEKDMHHSLPETLEKTFISLSSTDVSPNQSNTSNEMKLPSLKDIYYKKQRENKQLPERNLTSASNPNHPPEVLTLDPTLHMKPKQQISGIQPHGLPNALDDRISFSPDSVLEPSMSSPSDIDSFSQASNVTSQLPGFPKYPSHTKASPVDSWKNQTFQNESRTSSTFPSVYTITSNDISVNTVDEENTVMVASASVSQSQLPGTANSVPECISLTSLEDPVILSKIRQNLKEKHARHIADLRAYYESEINSLKQKLEAKEISGVEDWKITNQILVDRCGQLDSALHEATSRVRTLENKNNLLEIEVNDLRERFSAASSASKILQERIEEMRTSSKEKDNTIIRLKSRLQDLEEAFENAYKLSDDKEAQLKQENKMFQDLLGEYESLGKEHRRVKDALNTTENKLLDAYTQISDLKRMISKLEAQVKQVEHENMLSLRHNSRIHVRPSRANTLATSDVSRRKWLIPGAEYSIFTGQPLDTQDSNVDNQLEETCSLGHRSPLEKDSSPGSSSTSLLIKKQRETSDTPIMRALKELDEGKIFKNWGTQTEKEDTSNINPRQTETSVNASRSPEKCAQQRQERLNSASQRSSSLPPSNRKSSTPTKREIMLTPVTVAYSPKRSPKENLSPGFSHLLSKNESSPIRFDILLDDLDTVPVSTLQRTNPRKQLQFLPLDDSEEKTY

SEQ ID NO: 17432 - DNA, 2382 bp, Homo sapiens
cgatgaattcagccgaatcccaagaaccatatcgagccctgctgctacccaagccagtgtccccgacgacagcagttcccggaggtgcagcgcgcctggggcgagcccgaaggagaggcatcctgacagccgccagcgggagagaggtggaggccccaagaagccgtggaaatgcggggactgcgggaaggccttcagctactgttccgcgttcatcttacaccagagaatccacaccggggagaagccatttgcgtgccccgagtgcggcaaggccttcagccagagcgtgcacctgaccctgcaccagcgcacgcacacgggcgagaagccctacgcctgccacgagtgcggcaaggccttcagccagggctcgtacctggcgtcccactggcgcacgcacacgggcgagaagccgcaccgctgcgccgactgcggcaaggccttcacgcgcgtcacgcacctgacccagcaccggcgcgtgcacacgggcgagcggccctacgcgtgcgcccagtgcgccaaggcgttccgcaaccgctcgtccctgatagagcaccagcgcatccacaccggtgagaagccctacgagtgctccgcgtgcgccaaggccttccgcttctcctcagcgctcatccgccaccagcgcatccacacggaggagaagccctaccgctgcggccagtgcgccaaggccttcgcgcagatcgcgcacctgacccagcaccggcgcgtgcacacgggcgagaagccctacacgtgccaggactgcggcgcgctcttcagccagagcgcctctctggccgagcaccggcgcatccacacaggcgagaagccctacgcgtgcggccagtgcgccaaggccttcacccaggtgtcgcacctgacgcagcaccagcgcacgcacaccggagagcggccctacccctgccacgactgcggcaagcgcttcagcaaccgctcccacctcctccagcaccgcctcgtgcacaccggtgagcggccctacaggtgcctgcaatgcggggccgccttcagccacgtgtcctcgcttatagagcaccagaagatccacaccggagagcggccctacaagtgcggcgagtgcggcaaagctttcagccagggctcctcgctcgccctgcaccagcgcacgcacacgggcgagcggccctacacctgccccgagtgcggcaaggccttcagcaaccgctcctacctgatccagcaccacatcgtgcacaccggggagaagccctacgagtgcagcggctgcgggaaggccttcagcttctcctccgcgctcatccgacaccagaggacgcatgcagacagttcgggacgcctttgcccagctcccacgcctgactcaacacctgggctctcacagggaggagaaacctgtcaacaggggtgccctggcagaaacccgcgtggaccagcagaagattaagagctgagggcctcctttccaacctcacaatgctatgggggagatactgtgttatccccgacgcttcctgtgaggaaaccgaggctcagagaagcttgttaacttgcctgagggcacacagtggggaagacacagggctaagactgtacctcacatctgccagactcccctgcggtcttcctggtgcaaaattataaatggggcacgggcaagtagacctgcagaaacacctatggctggcctttaatttctttctttttttctttgagacagtgtctctctctgtcacccaggctagagtgcagtggagcgatctcggctcactgaaacttctgcctcccgggtacaagtgattctcctgcctcaacctcccgagtagttaaaattacaggagtctggctaattttttttttttttttttttctgagacggagtcttgctctgtcgcccaggctggagtgcagtgatgcaatctcggctcactgcaacctccgcctcccgggttcaagtgattcccctacctcagcctcccgagtagctgggactacaggcgcccggccaccacacctggactagtttttttgtattttagtagaggcggggtttcatcatgttggctaggatggtctcgatctcctgacttcgttatccacccgcctcggcctcccaaagtgctgggattacaggcatgagccaccgcgcccagcctaatttttgtatttttagtagaggcagggtttcaccatgttggccaggctgtctcgaactcctaacatcaggcgatctgcctgccttggcatcccaaagtgctgggactacaggcctgagctacggtgcctggccagctggccttttcattgttgattttattgagtaagcccttgctcagtaaatttaattgaattaaagtgaataaaaggtttggtttc

SEQ ID NO: 17433 - DNA, 1140 bp, Homo sapiens
agcggggctgaagccctgggcccggcagaggaaggtcgagatggaccatgttgggccccttctctccccgcccccaggccgcagttcgggggccacgccccggcgtgctcgggtcaccgcgggaagcccttgaaccccctggcgcccggcacccacgtgcggtaaccgcggctcctcgagagctccagggatgcggatctacagtaagggctgtggccagatgaatgaatgcacattttttagtgggcagaaagatgttagaattcatgaattagaataagcacaaaggagggtgagaggggaggccgtggaagccgcattcctccccttgacttgggcgcccacccccgaaggggcgcgtcccctccctgctccactgcacgtgggtgtttaaccaggggatatccagtgcctcaagcaccacgacccgggagaaaactgggttgagaaggtcttctaacaagccttttgcacacctgccatgtattttgtcaggccttggggatgaaggtgagaaattcgagaatccccggagataacacatcagcaaatagtgcgcaggcagaacaagctgttggaggtgagagacacagagcagagaagcacccgcacctggagagtcaggagggcctcacatcagaacgcctgagcaaatacagttttgaaggatactaattttttaaaaagttcattcacatgagttagacaaagagaaagaagcaggacattctaggaagaaggaacggcccaggcaaaagcgacgcgtacattggcgtgggtccattcaagaattgtgcccacaatataccaggcacttgtccagacctgcatcgtccaatgcccacctcgacctcccaaagtgttgggattagaggcgtgagccaccgcgccctgcctgcatgtggctattgagatgtgctgtatgatacacaccagactttgaagactcagtgtggaaaataaaaagaattttaagaggggtgggggtcgaggggaggcagagcagtaggacaaatagctaatgcacgcagggcttaaaacctagacaacaggttgatgggtgcagcaaaccaccatgacacatgtttatctatatagcacctacatgttctgcacttgtatcctggaacttaaaattag

SEQ ID NO: 17434 - DNA, 3166 bp, Homo sapiens
  CDS (143)..(2203)
gtcctccggggattagagccggtgggctcgttgtgggcgccatttctcggcgtctcccgaggagccgcccctttctcagccttgctcggctcttccccgctctggtcgccggggctgcgccgtccccagctcagtgacaaaaatgctgagtttcttccgtagaacactagggcgtcggtctatgcgtaaacatgcagagaaggaacgactccgagaagcacaacgcgccgccacacatattcctgcagctggagattctaagtccatcatcacgtgtcgggtgtcccttctggatggtactgatgttagtgtggacttgccaaaaaaagccaaaggacaagagttgtttgatcagattatgtaccacctggacctgattgaaagcgactattttggtctgagatttatggattcagcacaagtagcacattggttggatggtacaaaaagcatcaaaaagcaagtaaaaattggttcaccctattgtctgcatcttcgagttaagttttattcctcagaaccaaataaccttcgtgaggagctaacccggtatttatttgttcttcagttaaaacaagatattctcagtggaaaattagactgtccctttgatacagcagtgcaattggcagcttataatctgcaagctgaacttggtgactatgatcttgctgagcatagtcctgaacttgtctcagagttcagattcgtgcctattcagactgaagagatggaactggctatttttgagaaatggaaggaatacagaggtcaaacaccagcacaggctgaaaccaattatctgaataaagccaaatggctagaaatgtatggggttgatatgcatgtggtcaaggctagagatgggaatgactatagtttgggactaacaccaacaggagtccttgtttttgaaggagataccaaaattggcttatttttttggccgaagataaccagattggattttaagaagaataaattaaccttggtggttgtagaagatgatgatcagggcaaagaacaggaacatacatttgtctttagactggatcatccaaaagcatgcaaacatttatggaaatgtgctgtggagcatcatgctttcttccgccttcgaggccccgtccaaaagagttctcatcgatcaggatttattcgactaggatcacgatttagatatagtgggaaaacagagtatcagaccacaaaaaccaataaagcaagaagatcaacatcctttgaaagaaggcccagcaaacgatattctagacgaactctacaaatgaaagcatgtgctacaaaacctgaagaacttagtgttcacaataatgtttcgacccaaagtaatggctcccaacaggcttgggggatgagatctgctctgcctgtgagtccttccatttcctctgctcctgtgccagtggagatagagaatcttccacagagtcctggaacagaccagcatgacaggaaatgcattcctctgaatattgatttgctgaatagcccagacttattggaaacaacgattggtgatgtaattggggcatctgacactatggaaacatcccaagcactgaatgacgttaatgtagccaccaggcttccgggattaggggaacctgaagttgaatatgagacattaaaagacacctcagagaagctcaaacagcttgagatggagaacagtcctttgctgtcccctcgatccaacatcgatgttaacataaacagccaggaggaagtggtgaagttgactgagaaatgccttaataatgtcattgagagcccaggattgaatgtcatgagagttcctcctgacttcaagagtaacattttgaaggctcaagtagaagcagtgcataaggttacaaaagaagatagcttattaagtcataaaaatgccaatgttcaggatgctgccacaaacagtgctgtgttaaatgagaataatgtgcccctccccaaagagtctcttgagactctgatgcttatcacacctgccgacagtggttctgttctaaaggaagctacagatgaattggatgccttgcttgcatctctaactgagaatctaattgatcacacagttgcacctcaggtgtcttccacatccatgatcacaccccggtggattgttccgctctggtcccattttggcagaagaagctgtcctgaagcagaagtgtttactgaccactgagctctgagggcctgtagctggaatacgcatctctccagcattccgtcctgggatccgtttcagctagaatatgttggattcaggagcttgtccattatttgtaggtaaaaaaagctgcacgtagatttgacttcaactccgtaaaaaagacagctgtattttccgtccaactggaattgttgaatcacactgcatagctgcccaaaagagagtgtttggtcttgaactttctatacttttataaatgttacaaattcccgaaagaagggaatttctttttctggggtttccttcaaactcttggctccacctagcggttctatttgttcataacaacttcataacaagcctgcctctggtagtcaacagccttttgaaagctatttccatctagtatcagggtgagagcatccttgatctggctgcctgttagagaaattgcacttttcctgacttacctagaaatcaagaatttaggaaattaatgtggacactataaaggcagacttagggccaactttttttttttttacaattattacaacactaaagagaagtttagaatatagagagtttttaaatgtctcccattcttttgatttcttactgtactggctatcttaatatttcaagtttacatcaagataaaccctgagaagaactacggagaaatcaaataaaatcctgtcatatttttttcaccctgcctttccacaggaagcactcacaggcaccacacacgtatcatgtaacttatcagtggggtgggttactgttgaagagaccctggggcatttacctcaggcatctgcactcctccgagcccggtggagaatgcaggctgctgtagtctcaggtaatgaaggcacagcacagcagtactccacattgtttcctatttggacatagacttcatttcctttcagtataagctgagtaaatttagagctttcaaactgg

SEQ ID NO: 17435 - protein, 687 aa, Homo sapiens
MLSFFRRTLGRRSMRKHAEKERLREAQRAATHIPAAGDSKSIITCRVSLLDGTDVSVDLPKKAKGQELFDQIMYHLDLIESDYFGLRFMDSAQVAHWLDGTKSIKKQVKIGSPYCLHLRVKFYSSEPNNLREELTRYLFVLQLKQDILSGKLDCPFDTAVQLAAYNLQAELGDYDLAEHSPELVSEFRFVPIQTEEMELAIFEKWKEYRGQTPAQAETNYLNKAKWLEMYGVDMHVVKARDGNDYSLGLTPTGVLVFEGDTKIGLFFWPKITRLDFKKNKLTLVVVEDDDQGKEQEHTFVFRLDHPKACKHLWKCAVEHHAFFRLRGPVQKSSHRSGFIRLGSRFRYSGKTEYQTTKTNKARRSTSFERRPSKRYSRRTLQMKACATKPEELSVHNNVSTQSNGSQQAWGMRSALPVSPSISSAPVPVEIENLPQSPGTDQHDRKCIPLNIDLLNSPDLLETTIGDVIGASDTMETSQALNDVNVATRLPGLGEPEVEYETLKDTSEKLKQLEMENSPLLSPRSNIDVNINSQEEVVKLTEKCLNNVIESPGLNVMRVPPDFKSNILKAQVEAVHKVTKEDSLLSHKNANVQDAATNSAVLNENNVPLPKESLETLMLITPADSGSVLKEATDELDALLASLTENLIDHTVAPQVSSTSMITPRWIVPLWSHFGRRSCPEAEVFTDH

SEQ ID NO: 17436 - DNA, 2554 bp, Homo sapiens
tctggcccccactgcccacacccagagctttaatggacagtccgtaccaagcagagccgagaggagggaagccaggggtcccagcccgtctacctccccatcccacccaggcccccagctccccgcgggggccaccgcagggcctgtgggctgggtcacgtgggtctcgctgggacctggtccctttgttgcaggcggcttggagaaagggcagtgggacgctggccacggccagggtggtgtcgggagcaggcctcaccccgctggccgtgtctgtgtgtgtgcacgtgtgcttgtgtctgtgcgggcgcgtgcagccctggttctgcagggaaaaggtgctgggggtgcagatccctccctccttgagccagggtggcactgttcactggcgctgggacagtcagggtgaccccaccgcctacctctctacaactaaagagccctctgggcctgtgttgctgttactcctactgatctgttcctctgtttttctttttgatttttgttttttaaaccaaaacagacaatagcttattttctttccgccccctccggggctgagccagggtctgaagactgaatgtaacaggggccgctggcactcctgcgcgtcccccggctctggcgctgcaggggtgtcggcgcgccacctctccaggccccagaagcccttcttgcccaaaggcttccctggtccctgagccctgcctcggctgcctcaggggagagtgcttttcctgtagtttccaaggaatattctttgtttagaggtacttgttttttattaagagaaaaaccagtgtaacgtttatgtgactgtttgaactggaaggtctggggttccggggggtggggggaggctagactcaatgccggggccgtcggtactcttgttttcatttgtgtgtgcgtgcgtgtgtgtgtgtgtatgtgcgtatgtgtgtgtctatgtgtggtgtgtgccgtatgcatgggcagatgtttcgctttccctccttcctcgctgaacaaggtggagacttctgaccttttgctacctcttgaattcatgacaacgatatgttggtgactggcagtggaagcccttgacactcttgttttccttcgcttagcacctaggaagtcgtgtgtaggagccagcagggcgccaagtggcccagtgcctgcagctcacctgtgggttttccctttgagcctttggccacatccacctcgaggggaccctggcaccccgggcacacaaacctctgtggtataggtgaggggtgtgaggccccagcctggagccaggcactgggtgctgacaggggaaccatgaggagggtggcaggtctttgcagctcccggccagggtgaggcggaagtgagccctcatcctgccactcctatcctccattcctgcaagagttttaagcttgagagagctgaccacagggccccccggggaacagggatggcacttccctgagcagtcctggcccccggccactgtctcggggcccacctctcgcccctcatcttggtaattagccagcctcagatacttctgtgggccctgaagtgggctctcaaggtcagaccaaggttgctgatctcagtcccactgtcttcagccagctgaagctgtggggctgggctggcagcctttattgtcatcttgcttcaccatttttttttctctctcttttcattctattttaagtttagaccaaaaaaatacagagtcatcccctacccccacccctctagagaccctccagctaaaaacagagcctgagttcagggacccaagtggtgagcggcgtcttttgggggtgagggagcttgggtagatgaggctcctggctgagccctccctgtggtgatcccagcctaagatggcccctcttccctcctggtgggagacagaggactggaccctgggtctcaggttccagcaagtcaggctagggacctggggggaggagacccatggacttcacccatactcagtgagggggctcctgccgtcctgacgccaccccgccccatcagcacttaagccacatgacacaaagtctgtaccgcacgggaaatgttcacgcgcctggccgtgtgcatggcctcccgggctgtgggcagccgcatctgtgaggtgactcgtgaaagtaggtgattcctttgcagaacttcagggactgggagcagaggcccctcactcaacgacgtttgtgcgacatagtattgtatccaccttagtattgtatcgagccttttctgtgttttaatgagaaagcagaacactagtttcctatttaagactttaagggtttgtggggcggggcgggattaacacaacatttggctttgttttctttttcctttgatttccacatcaggtgtgtgcgagtgtgtgtgtgtggagatgttaagagcctcacaaggaaactgggttattggaggccaaggcggcttacagttctctgcgttcgtcacttaattcctgaatgtttcagagaaacaggaatcagaaaatagcagatatcatgtaggaaagagaggataaacaaag

SEQ ID NO: 17437 - DNA, 2784 bp, Homo sapiens
atatgttacagtttatctggtacttcatttttcttaactaaaattactttttactttaagcttgaataaaaatcttcattggtaactgtatgtaattaagtggcaacttctctttacctcagtatagttaaaaaccattcatattttaagtgattcatgtataccctgaagccgttaatacaccccagtctctatggtaacatcactaaatgtgggcatagaaactccacagctgtttacaaatttggttacagtgtgctatggtgcatttgtaacactcagatttgtgcccattcaggggcaatttggcactcagattctactctacttcacctaaccacccctagatctgagttttcagagtgcttctgaagtacagtttaaaaacactttttaaaaagtggagtaaaagtgaggcacattttacaagaacataactcctattaaaacggagtaacaactatgcaaaggtttctatagcagctaggtgagtttgttttccgggtctgtcttaactggcagcttcctgtacatactggtacttatttgctgtaaacgtctgtttcatacatttgccatgcagtgactgtgctcgaaaggtgaaatcaatggtaaagaagcctaggattttatggtatgagaaactgatcgcgggattttctgatccatagctattaattgaaaacttctgatagtgctgtaggctctatagtaggcttaagagtgagtcttatactatgaagccagccacaagatactaacaaatgtataaattgaaaagtaccaatactttttgcacatagatcaaaatagagtggagaatttgggccccaaaaatcaggttagtaggctcatttccatgtgcttaaaaatgtttttgttgttatgcattgattaagggctagagcaaatataaaattaaatgtctttttcctccaaataattggttattaatggtaaaatgttggacttggggattactgagattagtatgtgggtagtaaagaattggagtgggagttagtggggagggatgacaaagcttcagctttggtttttgtatttttttagtcttcgtaacagctacatttctgttgctcttattggccagataaatgtgttatattaaaccaggtaagtattttaaacagagaacattttatttgcatatatccctacaaattggcccattttattgggtggggggataaaaaagggattccctaactttaaataatcagaacatcctgcaattgaaaggagaaaaaaatccaattttgtcagtactttcttagtctgaaaaaaacagcagtagtaatctggtgaatgttattattaggagtgttctgcctctacagtggcatattccatgacattaatagaaaacccttctttcccacccctccccatcttgacattttcttttttaggatgttggttcctgcaaacaagaactgaccctatcacctctgcctcacagtgggtaaatatatcatacatctcttgaaagggaaaatatccatgtcagtttctttcacagtagaagaatggctgcttttgaatggggaggaaagaagacatttttcttaatatcctttttgtcccatctctaaaatgtataaatattttgatttggttttactttaatttctcattcataatttcgcaactgtccttttgggttgccctccaacacattacttccatttcagaaaccatatctgatttaatataaactgctaacttaagaagaggtgaatttgcatttacacttagacactttctaaaaacagggtgaacttaattgaaatttttcagtgttgttaagctattgttatagtagctgccctatagttacaaaaataaaaactataaaaacccatcccctatctacttgatccagatagcctggatttaacaaaaccaatagtataaaaatgtgtgtgtgtgttctgtgtgtgtgtgagagagagagtacttgattcattaaaaagtcctggaaacagctgttctaggatcttgtcatttttactgaaagtctcgcgcacatgtgaagtgccctctgagtttaaggtttggttaatactggtatatttttataagattgaaattgtgtccccatctttaacttaaacattttcattatcagggtcaatgtgctagaactgaattgtaacatttttaggcacagatggaaaaaaatgttattggctccttgaaaatgtgtgtgtgtggcgaggggaatagatccacaaaagcatgtatgtacttacaaaccaagctgtagagatcaagaaaagaacttaagtgttgatctcaagatttctaaattgtcaagatttacatggcattgtggtggaactagttaacacttagagcttttggtatgtaataactatttgctatggactgattaaatgtttcaaaagattgtgttcttcaattttggtgggttttgatttttgtttttttaactgcctctcagattatatttacttagtttaaatttctttgctttattcattaaagtataaaaacttcaggtctctgatatttattttcacttgtttactaattatttacaaaacaccctttgttgacttttattttataaatgtgtaatgtattaaacgtctttaaatttttgttcaactgaaactacattaactttgatttgctttactgggatttttttttaaagacactttttccatgtcagtgcgcagcacttaaccagtcgtttgtattccctttctttcaatccaataaacagaatgaatacct

SEQ ID NO: 17438 - DNA, 2657 bp, Homo sapiens
  CDS (124)..(1311)
ggacccactgggttgccaagctcgcgccggatgcggagcgcggtgctgccggtggagcttcaggtcttgatagactttctgtaaagaaggaatgatttggtgatggagtgttcccactgaccgatggactcaaagaagagaagctcaacagaggcagaaggatccaaggaaagaggcctggtccatatctggcaggcaggatcctttcccataacaccagagagattgccaggctggggaggaaagactgttttgcaggcagccctcggagtgaaacatggagttcttctgactgaagatggtgaggtctacagctttgggactcttctctggagaagtggaccagtggagatttgtccaagtagccccattctagaaaatgccctggttgggcaatatgttattactgtggcaacaggaagcttccatagtggagcagtgacagacaatggtgtcgcgtacatgtggggagagaattctgctggccagtgtgcagtagccaaccagcagtatgtgccggaaccaaatcctgtcagcattgctgattctgaggccagccctttgttagcagtcaggattttacagttggcgtgtggcgaggagcacactctggcattgtcaataagcagagagatttgggcatggggtaccggttgtcagttgggtctcattaccactgccttcccagtgacaaagccgcaaaaggtagaacatcttgctgggcgagtggtgcttcaagttgcctgtggtgctttccacagcttagcccttgtacaatgcctcccttcccaggatctgaagccagtcccagaacgatgcaaccagtgcagccagctcttgattactatgactgacaaagaagaccatgtgattatatcagacagtcattgttgcccattaggtgtgacactgacagaatctcaggcagaaaaccatgccagcactgctctcagcccctccactgaaacccttgacaggcaggaagaagtatttgagaacactcttgtagcaaatgatcagtctgttgctactgaactgaatgcagtaagtgctcagatcacaagcagcgatgccatgtcctctcaacaaaatgtcatgggaacaactgaaatttcctctgccagaaacataccatcataccctgacacccaagcagtcaatgaatacctacggaaactgtcagatcattcagtaagagaggactcagagcatggtgaaaagccagtgccatctcaggtacctgctcaattttataaaataaaagtgtgtctagagttgaactgtatgggcttttctttagaaactttaaaatgagtaaggcttggtagcattttttattttttgagtttgattataattttgttttatcaggcaagcctagataaaggaaagaacctggattaattcaaaatcactctttatgtttgttctggccctttatgatattgaaaggtgtcatgttgggcttgttttataagtaggagcatttcatttttttttcttgctagtactttttttctatggctaaagtactgaattttggtgggccctgaatagtttaatataactagagattcacaaagattcttcttacttgtgtttgtaacactcttcagaattctgtagagaaaagtcttttccttctttaacagggaagattgttttgtggcagatccttcaattgtaggcagatttaaaacttacaggcaattacatgtttcagtttttttcaattatagctgtggtccttactgggcttaatttgaagaggtggctaatattttatctttttgtttgtttgtttttgagatggggtcttgctctgtcacccaggctggagtgcagtaatgcgattgtggctcactgcagcctcgatctcccaggttcaagcgatcctcccatttcagccttccaagtagctgggactatacacatgccaccacacctgctgattttatttttaagtagagtagagcctgttgcccaggctcatctcaaactcctgagctcaagcaatcctcccacctcagcctcccaaagtgttgagattacaggcatgagccatcatgcccagcctattttatatatcttattaaaactattttcattttgaagatttgtggtagaatgaacaaaagttgtttatcagtagcacatggtaaagtttgagttcccgcttaaactaaattgttttaaaaggattatttctgtgttttactcttagtgtggccttttgattttgctttaccaaaactgtaagaaaacaaaacaaaagatcatactcataaaagatctgtcctgcagtgtttctttttaggtttttgaaaccacatagcctcttgattctcaattcttattgtttactctgtcagaatgtgaacatgaaggtatttttagaaatagtctttatttcacaatctattcactgaaacttgtgggtatttgaatttttaaaaaaatcaaggataagctgtttggagaaaggtattataaagtctgaacaaagcaaaagtagtagtttaacaagaatgcatgtagaaaattcttagactgtacatgcttatcacattttacttactttgttaaacattggaagtttttgttacttatgctagtaacaatgtgtgtgtttctattgaattaaatttaatttattt

SEQ ID NO: 17439 - protein, 396 aa, Homo sapiens [sequence omitted]

SEQ ID NO: 17440 - DNA, 2691 bp, Homo sapiens
  CDS (711)..(2264)
atcggctgtggggagtaccggctgcagtcggctgtgccgggagggtaggatggcgtctggccgatgcggcgatagcaccgaaagcagacggccgccaggcgctccccctaccccccgaagtttctccccagcggcgggggatgggggtaggcggttcctctgttctttctgcgttccccgcggcctcttaccacagagacgcgggcctccaccgtcctagccctcccgccctgttctctagtgcggactagagcgtctcctcgccatttcctgtcgccctggggccccgcggggaaaaagggggagtagcaggacagcggagggaagtcgcgagcttaggtggtgtgtagacgccggaagtgttgggaaggaggccggaagctaggggcggggccaggaagtgaggaggggcgggggtttatgaggagtccaagggagcattggggcagacttgcactcagagccacctgagggacttggcggtggcgcccagcactgtcccctcccctcgtagagacacggttgtcgtttgggagtagggaacactgtgttggggtgggttgtcggcaggacatctctctggctgctcttggggcgaggtgtggaggggcagggctgggggtggagccgggtcgccagggcgtcggtagggaagacccccgcccctcgcccccccaccgaacctctacactggctggctggacactaagatggctgccgttgccatgacacccaaccctgtgcagacccttcaggaggaggcggtgtgcgccatctgcctcgattacttcacggaccccgtgtccatcggctgcgggcacaacttctgccgagtttgtgtaacccagttgtggggtggggaggatgaggaggacagagatgagttagatcgggaggaggaggaggaggacggagaggaggaggaagtggaggctgtgggggctggcgcggggtgggacacccccatgcgggatgaagactacgagggtgacatggaggaggaggtcgaggaggaagaagagggtgtgttctggaccagtggcatgagcaggtccagctgggacaacatggactatgtgtgggaggaggaggacgaggaggaagacctggactactacttgggggacatggaggaggaggacctgaggggggaggatgaggaggacgaggaggaagtgctggaggaggttgaggaagaggatctagaccccgtcaccccactgcccccgcctccagcccctcggaggtgcttcacatgccctcagtgccgaaagagctttcctcggcggagcttccgccccaacctgcagctggccaatatggtccaggtgattcggcagatgcacccaacccctggtcgagggagccgcgtgaccgatcagggcatctgtcccaaacaccaagaagccctgaagctcttctgcgaggtagacgaagaggccatctgtgtggtgtgccgagaatccaggagccacaaacagcacagcgtggtgccattggaggaggtggtgcaggagtacaaggccaaactgcaggggcacgtggaaccactgaggaagcacctggaggcagtgcagaagatgaaagccaaggaggagaggcgagtgacagaactgaagagccagatgaagtcagagctggcagcggtggcctcggagtttgggcgactgacacggtttctggctgaagagcaggcagggctggaacggcgtctcagagagatgcatgaagcccagctggggcgtgcgggagccgcggctagtcgccttgcagaacaggccgcccagctcagccgcctgctggcagaggcccaggagcggagccagcaggggggtctccggctgctccaggacatcaaggagactttcaataggtgtgaagaggtacagctgcagcccccagaggtctggtcccctgacccgtgccaaccccatagccatgacttcctgacagatgccatcgtgaggaaaatgagccggatgttctgtcaggctgcgagagtggacctgacgctggaccctgacacggctcacccggccctgatgctgtcccctgaccgccggggggtccgcctggcagagcggcggcaggaggttgctgaccatcccaagcgcttctcggccgactgctgcgtactgggggcccagggcttccgctccggccggcactactgggaggagcctaaagaaccctcctggcctccagctcagccttctctcacctactatgtctgtccaacagaccggccagaatttagcttcacttgagagagatctggaatggtcgccatgattgaaaccacgcaccattacatcatcattacattaattacatcaacataaattatttcttcccccttcccttttccagcactcaaccaaggagcaaagctcatcccaccccacacccctcccaggtctgctcactgccaggctcctctcccctttgttcagtggagctggcttttctcccagcccctttccatgcctttcactccatttggcaagctctgagggggagcctggggacgggtttgggtccccaggaggagagccttgggtataatctatttttctaggagcctcttgccttgtcacttgcagctttcgccctctgctttgatggctgaggtgaactcatgttctttgggaagagggaaggcgtgctgtggaaataaaatgtttatttgct

SEQ ID NO: 17441 - protein, 518 aa, Homo sapiens
MAAVAMTPNPVQTLQEEAVCAICLDYFTDPVSIGCGHNFCRVCVTQLWGGEDEEDRDELDREEEEEDGEEEEVEAVGAGAGWDTPMRDEDYEGDMEEEVEEEEEGVFWTSGMSRSSWDNMDYVWEEEDEEEDLDYYLGDMEEEDLRGEDEEDEEEVLEEVEEEDLDPVTPLPPPPAPRRCFTCPQCRKSFPRRSFRPNLQLANMVQVIRQMHPTPGRGSRVTDQGICPKHQEALKLFCEVDEEAICVVCRESRSHKQHSVVPLEEVVQEYKAKLQGHVEPLRKHLEAVQKMKAKEERRVTELKSQMKSELAAVASEFGRLTRFLAEEQAGLERRLREMHEAQLGRAGAAASRLAEQAAQLSRLLAEAQERSQQGGLRLLQDIKETFNRCEEVQLQPPEVWSPDPCQPHSHDFLTDAIVRKMSRMFCQAARVDLTLDPDTAHPALMLSPDRRGVRLAERRQEVADHPKRFSADCCVLGAQGFRSGRHYWEEPKEPSWPPAQPSLTYYVCPTDRPEFSFT

SEQ ID NO: 17442 - DNA, 2931 bp, Homo sapiens
aagagaccctccccaatcccggcctgccaccacctggctcgcgcgcagccccggcccagaatgccttaacctgcgccgattgctgccgccgaggtgcccctcccctgtagggaccccgacgccgccagccccttcctcctttcccgcaggttagcctggcaaggaagataaagacatttgcaaccaagatggtaatcactagtgaaaatgatgaagacagaggaggtcaagaaaaagaaagtaaagaggagagtgtcttggcaatgctggggattatcgggaccattctgaacctgattgtgatcatatttgtctacatatacaccaccctgtgaatggcccagagcgtcctcagaggcctcagaatggccaaagacggaagtcctgcgtgtcggcgcatcactgaccagaccctgcgagaacaagcaggcttgacccgcacataccacccaatcaaatgcaccttcaaactttacaaaaggtcacacaaatagaccgatcctgctgcagggagcagacactaaagcacaatgattccaacaaaactcattcacagcactaggaactcaacgtctttggcagggggcccagaagaatgcttggaagaccagcctctgacaccatcagtgagcggatgggtgcagaaattcattattccagatcgctgacagatatcacatatttgaaaagatgaatagggcggacatggctcagatgtgtgtctcccaggacaagtgtttcatcttcacttgacgagctatttagtggaaaaaccacaggcgcagccctttgacaggcatcccattcatcaaaagtgtctaactatttgatactggggagataacttatttttcttttttcattggcttgacatgtgtatctgttcatgtcaaggtttataaatatatatttttaataaatgtgctctattttttagcatgaaccaaatacttggagaggcactcccagatccatagagctttccttagttttatctgctttgtcccctcctcccccaactacagatgttctgttgtggagccattctagtccttttgtctcatcttgagtcttttaccttgcgcttttgttctctctctctcctctctctctgcctctttggtctgaaggacattttcccatactgtcagccatggttttgggtgcatgttttaagattgtccattgagtggctttttgttgttatctcggagatataaaatgattgtgggcatgcagaccttagatgcaccctatctttactgagaattatgcatgaataagggctgagtgatagatcagcttaaaattaaaaggactacctttgaggaagaagagcgtggctatatttgcagatgaacttttgaacagaatattcagcttcttaccggcagcgttattgtttcattcttgtgaccattcgtttatcagattttgattttagcggtcatgtaccgcgagagttgggaagaacaagggggaaagctcgggattaggtgcattactccttcctttgcaagatacctgggatcctcctcaaaagcgggtggggtataaatgacacaagaactcccccaggagatctcatggtgattcaggctgtgaggacagccctgtgacaggtgacttttcagggacatgaggaggggatttaatgattgccctaaaggacttctgtatttttaaagcccctggtttacacccacatgaagctatttcctctctggcagggatggttgcataaaaacaaattagctcccttctggctccctgaaatgggcccttgcctggctacagtggcatggccttaaagagagggttagtattccttctgccattgccagctgtattagtctgttttcacactgctgaaaaagacatccccaagactgggcaatttacaaagaaagaggtttattggacttacagttccacgtggctgaggaggcctcacaattacggtggaaggtgaaaggcacgtctcacatggtggcagacaagagaagtgaacatgtgcaaggagactcccatttttaaaacagatctcgtgagactttttcactatcatgcaaacagcatgggaaacctgcccccgtgattcagttacctcccaccgggtccctcccacaacacatgggtattcaagatgagatttgggtggggttacagccaaactctatcaccagccttgcccctgggcagaagcagcagcagtctgcctggctggattcaaatgattctgaggcttctatagtctatgcctgcagatctctccctcacccatgctatagtgtctgaaattccaccattagagagtcatttcttgggctctgttaaatggaccaggctcttttataaagaaaatgcccctgagcagctggctctggcattgatttatgatatcttctcttccctgccagaaggaaggaagctaaggtgcatgtagggcgtactgtgtgcccaggcactgtgccagatgctttggatacttggagtcattgaattcttgtagtaaccctgtgagagagggagtcttttctccacattgtagaagaaggaaaaagggctcagagaggtcaagaaatgtccctgagatcacatggcttctagtggagtcaagatccaaacccaatgtgtctgattccttagcccttgggggtccggaggctgctgaacaagaaaggaggtggagaggagagaaagctgcaggcataccaccgcacacccttctccctcccctgtaaaaacaaccctgggaactccctggacactagcagaatatcatacactaaggataagggatgagaggaggctggttagaaataaagcagtgtcagggggaaggagctactcagtaggctctgtgtgattctagaaagactgtatgaaaattctgaacagtgaacagaataaacaataaaggtgcaatgg

SEQ ID NO: 17443 - DNA, 2427 bp, Homo sapiens
  CDS (65)..(622)
tggaggagagaagatggcggaagcggagtgagtgactagatgatttaaggaccatagtacagctatggatactgaaccaaacccgggaacatcttctgtgtcaacaacaaccagcagtaccaccaccaccaccatcaccacttcctcctctcgaatgcagcagccacagatctctgtctacagtggttcagaccgacatgctgtacaggcattgcatcggccccccagctcagctgctcagtaccttcagcaaatgtatgcagcccaacaacagcacttgatgctgcatactgcagctcttcagcagcagcatttaagcagctcccagcttcagagccttgctgctgttcaggcaagtttgtccagcggaagaccatctacatctcccacaggaagtgtcacacagcagtcaagtatgtcccaaacgtctatcaacctctccacttctcctacacctgcacagttaataagccgttcccaggcttccagttctaccagcggcagtattacccaacagactatgttactagggagtacttcccctaccctaacggcaagccaagctcaaatgtatctccgagctcaaatggtaagatatgagctaccaaattttttcagtgtttaaggacttgagagatcaaaatgtttcttgatttgatacaataagaggtatttttaatatttaagaaatgtttaattgtgtgtgtgtgcatgcgggcgtgccttcagctcttgtacatttatgtcatgaaagattctacttttaattaataggtcttcttggtatcaaatagtaattattacattgagaagctaatagagattcagtaacgtaagagtgattattttttaatatcaaattcattgaaaacctttttttcatattttaatatctgtgaaatttggatgcattttataactgatggcatcttggtacttacagtggtccataaaatcattgcctgtttttgtcaacttagatttggtgaaatagagatgttaaaaaaactttgttgttaaagttataatttgtatcctaggattttctgaattctatattggagttccggatagtctcccagatgattcttaactttggtttttcccatctcaaattctgcaaggttatttgtgttcttgtgttcattttgatattttatgaatataggaatgttaatttggttattctgtatttgagtatctacagattttctaatttaattgttgagcttctttaaggaatatagaaattggttgacatgtattttatttgatgtctttacaagaagctagacaaaagcattgtccctaatatatatttatattcttttttgtccagtggactgaatatatatctggatctccagtttttgttgttgttgttgttgttgttgttattgttttttgaggtgaagtctcactctgtcacccaggctagagtgcagtggcacgatctctgctcactgcaacctctgcctcccgggttcaagtgattctcccacctcagcctcccaagtagctgggattacaggtgcccgccaccacacccagctaatttttgtatttttagtagagacggggtttcaccatcttggcctggctggtctcaaactcctgaccttgtgatccacctgcctcacctcccagaatgctgggattacagacatgaaccaccacacctggcttggatcttcagttttctatctaaaattgcaaagtttccaatcattttactcatactatgctttaaaattaggttgaaccatttgagatggttgctatttggctatttttgaactctaaaattagcagtttcatacgggtcaaactaaattgaatatctcctttttaggtttagtcctttcagggtgttggtactggaaattaccttttcaggaaagttataccatttgtcccttggtgtctgtggtggattgttgccaggccctaccctctctgtcccctagaatacccaaatctgaggatgctcaaggcatagtatttgcatataacctatgtatatcctcccatatactttacatcgtctttacatatatttagtataatataaacatcatttaaataactgttatactatattgtttagggaataataacaagagaaaaatttgtacatgttcaatgcagatgcagctattttttttaaatgaatattgttttgatctatagttgaatgacgaagcacagagccttccataggtatggagggctcatcattgtactttgttgttgaatttacttagatttagtgtaccaaagaactgaagtttaaaaggtcacttaattggtcgtttaattttctaatttttttggatccgcatttggttgaacattttaatttagatagcaagaggaactgaataacccttgatacaattttgaaataaagtatttacacattctttg

SEQ ID NO: 17444 - protein, 186 aa, Homo sapiens
MDTEPNPGTSSVSTTTSSTTTTTITTSSSRMQQPQISVYSGSDRHAVQALHRPPSSAAQYLQQMYAAQQQHLMLHTAALQQQHLSSSQLQSLAAVQASLSSGRPSTSPTGSVTQQSSMSQTSINLSTSPTPAQLISRSQASSSTSGSITQQTMLLGSTSPTLTASQAQMYLRAQMVRYELPNFFSV

SEQ ID NO: 17445 - DNA, 2480 bp, Homo sapiens
  CDS (117)..(1319)
aggcgctggtggggcagaaacgcggcgccctgcgtcttctggttccgaggctggtcctcaccgtttccgctccggcggaagtgaggaggagggtccttcgacccgtgctgagctggatggaccgcgagacgcgcgccctcgccgacagccacttccgaggcctgggggtcgatgtccccggcgtcggccaggctccgggccgggtagccttcgtctcggagccgggcgccttctcctacgccgactttgtgcggggcttcttgctgcccaacctgccctgcgtgttttccagcgccttcacgcagggctggggcagccggcggcgctgggtgacgcccgcggggaggcccgacttcgaccacctgctacggacctacggagacgtggttgtaccagttgcaaactgtggggtccaggaatacaactcgaaccccaaagagcacatgactctcagagactacatcacctactggaaagagtacatacaggcgggctactcctctcccaggggctgtctctacctcaaagactggcacttgtgcagggactttccggtggaggacgttttcaccctgcctgtgtacttctcgtccgactggctgaatgagttctgggatgcactggatgtggatgactaccgctttgtctacgcggggcctgcgggcagctggtccccgttccatgctgacatcttccgctccttcagccggtctgtcaatgtctgtgggaggaagaagtggctcctcttccccccagggcaggaagaggccctgcgggaccgccacggcaacctgccctacgacgtgacctccccagcactctgcgacacacacctgcacccacggaaccagcttgctggcccacccttggagatcacgcaggaagcgggcgagatggtgtttgtgcccagtggctggcaccaccaggtgcacaacctggatgacaccatctccatcaaccacaactgggtcaatggcttcaacctggccaacatgtggcgcttcttgcagcaggagctatgcgccgtgcaggaggaggtcatcatgaggtcctgctcaggcatcaactttgaagagttttaccacttcctcaaggtcatcgctgagaagaggctcctggtcctgagggaggcagccgctgaggacggtgctgggttgggtttcgaacaggcagcctttgatgttgggcgcatcacagaggtgctggcctccttggttgcgcaccccgatttccagagagtggacaccagcgcgttctcaccacggcccaaagagctgctgcagcagctgagagaggctgttgatgctgctgcggccccatagcacctgtcgtgaggatagaaggacgggtggacgagaggcagcctcctgctccggggcccttccagaaataaagaccgccctccctgtgacctggggcccacccctgtcgaggcttgtggcctggctgttcatggccactgcctgggtgcctgttttcaggtgaggcccaatgaggtcagggacccaagatgggatgtggcccttctgacctgcagcaggcctgctgggagctcggagatggtgccaggacctggctcttttgggggccctgcctccttaggccaggacgcctgagctgacaggagtctgtgtctggtgtgccttctctggtggctcctcttaataggccagccctgtcccctcgtctcaggccattggaccacccctggctctgccctgtgggttcagggaggggttggagcagtgctgggcaagctcaccagggcctccaggcagggctggggttggcctccatcacctccaggtgatgggctgtggaaccagcggcctgcgccttcctctgggtacccagagtggagggctgggttgggctggcctttgccacctccctgcctttgcagggcctgtggacagctggagaggccacagatggggtggaatcccatctgctgctgaatcctcacctgggcctgagggactgtgcctgctgtgcactcacagctgggtcttcccaaggatgctgttctcaggagtggtgggtccccagcccctcttcacactgggtatgatggaggtgtgggcgggctcgtccaggccgatcaaggcacagcagtgagcagcggaggcctgtggtggggaatggactctcgtgggatcctcttgcagaggatgccccaggcctgaaccctctagtggatccacagtttgtggagactggcactctcccagccctgtccttgaccgagagtccagcattttttcagttggcccctggttggctgcctcaccccagcaggggaggaggcatccgaatccacagggatggcacgtgccatggctatgcacattgcctgcccgtggcatcaactggggccgctggcacttgtctaggatggaagcccccaagaagggcaggggtttctgtctgctctgttcagtgaatcatgtgaagtgcttgcaaaggcagctttacacagt

SEQ ID NO: 17446 - protein, 401 aa, Homo sapiens [sequence omitted]

SEQ ID NO: 17447 - DNA, 2647 bp, Homo sapiens
  CDS (636)..(2309)
gctgctgatttagttgggagtcttggtaagttgtgggggtacagaatgctaagctgcctttcccactctccactgcttgtcctgctctcacgcttgaacctagtctaatctgaacgagggacattctagggcaatcactgaagaggaagatggtgggcaataggaaggaggaggaggagtagccctgaaacaaagcagtgggggagaggggataggaggagggaaacactagacaaaatctggaaaggcaagaataagggcaagggaccaaggtctgtcaccaggagatcagtttccacattctcctgtttgtttatttgtccataggtctgcctgtagatctgctgtagggcttgtcaccattggaagcaaggtcctacttcagtggcagatctggtggccttggagtggctgaagaccaccaccctccacagggctgggcccatgcacagccatccttccctaccttgagtgagcttcctctgcatgttttctatatcactggcagagcctgtagttggaaaggggacagagtgactactggactttgtgtgaaaacaccaaccgggacaaaacttcagtcaaggctgagacgggtgggggtatataacttgtccttacgttaaacttggaacatggttgactctgggacagaagcaagggctagaggaaaggctgaggctggcctgcaagatggaatcagtggtcctgccactgctagagtgaatggtaaaacccaggccgaggcagtggctgaggcagaactgaaaacagaatcagtgacccaggccaaagctggtgatggagcaatgaccaggacacatacagtgacctacagggaggctatggctgtgacaagggaagtgatcaaggtggaagatacaactaagactagagtcatggttgagactaagacaaaacccctggcagaacgcagtatagtgccacaaaccaagtcaaaggccatgcctatgtctagggtcagtactgtaaccaagtctgaagtcaaggttgttgctgtcattgaggcaaatattaggtcctatgccaagtcacatgataaggccaatactgggtccagacctgacagaagggaagagaccagcattgggatgaaatccagtgatgaggatgaagaaaatatatgctcctggttctggactggagaagagcctagtgtagggtcctggttctggcctgaagaagagacctctcttcaagtttataagcccctacctaagatccaggaaaagcccaagcccacacacaaacccacacttactataaaacaaaaggtaatagcatggtcaagggccaggtatattgtcctagttccagttgaaggaggggagcaatccttgcctccagaaggaaactggaccctggttgagaccttgattgaaactcctctggggattcgacctttgaccaagatcccaccttatcatgggccttattaccagaccttagctgagatcaaaaaacagattaggcaaagggaaaagtatgggcctaatccgaaggcctgccactgcaaatcacgtggctttagtttagagcctaaagagtttgataaacttgttgccctccttaagttaactaaggatcctttcattcatgaaatagctacaatgataatgggcgtcagtcctgcttatccatttactcaagatataattcatgatgtaggtattactgttatgattgaaaacttggtcaataatcccaatgttaaagaacaccctggagctttaagtatggtggatgacagctctgagtcttccgaagaaccaaaatcaggggagtcatatatacatcaagtttgtaaaggcataatctcttgccccttgaactcccctgtgcagctggctggactgaaattactagggcacttgagtataaaatttgaagatcactatgtgattaccagttatattccagatttcctcaccttgttaaacaagggaagtgtcaaaaccaagttttatgttttaaaagtgttttcgtgtttgtctaaaaatcacgccaatacaagagaattgatcagtgccaaagtactgtcatcattggttgcaccctttaacaagaatgagtcaaaggccaatattcttaatattattgaaatatttgagaatataaattttcagttcaaaacaaaggcaaagctatttaccaaggaaaagttcactaaatctgagcttatttcaatattccaggaagcaaaacagtttggtcagaaactccaagacttagcagagcacagtgatcccgaagtgagagataaagtcatacgattaatactaaaactctgaatacccctctgttctcataaagcctcaaacagttttttggagttgcaatatgaaaccaatgcatattgtaattataaattcaatacttatgttttccatgttgattgagggaggcaattttatggataccaattaatcttgagatcctgaacatgtgctgatttttattgtgctatatagtatataaattgagatatttttagtatttctgcaacgtgacctgataatgaatctattcatcctgagtaagctatacttctgtgctttatattgatatgtgtattcttttgagattttatttacatgttgttaataaagttgcatgctaaaactgg

SEQ ID NO: 17448 - protein, 558 aa, Homo sapiens
MVDSGTEARARGKAEAGLQDGISGPATARVNGKTQAEAVAEAELKTESVTQAKAGDGAMTRTHTVTYREAMAVTREVIKVEDTTKTRVMVETKTKPLAERSIVPQTKSKAMPMSRVSTVTKSEVKVVAVIEANIRSYAKSHDKANTGSRPDRREETSIGMKSSDEDEENICSWFWTGEEPSVGSWFWPEEETSLQVYKPLPKIQEKPKPTHKPTLTIKQKVIAWSRARYIVLVPVEGGEQSLPPEGNWTLVETLIETPLGIRPLTKIPPYHGPYYQTLAEIKKQIRQREKYGPNPKACHCKSRGFSLEPKEFDKLVALLKLTKDPFIHEIATMIMGVSPAYPFTQDIIHDVGITVMIENLVNNPNVKEHPGALSMVDDSSESSEEPKSGESYIHQVCKGIISCPLNSPVQLAGLKLLGHLSIKFEDHYVITSYIPDFLTLLNKGSVKTKFYVLKVFSCLSKNHANTRELISAKVLSSLVAPFNKNESKANILNIIEIFENINFQFKTKAKLFTKEKFTKSELISIFQEAKQFGQKLQDLAEHSDPEVRDKVIRLILKL

SEQ ID NO: 17449 - DNA, 2336 bp, Homo sapiens
aaaaaaacctatctaaggaggagccaagatggccgcataggaacagctccagtccacagctcccagcgtgagcgacgcagaagacgggtgatttctgcatttccatctgaggtaccgggttcttctcactagggagttccagacagtgggcgcagcaggcttttcttcttggagctgaaacaggcgcactggcgagggttgtgaggaaaggtttgcagccccctgccttggtctgctatagccagtgacacgatcaataccagggtgagcagcagaggaagctcagggaagattatgaagatgagaattcattacctatcaaagaaaatgcgtaaactctagaagtattgcttgctcctttgccacaaagtgtacattcaagagtaaattgtttaaagccaaagggccttgcgccacgtccttagcctcagctttctacttgctaaaatggaaataacaacagtacctaccttacagacctggcgtgaggattaaattataccagcaaagtgcctggcacctagaatttgcctgagttctgatcaatgctaaaaacaccatttaacagtgccctttcctgcctgggaagcccacaaagatttcgcttttcacttattactcatcaaactgactctggttcacagtggaaaagagaagaaaagctgatggagaaatggcagtgaagaaggagaacaaaatgtcagagcaatacttttgagcgacttatcctctgttctgcaatatttgcaaaagtcagtctatagacgtgaagccaacagggaccctcaggcctgtgcatcaggatggtgggctgcctaagtcctctggggacagcagtgccagaaggagtattggacacagtgacccgactgtatgagatgagaaaaaacaaaaacaggaggtccgcagtactgatgaactaatctgtcactcacaagctcaggtctgcaaaaaaaagaaacgaagcactaaacatggccataagagatggaaatgcaagtcttcatttctaaatgataatcaaaccaacgatcagaaactgattaactgtgtaattgaattgaattgaaaatcatcccatgaataacaatccatcctaccttcaaggggttaggaagctaactacaggtaattgctatcagaaatctgatttgatttccaaaaattgtgtgaatgaaccaagtttcttcatcttgatatactaggcagggagtttgttcttccaagtactagactgcttaattgcttgcttgggggaggagaaatcctaggggaaaggcatatatgagcaatttctactctgtgaagccagcgctgtgtcctgagctggatcatggccagaaacagaaaagtctactcttccctacagtggaagcaactgtggatatttcatcctaggagtgaatgaaaaaacctaaagctcatacttcatgggaatctttcaatattctgactgaaaactggttatttgctcctccaacccaaagccatctaggaacagcactcagaacaggaaaaaaaaaagacaaaaataataattattccaaaacgtatttgagcagaaacaaacacaaacatttgcattattaaatgggcttgttcacacctgctgagtagatataagacgatatttaagacaagagctaaaaaataaaccatccctttctggttttgagtgacagcagagcaataaaaattattttcacattcttttccctattgttagaagtaatcatttgagtaaatacacttatctgtgctgtaactattgaaatgaatccacttcaaatatgtataccacctttcttttttatatttctagatatggtttcaatatagactttctgacttttatggtatacatataggacaatattctattcttctttccttttaaatacttactgtttcaatttcaaataaaaaatcagcattctagtttgtacattttagcacagaaatgtttacaaccttcagcacaattgcttttgtaatttactgacttggcattttgaggcgtttttaacaaattatgagaaataacaccttcagaaagcatgtgactactttgatgcaactatttacaatgtattcataagaagtcattaacctgtagagttcttagacatgtggaacctttaacaattatactaaagagtacatacaaaatacagagctatgtaataataactaattttaaatcctgacaaattagaagttaagcctactatctgtaaaaatatgtcctgattcatttttttaagtatatacctgagcctttaaaaagtatatgcctttacaattgatttccaataaacaatactgaataacatact

SEQ ID NO: 17450 - DNA, 2470 bp, Homo sapiens
  CDS (254)..(1159)
tcttcaaggaaagtcagattggtccaaactacttgagccaccgaatttctttcaaaagtatagacattatatagtattgactgccagcgcatcaacagaagaaaaccatctagagtgggttggattagtagaatctaaaatccgtgtacttgttggaaacttggaacggaatgaatttattactcttgcccatgtgaatccccagtcattcccagggaataaggaacatcataaagacaacaattacgtatcaatgtggttccttgggataatttttcggagagtagaaaatgcagaaagtgtcaacatagacttgacatatgatatacagtcatttactgatacagtgtacagacaggcaaacaatataaatatgctaaaggagggaatgaaaattgaagcaactcatgtaaagaaaaaacaacttcaccactaccttcctgcagaaattcttcaaaagaagaaaaagcaaagtctctctgatgtcaatcgaagctcgggcggacttcaatccaaaagattgtctctggatagcagttgtctggatagctccagagacactgataatggaacaccttttaattctccagcgtccaagtctgatagcccttctgtaggagaaacagaaaggaatagtgctgagcctgctgctgtaattgtggagaagccactgagtgtaccaccagcccaaggactttccattccagtgattggcgcaaaagttgactctacagtaaaaactgtatcaccccccactgtgtgtaccattcctaccgtagtaggacgaaatgtcattcctagaatcacaacacctcacaaccctgcccagggacaaccgcatctgaatggaatgtcaaatataactaagactgttacacctaagagatcccattccccatccatagatgggactcctaagaggttgaaagacgtagaaaagtttattcgacttgaatcaacatttaaggacccccgcactgctgaagaaagaaaaagaaaatcagtggatgccattggaggagaatctatgcctattccaactattgatacatcacgcaaaaagagactacccagtaaagaactaccagattcatcatctccagttccagcaaacaacatccgtgtcatcaaaaattccattcgactgacccttaatcggtaaaagcagtgcctcctcacttaagtgaacaagcaatcatttagtggcatagatgcagccacttgttttttaaatagaagtggctgtcatacgtgaaataaggtgaaagtgacagccttcagtctaataaccttgaagtggtttttgaactgtcaaactttgacctgtagatgctgtagcattctctcactgattgctacatacacttctctgaggatcacctgctgtcaaattgccatctacagtattacagctttgcatttgggggttttactgccttaactttcaatgcttgttatgggaaccagttcttagccacttggacactgataacaagtcctgaactccttttttgttttgttttttgtgtttttctttttttgtcttatgttgtaatcattgtatagagctaaaaaaattgaaaacaaacaaaaaaattgtcttgtattttccaaatgttaatacatttactttagcattgaagccactttgaaacctgagataaatgaatgtgaggtatcttttctgctttcctcatttgtgtagatgtactgtctgttctgttgatttaaattatttttttccagattggcacatgaaatatttaaacttttttgtgtgcctttctgtccaaatgttgcatagttaccagggaagattagtccagtgattacataagagttgggcaccataaattctctatattttgcctcccatggaggcctttgaaatgcatctttattaaaaatcaaaatataaccaggatactgaaagtcagtatatgaatggtaaaattgttacatatcctatttcatgccattcttgttagttgactggtattttttactgaggagcaactcattccagcatcaacaataagataacctttaagtatggcacacttgtatttttgaggtgtaaaattaacttggcatgataattcctgatcattatttaccccacaacttcaaatagtttcttcacggactaggcatgcagaaataagcagtggattttattgaaacctaaaggcattttgaatgacattgttaccaaccattaattggctcaggacctttgtaatttttatttaactatatgagttgtctttttttacgctgcttttttcaatgcatttcttaatattttttaagtttcatgaatgcatgctcagtttattaaaatccataaccatgtaattcttgtaatatgttgattcagtgttttgtaaatgaagtcgtatgtattttcagagtatttttgtatgtactgtaagataccatcttttcaaagagaaacgtttaaaacctt

SEQ ID NO: 17451 - protein, 302 aa, Homo sapiens
MWFLGIIFRRVENAESVNIDLTYDIQSFTDTVYRQANNINMLKEGMKIEATHVKKKQLHHYLPAEILQKKKKQSLSDVNRSSGGLQSKRLSLDSSCLDSSRDTDNGTPFNSPASKSDSPSVGETERNSAEPAAVIVEKPLSVPPAQGLSIPVIGAKVDSTVKTVSPPTVCTIPTVVGRNVIPRITTPHNPAQGQPHLNGMSNITKTVTPKRSHSPSIDGTPKRLKDVEKFIRLESTFKDPRTAEERKRKSVDAIGGESMPIPTIDTSRKKRLPSKELPDSSSPVPANNIRVIKNSIRLTLNR

SEQ ID NO: 17452 - DNA, 2323 bp, Homo sapiens
  CDS (666)..(995)
agtccatagctgcctttgaggtggtgtagaccttgctaaccaggacggcccagtaggcagagctcatttttattcctgtctgcaatcgtgcaaaaacgcctcttatggaaaagccagagcgccaggagtcagcaaaacacactaaagattgggcagtcactggggagaacactcagcccgccagcacccaggtgaaatatacagccttgttgctcacacaaagcctgtttggtggtttcttcacacggatgcatgtgacatttggtgctgaagacccaggacaggaggactcctttgggagaccagtgccctgttgtcgccctcactccgtgaggagatccacctatgatctcaggtcctcagaccaaccagcccaaggaacatcttgccaatttcaaatcgggtaagtggtcttttcactcttctccagcctttcttgctacccttcaatcttcctctctcactacccttcaatctccctgtccttccaattcccgttctttttcctctctagtagagataaggagacacattttatctgtggacccaaaactccagcgtcagtcacggactcgggaagacagtcttcccttggtgtttaatcactgtggggacgcctgcctgattattcacccacactccattggtgtctgatcaccacggggatgcctgccttggtcattcacccacattcccttggtgacaagtcaattgcggggacacctgctttggctgctcacccacattgcagcccagggctgctcaatgccccccgctgccccacccgccttctccgtgcctctaccctctcttttctcgggtttacctccttcactatgggcaaccttccaccctccattcctccttcttctcccttagcctgtgttctcaaaaacttaaaacctcttcaactcacacctgacctaaaacctaagtgtcttattttcttctgcaacaccgcttggccccaatacaaactcgacaatgattccaaatagccagaaaacggcactttcgagttctccatcctacaagttctagataattcttgtcataaaatgggcaaatggtctgaggtgcctgacgtccaggcattcttttacacattggtccctccctagtctctgctcccaatgtgactcatcccaaatctttcttctttctctcctttctgttccttcggtctccaccccaagttccgagtcctctgaatccttcttttctatggactcatctgacctccccccttctccccaggctgctcctcgccaggctgagccaggtcccaattctcacttagcctctgctcccccaccctataatccttttatcacctcccctcctcacacctggtccagcttacagtttcgttcctcgactagctctccccgatctgcccaacaatttcctgttaaagagatggctgactatcctgacttcatcagagcaggctggtgcctggccttcctggaatgagtgggtgttctgacaggcccccagtttgtcccatctgcaccgccaagaggtctccgggtggccagaggagcaaagttgccttccaagtgcctgttggtgcctgggagaacacagcaggagtgtcgtgcggcccacagcgcagtgcatggtgattccaggcgctgaacaactccccttgacccttgggcctgcatctgactcccggctgcagaatcagaagctgagtccaggcaaccgctcggccactcccggtcactcctctctggacacccagttactaaagtcagcaaagaagatgcggtaatcaccgcctgatctccacatggtgaacacaacactctcactaacacctccttgaccagtcagtcttcagcactgggggtggacaggcaggttttctgtgtttaccagaatcgcacaggctaagcacaaacatggaaccagagttccaggtgaggaaacctcactcgcagaagcccaggctgcaccccaccaggtgatgcagtgcgcctaggctgtgggtgctaggagccaagtgctagggactcgtcatgagtgggaatccccacgttcctgtcactgctgtcaaacagaaggtaaacagtcttacgaatgtaattccttaggaagacttgtacaaacttttattaggatatctatttatttaatactgaactttggcctactttgtgataagactataaacaaattgaggaaatcactatttctcacttctgtatttctcaaaaaataattttgttacagagttcaatatactgtgtactactgatcttctattgtgaaagcaaagcatttcatcaaaacaaagtattttaaattatgagtg

SEQ ID NO: 17453 - protein, 110 aa, Homo sapiens
MPALVIHPHSLGDKSIAGTPALAAHPHCSPGLLNAPRCPTRLLRASTLSFLGFTSFTMGNLPPSIPPSSPLACVLKNLKPLQLTPDLKPKCLIFFCNTAWPQYKLDNDSK

SEQ ID NO: 17454 - DNA, 1462 bp, Homo sapiens
  CDS (41)..(775)
acaacttggcaagcctgtccgagctctaaatatcaacaggatgaataatgtcacgactttacatctttggcaatcggctggaaggggtctgtgtacatcagcaactttcaaacccattttatttggagaaaatgtactctctggatgcctgttagaagtcgggattaatgaaaattgtactcagctcagggagaatgctgttgaaagacttgattcattaatacaagcgactcacgttgcaatgagaggcaactccgattacgctgatcttagtgatggctggctcgaaataatacgtgtagatgcccctgatccaggtgcagacccgctggctagcagtgtgaacggcatgtgcctggatattcctgctcacctgagcatccgcatcctcatctcggatgctggcgcggtggaagggattactcagcaggagatactcggtgtagagacaaggttctcctcagtgaactggcagtaccagtgtgggcttacctgtgagcacaaggccgaccttctccctatcagtgcatccgtccagtttattaaaattcctgcacagttaccccaccccctgacaagattccagatcaattatacagagtatgactgcaacagaaatgaggtgtgttggccgcagcttctatatccatggactcagtattatcaaggggagctgcattctcagtgtgttgctaagggcttactgttgctgttgttcctcacattggccttgttcctcagcaacccctggaccagaatatgcaaagcctatagttagacaaccacctggcttttatttttttgagatggagttttgctcttgttgcccaggctgaagtgatctcggctcaccacaacctcctcctcttgggttcaagcgattctcctgcctcagcctccggagaactgggattacaggcatgcaccaccacacccggctaattttgtatttttagtagagacagggttccaccgtattggccaggctgctctcgaactcctgacctcatgatccgcccatcttggcctcccaaagtgctgagattacaggcatgagccaccgcacccggcctttttttttttttttttttttgaggcggggtctcactctgacacccaggctggagtgcagtgcacaatctcggctcactgcaatctctgcctcccaagcaatcctcccacctcagcctctggtgtagctgggaccacagatgctccaccatgcctggctgtatttttggtaaagatggggtttcgccttgttgcccagggtggtctgtaactcctgagctcagatgatctgcccacctcggcctcccaaagtgctgggatcacagacgtgagccactgcgtccggtccatctgacttctcaaagactttagaccttgacttcagtgatttgttgtagtcttgtatgcttctctataaaattttaataaatgaaatgtcttatttttgtag

SEQ ID NO: 17455 - protein, 245 aa, Homo sapiens
MNNVTTLHLWQSAGRGLCTSATFKPILFGENVLSGCLLEVGINENCTQLRENAVERLDSLIQATHVAMRGNSDYADLSDGWLEIIRVDAPDPGADPLASSVNGMCLDIPAHLSIRILISDAGAVEGITQQEILGVETRFSSVNWQYQCGLTCEHKADLLPISASVQFIKIPAQLPHPLTRFQINYTEYDCNRNEVCWPQLLYPWTQYYQGELHSQCVAKGLLLLLFLTLALFLSNPWTRICKAYS

SEQ ID NO: 17456 - DNA, 2713 bp, Homo sapiens
atcgaggtatacctacataaagtgtactgatattctgtgtatagcccagtggatttgtacatatgtatgcacttgtgtagccaccacccagatgaagatactgagcaggtccagtaccccagagctaccttcatttctatcactttcccaagctgtcatccccgccggctgtcatgggaaccctgtctgtaagatgcgacagtttgggtaaaggagtttggtcattttaaagagtgtgaaaggcagagaacagagaaatcaaaaccttgcagggccaaggtgggtggagagggtgtttttcttttaacatacatgggcggttttaaggagaaattgaagcagcctgttcagacaattgttttggtatctggccccaggtctgtggttcctaacatgacttgtgatattattttaagtgggcagatggctttttgatagcttctttatctttcgatctcagctcttgcaaaggggaggttggtgctcattgcaagatcagcgataagggtttctttgtaggtcggtggctttcttggtgagtacatttcaacatattattgttttagaacctgtgtgctgccagtgacttgcagcactgttgaagactagccaccctttgtgacctagccctcttgggaaatggcggaggatctcagggtatatcccttacctgtgggagccctatcagagggcttcctgttgaggaaatgttggctgtaggccctctgtgcactgagcacagccacatcaggtgagggcatgggagaagtccgtggtagccatcaggatagagttcagaaacccaaatggctgctttccctgggttgctggaccaggcatttggtaactctaaagcttagagatgattcatcgacaagcatttattgactgcctactgtgtgctgggcacagtgctaggttccagcagggaaagagatgcagagtggtcctaagatgtcacagggcttgtgggatggagtacagaggatttgttgtatgagacctggctgagcccctgctcttcgccaggcacttcactgagtactatattttcatgcaaggtctggtttaattccgacaacattccctgtgaagtagagggttttaaatttctctttcctggatgagcaaactgaggctcccagagtccaaagtcctagggctggtgtggggaaaagccctcctgatcttccttggcacttgacactaccctttggaagtgtcctattcttcttaaaagtaaagaccaagagagcctcaccatggtcttcaagcaccctcccatcccattccccaatctggcctccactggcttatagtcttaacaccagtggtctttctgagctcctgtcaccatggtctttctgttactccaaagggcctcgctcctttctgctgcagggcctttgcccctgctgtttccttcaccaggaacatttatcccgtaccccttgcagtctcctccagtgttgatccctcagttctaagaggacttccccaggggagcctgtccaccccagtgtcctcgggcccctggctttttcatagcactcatcagcccagcacgtgctaagctttgttagagaatgtcccatggcagagcagatgaacatcgccaccagtcgaggggtcatcggccaccctgcctagcagttctactatatttttttgatccactcgtttctcctctgaagtgactctttcaaatgttctttaccttcagactttctctcctgcttcaaaaaacaaaacagaagccataagaatggaactccctataacttgcggcccccaagtctgcacgctgatttccctcccctgtgttacagatgacgaggagtcccttcttgctcaggccacttctccctcctgtgctctgggtcccagtttctgctacttgctctagaatctgacatcatcagtcaccttttctctcctggcaggttttctgctgccctccttgcttgatcctctattcacctttgcctgtgccagcatcccttctgtctccgctgaccccacgttctctccctcctgcttctggccagcacctcatcaccctccccttcactgctgacccctgcagagttgcctgtacttgccttctgcacttgctcacccccgtaagtgttagcccccggcatctgccagattctgcaggtggttttttagttttcctcttgaagtggttgaccactcctacttaaaacactttgtcttcccttgccttgagaccacactctgctggttttcctcttaactctctggcccttctctttctcctggctcttcccttagcttcatgtatccaaactcggcatctccacttgactgatggcccaaataattcctcaaactcaccttgtcggggactgcattcatcacctctcccacagtgttcccaagcagcctctcactcccctacctccccacttgctcgttttgcttttcagcatccttaagtaagccctgcctgaccctgtagattgggccagggacccttattctagggcattctttccttttctaaaggcactgatcgcagtttgtagttatatctttattagggggttgctggatgactctctgccccgctagactgtaagctccgtgaggggtagggacatggtctgctttcattcaccactgtattcctgcaggcctgccacagtgcctggcacttagcaggtgctcaataaatgtttgttgaaat

SEQ ID NO: 17457 - DNA, 2915 bp, Homo sapiens
  CDS (1838)..(2173)
ccctgccccacaaacatgaaagaaaagacaagagaagcaccccagaagaggaggggagaggtgccccagaaaaaatcatccagtctctgaagctttgcccaggtgggcacaggccagccagcctctcctctggttgcccagctggctgcaggctgtcatttaaccttccgcccagcatgcttttgagtgtgcagaagtgctgcatgccctcttctttgaaaacctgttgagcaaatgcctccgcattttatgcaccttcaacctccacagccaaaggcccccaagaccaaacatgctgtgcacacacagcagctctttgtgtcccactcctggccgatctcctgcatcatctcgttgagcttcattgaaccccgcagtctgcatgctctgtggaactcagggtcttcattttgcacgaaactcagggtcttcattttccgtggaactcaaagtcttcttgctctgtggaacttggagtctcagggcctttgtgctccatggaacttggggtctgtgtgattcatggaactcagaatccttgtgctctgtggtactcagggtgtgcgtgctctgtggaactcggggtctgcatgctccatggaaagcaccaggatgcacttgaccccccacacccatacatacatccttcattttattcctggccctcacctgtccactctgtgaggcttcttcacccccactctcctttgagctcatgccgggtctttcagactggcctgaagcatgggtgttcgtaggggggagtggctgatgtcacaccttcaggcaaattctgctagtgtcacacctgatggagctgcctagggaggatgtttccttggaggatgcgccctggcagccactggcttcttacggtgcctgcactgctgctgctgccatgggggtgccacagggccacactgggggctgttctggagttggtggttttcatttccaggttaggtagggactggcaggcaccttggctgtccttgtggcttctgtcttgaccctggtcctccccaggcagctgattttctgggctgctgctcttccaggaagaattaaaggtgggaatggctgaaacctcagctttggattcacagagaccctaggctgtgtcatgcagaaagggaaaggattgcagatggtggtgggatcagccgaaggcagggccttcactgtgatgctggagccctccatgctgggatgtttgcatacagcccaggttcagttcggtggtccatcagcgagtcctggatctggtctcactcacaagccatggacaacatgagctcagtttgccaggactcttggggttagggagagctcagcatccgggtggctctggttccttctcatgctgaaactctgctggtgttcctccatggggcaaatgtgggtttttctgaggtgcccctcttgctggagttgaggatgagaaatgttttcagtgggtttgcaccctccacacatatgtaagaggtgttgtgtttcattcctgtcaggatccattgctgcagcttcctgaagttgtgtccgttaaaaggcagggacccggtgtccaggctacagagggtgactccaggttccacaccaccactgtggaccagtgtgcctatggacttaggagagttcccagatcgcacaagggggctgccccagagggtgttcagcttgttgccaacagttgctgaagccaaagtctgcaaccttgatgttcaggtcaagtagccagaaacaggtgttctggctttaggtccctgtggacaatgccattctctccttcccaggctactgatgtcctgggttgctcctcttatggtagaagctcaagatggaatggctggagcttggctgcctccggttagagcctgggctctgtattgcagacatcacctggcagaattcctcatgggccccttttgtcgtgggtgcgactgctgggccagggttgtcgtgggtagtaaaggtatttaccaagacaaccgtgagtaaagaaaggcaaatttattacagaaactatgaaaatacattgcgagaatgcaacatgcagcacagcagagaaggggctgtctgcaaagataaagggctggagggaagttttctaaggttgtgctggacggcgctatgtgcaggtgagcttgtgctatatgctaagaatatgttggaataattttaactgccagacctttcctcttctggtgcccgagggaaacgccctgctgcttttagctgtcttgtaacccacacgccttttcacttctgaagttgcaagaataacggctgtggtttttcacacaaaagggttgcagactgggttaggtccctgttccgccaacctggctgtttcccagtttcagttaacttagtggtttactagagccccacacctttctctttcatatggccatgatccaggaggtaatccgtcacctcccctccactagagtgctccatggccagggataatccgtcacctcccctccaccagagtgctccatggccaggggtaatcctcacctctcctccgctagagtgttccatggccaggcagtgtttcctgggtccagagcacctcaaacaatttcagtgttgtggtgactcagggccttcaccatacagacttgacagcatagtctagaggctggaggggctctgtgactcccattaatgacagtcactgccacggtttccccaggcaggatgtgccaggagaactgctccatgttggctcagcagaatgttattataggtagctcaaaaagagagggagcagggcttctctagattatttcagggaacgagctattatttgaatgttaatttaagactattttatcaattaaaaatgtaaggcccaagaaacttcagtgaggaagaatgaacaaattgaataaatactgttaaacttt

SEQ ID NO: 17458 - protein, 112 aa, Homo sapiens
MEWLELGCLRLEPGLCIADITWQNSSWAPFVVGATAGPGLSWVVKVFTKTTVSKERQIYYRNYENTLRECNMQHSREGAVCKDKGLEGSFLRLCWTALCAGELVLYAKNMLE

SEQ ID NO: 17459 - DNA, 2357 bp, Homo sapiens
atctcactcccgccacagcttgggatcggtctctgctgttttacgtcctccacctcgggagcccccggtgactgtcacagcctcttgccctgtgatctgcaggttctgggagacgcacagctaagatgccaggacatcctggaagctgggaaaagatggagtttcactcttgttgcccaggctggagtgcattatcccaatctcggcttactacaacctccgcctcccaggttctgacaacaaaggagattgtgacatattgctgggcctaacactaaggtgatgttagttatatgctttggctgtgcccttggaaggcattgagacatactgctgtgcccagcaccaagatgatgtaacgtgactcttctgcttcaggcctgccaaaagaaaagattgtgacagatcactggacccagcacctaggtaggattgtgacatatatctggccaagcgcacagatgtaatgatgactgtcataccttgaagaagccaatagcagagagaatgttgctctcaggcttaggaaaatgaggaagtctttctgtacaaaagtcataaagaattactactctctcacatatattacgccctagtgtgttacagagaatgtcataacagggcccagcacacaagtgagattgtgtttgtcctatgcacactacaccaacctttacagttgtcaccctgacccattgacagagtctgctagtgaggttctgaattacatgtgaacacagtccgcagttggaattgtgactgtcatatgtgaacatctggctacagttgggatggtgactcatttctaaatccagctcataggaaggtgaagactctcctatctggactcagttggtgagagagatgttgactctcatatctgggcttagaaccacaggaaagattctggagctccttgtgcaaaggtcatagaggattatcaatcttgcatattgtataaagtcctcaggtgacacagagtgtctctcgaatgcacacccaggcaacagtaaagattgtcattctcccacataaacacatcccactgttgaagttctgaatttcacagaggctgtcaaaagttggataattgcctctcgtgtggatctggtccacaggtgggttagtgacttccagaccaaggttcagcgcacatgtaaggctgtgactacactaagaagatacagtctgcagaagaaactgtggctcttttgcacacattctgtcaatcattgtgattgcgactcatgtacttagacccaacatacaggaggtgttgactttcatacctttagaacctggacatgtttggaatttctaatctaatccctggactttcctgcaggtgtgattgtgtgcattgcaaagcaccttagtgatttgactctcctgccttggccaagcacacaaatgagattgtgacatatggcttgactctgaacctccaagatgtgactcttttttccagccttggagctgcccacatgttgcattgtgacatattcctaagccctgcactcaggttatgtgactctccttttttgcttaggccctgaatatttttcatgttaagacatattactaggtccaacacctataaaatgggagactaccacctgggctctttctacagagggccttgtgacatacctctgcatcaataacctaggagatgtgatgctccatttttgcctgtacgtgccccacagaaaaaattgtggctggcccaggtaccaggtgatgtgtctctgctgcctgggcctggaccacagagagcattgttactgattgctgggctcagcacccaggtgatgtgactctgctgcctgtgtgctgctttcaggagaatcgcttgaaccaggtaggcggagattgcagtgagccgagattgcgccactgcactccagcctgggtgacagggagactccatctcaaagaaaaaaaaagtgaccttttgcagcacatagctgatttgactgctttgtggagtacaccaagcaggttgtcaaactggtggtccctttactgaaattttatttccacaatggtgttggaggggcagcagcagaatccgtgccttttcttctggagtgtgtgagagtccgtggtcctgagtatctcacacagatgtggcaatttatgtgatgttctgattaagaccattggtacagaaacagattcagatgtcctcagaaataatgcattgtttagcaaagtgcattgaagttatgggagatggatgccttaataatgaacactttgaagaacacctttgccacatgtcctcaggaccttctgagggctgtgtcatggggcatggtcactcatatttgactcaataaatttcttcaaatatt

SEQ ID NO: 17460 - DNA, 1029 bp, Homo sapiens
tttgtattcctagacttgctgatatttacctctctcttgtctcttcagagtaaatggttcccttctttccttcctactttccttcattctctcttccttccctccttcctacttcttttcttccttcctcttcctctcttaaaactatcttagatgtagaatcctggtgtagggttttattttatttttattttttgacccaataaaatgttatatgaaagaatgaaaatattaatttaagagactctgggagtctgaataaagtagctttatattaactacaggataatattagccttattacccccacaagattttttaaaacttgaggtaggtagctacattaaataaatttgctacttatataaaaatttttatcaacactaaacttttaaagtttacaagttttttttttcttttttacagtcttctatagagttaggttaaaaatgtggttctaaccatcaacaattgcatggttaaatgaccctgaactaaaactgatgggttccctatcaaaacaaataaaaatatacctttttcaggtttcaatctgtgcagggtatatgcatgttaattctaccatgcttaagaacttccacaaaatatttcatggagaggtctgcatttagacggaaacagaaatggcttttcccctcactgttcctgaatgctctatacttgttttaacatttttgctatctttttttattattctgatcatgatatgaccatttaacctcagaattcataattcctgaggggtgttaagaagcagtcccattggtgaggatattatgacttggtgaccattcttaggagtagaaaaccaaggacaattgcttctgtattcagtatccacttcttaatgtggctttatatgtaaaaataataatgcagtggttgtttctgtcaggaaaataaatcttacagaacaactggtggaattgaagctgctgcgctagacttggatattttgggtagtgaagaagcaatggcaatcttgagtctattattgtataatttagt

SEQ ID NO: 17461 - DNA, 2546 bp, Homo sapiens
  CDS (156)..(2312)
aactctccgggaggggcgcttcccgacgccaagtcttactgttgctcaggctggaatgcagtggtgcgctctcggctcactgcaacctctcccttctgggttcaagcgattctcgtgcctcagcctcccaagtagctgggattacagacaaaaggatgccacggagaaagaaaaaagttaaagaagtctccgaatctcggaacctggagaagaaggatgtggaaactaccagttctgtcagtgtgaagaggaagcgtagacttgaggatgcattcattgtgatatccgatagtgatggagaggaaccaaaggaggaaaatgggttgcagaaaacgaagacaaaacagtcgaatagagcaaagtgtttggccaaaagaaaaatcgcacagatgacagaagaagaacagtttgctctggctctcaaaatgagtgagcaggaagctagggaggtgaacagccaggaggaggaagaagaggagctcttgaggaaagccattgctgaaagcctgaatagttgccggccttctgatgcttccgctaccagatctcgacctctggccactggaccgtcttcccagtcccatcaagagaaaaccacagactctgggctcactgaaggcatatggcagctggtacctccatcactgtttaaaggctcacatatcagtcagggaaacgaggctgaggaaagagaggagccttgggaccacactgaaaaaactgaagaggggccggtctctggcagctcaggaagctgggaccagtcaagccagccagtgtttgagaatgtgaacgttaaatcttttgacagatgtactggccactcggctgagcacacacagtgtgggaagccacaggaaagtactgggaggggttctgcttttctcaaagctgtccagggtagcggggacacatctaggcactgtctacctaccctagcagatgccaaaggtctccaggacactgggggcactgtgaactatttctggggtattccattctgccctgatggagtagaccctaaccagtataccaaggtcattctctgccagttggaggtttatcaaaagagcctgaaaatggctcagaggcagctccttaataaaaaaggttttggggaaccagtgttacctagacctccttctctgatccagaatgaatgtggccaaggagagcaggctagtgagaaaaatgaatgcatctcagaagatatgggagatgaagacaaagaggagaggcaggagtctagggcatctgactggcactcaaaaaccaaggatttccaggaaagctcaattaaaagcttgaaagagaaacttttgttggaggaagaaccaacaaccagtcatggtcagtcttcccaagggattgttgaagaaacttctgaagagggaaactctgtacctgcttcacaaagtgttgctgctttgaccagtaagagaagcttagtccttatgccagagagttctgcagaagaaatcactgtttgtcctgagacccagctaagttcctctgaaacttttgaccttgaaagagaagtctctccaggtagcagagatatcttggatggagtcagaataataatggcagataaggaggttggtaacaaggaagatgctgagaaggaagtagctatttctaccttctcatccagtaaccaggtatcctgcccgctatgtgaccaatgctttccacccacaaagattgaacgacatgccatgtactgcaatggtctgatggaggaagatacagtattgactcggagacaaaaagaggccaagaccaagagtgacagtgggacagctgcccagacttctctagacattgacaagaatgagaagtgttacctctgtaaatccctggtcccatttagagagtatcagtgtcatgtggactcctgtctccagcttgcaaaggctgaccaaggagatggacctgaagggagtggaagagcatgttcaactgtggaggggaagtggcagcagaggctgaagaacccaaaggaaaaaggccacagtgaaggccgactccttagtttcttggaacagtctgagcacaagacttcaaatgcagacatcaagtcttcagaaacaggagccttcagggtgccttcaccagggatggaagaggcaggctgcagcagagagatgcagagttctttcacacgtcgtgacttaaatgaatctcccgtcaagtcttttgtttccatttcagaagccacagattgcttagtggactttaaaaagcaagttactgtccagccaggtagtcggacacggaccaaagctggcagaggaagaaggagaaaattctgaatttctagggtccaaaagttgacaaaaccattagtaggaggggtgggccatgttcattaagccatagtggtccctagttcattgttgagcaagttttagccctgcagttttcaccaccagcacctacccagcattctggtttttatgttttttatgatctatgcagacaactgtgtattctgttttataacagtttgtttgaatttacttacagttaaaaaatttaaatat

SEQ ID NO: 17462 - protein, 719 aa, Homo sapiens [sequence omitted]

SEQ ID NO: 17463 - DNA, 2545 bp, Homo sapiens
  CDS (43)..(1518)
cacacaggcaggtcgggcaggcgggtcgcaggttgtaaatccatgtggcgggggctttggaccctggcggcccaagcggcacgtgggcctcgcagattgtgcacgcgccggagcagcggcgcaccagcccccggctccggcgccaccatcttcgcgctaagctctggccaaggccgctgcggcatcgcagtgatccggaccagcggccccgccagcggccacgccctccgaattctcaccgcaccccgagacctgccccttgctcgccacgccagcctgcgcctgctcagcgatccccgctccggggagcctctggaccgcgcactggtgctctggttcccaggtccccagagtttcaccggtgaggactgcgtggagttccacgtgcatggaggcccggcagtggtgagcggcgtcctgcaggccttgggcagcgtgccagggcttcgaccggcggaggcaggcgagttcactagacgggcgttcgccaatgggaagctgaacctgaccgaagtggaggggctggcggaccttatccacgcggaaacagaggcgcagcggcggcaggccctcaggcagctggacggagagctgggccacctctgccgtggctgggccgagaccctcaccaaagctctggcccacgtggaggcctatatcgatttcggcgaggatgacaacctggaggagggggtcctggagcaagccgacatcgaagtacgggcactgcaggtggccctgggtgcacatctacgagatgccaggcgcgggcagaggctccgctcaggggcgcacgtagtggtcactggaccccccaatgcgggcaagagcagcctagtgaacctgctcagtcggaagcctgtgtccatcgtgtccccggagccagggaccacccgtgacgtgctggagaccccagtcgacctggccggatttcctgtgctgctgagcgacacggctgggttgcgggagggcgtggggcccgtggagcaggagggcgtgcggcgcgcccgggagaggctagagcaggctgacctcattctggccatgctggatgcttctgacctggcctctccctccagttgcaacttcctggccaccgtcgtagcctctgtgggagcccagagccccagtgacagcagccagcgcctcctcctggtgctgaacaagtcggacctgctgtccccggagggcccaggtcccggtcctgacctgcccccgcacctgctgctgtcctgtctgacgggagaggggctggacggcctcctggaggcgctgaggaaggagctagctgcagtgtgtggggacccgtccacagatcccccgctgctgacccgagcaaggcaccagcaccacctccagggttgcctggatgccctcggccactacaagcagtcaaaagacctggccctggcggcagaggcgctgcgggtggcccggggtcacctgacccggctcacaggtggagggggtaccgaggagatcctggacatcatcttccaggacttctgtgtgggcaagtgacgggatccagggaagtcgcacccaagctgcgtggagacccaggagcctcgggggatctggaaacagtttaggccaattgggattctcattcgcctgggaaagaacttgattctcaaatagtgaagcaacacagctgagaggtagtgagatccctgcagggactccctggagattcaggccctggaatggggctgaatggaggtcccgttcgacccttgatgctggggcatccgggttgggatggagataggaggatctcagtatatttgtttcgtagttttttatttattttgcaaataccaaaggaatgtaaaaaaaactcaggtgatctagaagtgtttattttcttcccttcccttcccttccctttccttttccctttccctttccccttccccttccccttccccttccccttcccctacccttccctcctctgtctattgcccaggctggagtgcagtggtgcgaccttggctcactgcaacctccatctccggggctcaagcgcttctcctgcctcagcctcctgagtagctgggattacaggcatgtgccagcatgcccggctaatttttttctttttttgagacagagtctcgctctgtcacccaggctggagttcagtggtgcgacctcggcttactgcaacctccacctcccgggttcaagtgattctcctgcctcagcctcttgagtagctgggactacaggcgcacaccaccacgccaggctaatttttgtatttttagtagagacaaggtttcaccatgttgaccaggctggtcttgaactccttgacctcaggtaatctgcctaccttggcctcccaaagtgctgggatcacaggcgtgagctatcacacctggccccagaagtgtttcaacatggaaattttccttagcccttctgtggttgtcatggcttaatgtgtgtctttccagaactttgaatgtttgcatacttgtggatgtacctttcaaatatgtttgtcttgtgtatcatatataaatggtattgtgtt

SEQ ID NO: 17464 - protein, 492 aa, Homo sapiens
MWRGLWTLAAQAARGPRRLCTRRSSGAPAPGSGATIFALSSGQGRCGIAVIRTSGPASGHALRILTAPRDLPLARHASLRLLSDPRSGEPLDRALVLWFPGPQSFTGEDCVEFHVHGGPAVVSGVLQALGSVPGLRPAEAGEFTRRAFANGKLNLTEVEGLADLIHAETEAQRRQALRQLDGELGHLCRGWAETLTKALAHVEAYIDFGEDDNLEEGVLEQADIEVRALQVALGAHLRDARRGQRLRSGAHVVVTGPPNAGKSSLVNLLSRKPVSIVSPEPGTTRDVLETPVDLAGFPVLLSDTAGLREGVGPVEQEGVRRARERLEQADLILAMLDASDLASPSSCNFLATVVASVGAQSPSDSSQRLLLVLNKSDLLSPEGPGPGPDLPPHLLLSCLTGEGLDGLLEALRKELAAVCGDPSTDPPLLTRARHQHHLQGCLDALGHYKQSKDLALAAEALRVARGHLTRLTGGGGTEEILDIIFQDFCVGK

SEQ ID NO: 17465 - DNA, 4056 bp, Homo sapiens
  CDS (124)..(1683)
atcaatagaaacaagaccggagagataacagcctcctccaacaaatccctcaacttgctaaaaatcaagcatggcgatttgttgttcctgtttccctcgagccttgctgggccctcatctgaaatggagacgtcagttccaccgggcttcaaagtctttggcgctcccaacgtggtggaggatgagattgatcagtacctcagcaaacaggacgggaagatttacagaagccgagacccacagctatgccgccacggccctttggggaaatgcgtgcactgcgtccctctagagccattcgatgaggactatctaaaccatctcgagcctcccgtgaagcacatgtccttccacgcctacatccggaagctgactggaggggctgacaaggggaagtttgttgccctggagaacatcagctgcaagattaagtcagggtgcgaggggcacctcccgtggccgaatggcatctgtactaagtgccagccgagcgccatcacgctgaacagacagaagtacaggcatgtggacaatatcatgtttgagaatcacaccgtcgctgaccgctttcttgacttctggagaaagacagggaaccagcattttgggtacttatacggacggtacacggagcacaaagacattccccttggcatcagggctgaagtggctgcgatttatgagccacctcagattggtacacagaacagcttggagcttcttgaggatccaaaagctgaagtggtcgatgaaattgctgccaaacttggcctgcggaaggttggctggatatttacagacctcgtctcagaagatacccgaaagggtaccgtccgctacagtcgaaataaggacacctatttcctaagttcagaagagtgcatcactgcaggagacttccagaacaagcatcccaacatgtgccggctctctccagacggacattttggatccaagtttgttactgcagtggctacaggtggtcctgacaaccaagtccactttgaagggtaccaggtgtccaatcagtgtatggcactggtccgtgatgagtgtttgctgccatgcaaggacgccccggagcttggctacgccaaggagtctagcagtgagcagtacgtgcctgatgtgttttataaggacgtagacaagtttggcaacgagatcacccagctggcccggcccctgcctgtggagtatctcatcatagacatcacaacaactttccccaaggatccagtttacactttttctatttcgcaaaatccatttcctattgaaaaccgggatgtattgggtgagacacaggacttccatagcttggccacctatttgtctcagaatacctcatctgtgttcttggataccatctcagatttccacctcttgctgttcctggtcaccaatgaagttatgcctctgcaggacagcatcagcttgctgctggaggccgtgcggaccagaaatgaggagctcgcccagacatggaagaggtctgagcagtgggccaccatcgagcagctgtgcagcacagttggcgggcagctcccaggtctccatgagtacggcgccgtcgggggctccacacacacggccactgcagccatgtgggcctgtcagcactgcacgttcatgaaccagccaggcacaggccactgcgagatgtgcagcctccccaggacctagggcgcctgccctctgctggctaggaccgggcccagcccagcccttcctgaagccagaagcgttgctgagtgtgttccctgtaactgccccatagtgggcagccctggaggaacaaggggctggctgtcctgggctccctgacccactgaagcttctcagcacgttcctccctggagagcgggcgccacggctggtattctgcaggctgaatgcagtctccagactggaaacgcagagcggctcctcacgcctaatcctgttgacaagtcccccgccgtgttggaaagacctctcgcctctacgtggcacctggaattggggcgcacagggaggggccgatgctgccaccacccagccttctctttattttcagtgctttttgtttggcctccctgcccccatgtttttctggctgggagctcctggttacccccttgtctgactgcttggtggcaggcaccctgcctgtgagggccactttcctcttctagtagctgttgtctggtggggacgcagtggccctggacacggctcccctctgcaggtctgcaggtcggtttgctgcctgccctcctcctctcacccgatgtccaggtgggattttaaagtctgcattggttataataacagttatcagtaattcctgcccagaagacttttatttatttttttttaagataaaaactgcacaaaaggggagtgagagagactagtttccacatccttccctcctttagtgaggcccccgaggttgtgtccagggtgatgagtgtggacgggggcaccagtcagttctcccttgaagtaaacctcagtgcctgagacttttctaccaagccacacagctgcagcaactgcagatactgcgggctgagcaggagcagtggtggcgcctgccctgaggctgccctgcgatggcctgggtgggagagctgggtcaccggtgccgatgctctggccctccccaatacgctgcttcgtcccactgcaccgcctggctgagggcgttaggggctgtgcctcttgtgagggccatttgggacctccctggggcactgcacaattgatagtgtaccaatagagggagactgggcgatctggaacagcacgtggtggggtcctgcttgtgtgctctgcgttcctctgtggcgtggccaggccggggcctggctcttacccggggagtggtgggcatctcgatgcttctttgccttaatgatggccacatctgggctgctctgcacccacgggagaggctggcccagctgcagactgcttagggacttctgtgtccatcctggggggtaagcccacgtgacccacattcttggcactatgaacagagaacatttgcctgttggcttctgaagtggtcagggccatggctgacacctccaggtccgcctggcatgggacaccaagtggaaggcccaagcagctcatctgctcttgggaccaggggccagttgggttgggtctggtcacggcagagcttttgtggagggtcaggaagggtggagaggagctgggttgaagcggactgctgcggatgcaactcccagcttgcccaccgcgggctgtctgctctccctcctagcagctgtcacactgaagttttgtcctctgctgtctcctctggtcctgagatgagctgtgagcctaggtggccaaggcttcctgcattgcttccctgtgagtccaaggccttcccccaccactgggcagaggctggacagcacggacttctagagagagccgcgttgccagttcctctcccactcgctcgtccttatccaccacgctattatagtttccgttgtcctccaccagcatttcccttactctgaagttccggcattcacatcattcatgttttcttttgtcttttagctaaaggaaaagcattggcgatttgtctgattctggttttgagttactctttgttcagtaatgcactttattttattgtccaaagagagtcagagctaagcatacaggcttgggggtgagccctgctgtgagagttcaggccctgggaggctcagccacctcctcttgtgggaaggaggtctcagccccacctcgcatcttcacctgcccttggtgtggacacaccctctcatgctaccagcaccataatccagtgggggtgactgggtgcacacctgcccaggtgaacacagcggctgccagtctcctggtcccgagaggaggtggggcctggccctggctccctccaaccagctgctcctgggacacaggtgctcctgcttcggctctgtttcggctcacaggtgtgcatcactgggcttggatttgcattacattgaccccagccctgcagtggaacctaataaaagcgcctgaagc

SEQ ID NO: 17466 - protein, 520 aa, Homo sapiens
METSVPPGFKVFGAPNVVEDEIDQYLSKQDGKIYRSRDPQLCRHGPLGKCVHCVPLEPFDEDYLNHLEPPVKHMSFHAYIRKLTGGADKGKFVALENISCKIKSGCEGHLPWPNGICTKCQPSAITLNRQKYRHVDNIMFENHTVADRFLDFWRKTGNQHFGYLYGRYTEHKDIPLGIRAEVAAIYEPPQIGTQNSLELLEDPKAEVVDEIAAKLGLRKVGWIFTDLVSEDTRKGTVRYSRNKDTYFLSSEECITAGDFQNKHPNMCRLSPDGHFGSKFVTAVATGGPDNQVHFEGYQVSNQCMALVRDECLLPCKDAPELGYAKESSSEQYVPDVFYKDVDKFGNEITQLARPLPVEYLIIDITTTFPKDPVYTFSISQNPFPIENRDVLGETQDFHSLATYLSQNTSSVFLDTISDFHLLLFLVTNEVMPLQDSISLLLEAVRTRNEELAQTWKRSEQWATIEQLCSTVGGQLPGLHEYGAVGGSTHTATAAMWACQHCTFMNQPGTGHCEMCSLPRT

SEQ ID NO: 17467 - DNA, 2647 bp, Homo sapiens
aaaatgccaaaatattttaattttcttaatactgtcataaattgaattgttatttacatttttattttctattctttcactatatatagaaatacaattaatttttgtgttttgaacatgtatcctgcaactttactaaattgacttatattaatccttgtaacttttttctggatttcttagagctttgtacatacaaaatcatgtctgcaaataggacagttttacttcttctttccaatttgcctttttctttttcttgccttattcactatctgggtcttacaatacaaatttaaatgcaaatagtgagagtggatatgcctgctttgctttgtttgtgattttaggtagaaaacattaaatcttcaccattgagtttgatgttagctgtagattttttttataaccttaattggatgaggaagacttctattcctagttgttgagagatttagtgatgaaagagtgttgatttttatcaaatgttttttctgcatccatttaaataattatatggttctttttctgttttctattcatagagtagattatattgattgattttctgatgttaagccaaccttgcattctgagataaaccccacttggatatgatagatagtattctttttacatgttattggttcttatttgctatattttgttaggaactttttgtttctatgctcatgagtaatattgctctgcagttctattatcttgtgatgtatttgattttctaataaaggtaatgttagccccataaaacgatctgggaaatgctccctcctcttttatattttgaaaacgttggtgtaagattggcgtcatttcttccttaaataactggtggaattccccagtgaagtgatctagatctggagttttctatgtgggaaagtttttattattaatttaaatagggctgccaaattttcttgaggcagttttggtaaatttgctttttaagccgggcaaggtggctcacgcctgtaatcccatcactttgggaggccaaggcaggcggatcacgaggtcaggagatcgagaccatcctggctaacacagtgaaaacccgtctctactaaaaatacaaaaaaattagccgggcgtggtggcgggtgcctgtaatcctagctactcgggaggctgaggcaggagaatggcatgaacccgggtggcggagcttgtggtgagccgagatcgcaccactgcactccagcctgagcgacaagagcaagactccgtctcaaaaaaaaaaaaaaaaaaaaaaaaaatttgctttttaagtagtattttatctagatcgtcaagcttatcagcatggaattgttcacagtatgcccttcttattcttttcatgtctgaaggacgtgtagaaaaaccccttctttcattcctaatggggatttgtctcctctgttttcttcactagtctggctacagctggtgggttttattgaatttatttcaaaaacgtggcttttggttttattgatttttctctacttcttttttttttttttttttttgagatggagactcactctgtcgcccaggctggagtgcagtggcacgatctcggctcactgcaagctacgcctcccgggttcacgccatttatcttttctattttattgatttttaccctttatcctttccttccttttgtttactttgagcataacttggacttatttttataatttcttaaggtggaagcttagatcactgagctttatttttagactttgcttcttttcccatgtaggcattaaagctacatatttccctatatgttctgttttaccctacatcccacaaattttgatatgctttcattatcataggtatatgatatattatcaacatattttctaatattacttgtgactcttctttgatctagtgattattcagaagtatgttgaagtccagatatttgaaattttcctggttatctcattattattgaattccagtttaatcctttgtggacagagaacatagcctgcgtgattttaaactattcaaatttattgagttgtgttttgtggcccaaaatatggcctatcttgacaaacacaccaggtgcacttgaaaataatgtgtattctgccatttttggtgaagtgttctataaatatcaagtcaagttggttgataatattgttcaaaacttctatgtctttactcattttctggtctaattgttctagtagctgctaggtagagatgttaatatttgcagtgatgtttgtggaactatctcttctgcactttcattctgtcagttacttgcttcatgtatttttgcttcatatattggatgcatacaaatttcgactgttgtgttgtccttgacaataagacttttatcattatggagtaatgaaattgataatacatttcttattgtgatataattgacagaacataaaatttcatacaatataaaattctccacttaaaaatatgcagtgtacattttggcttaagtatattttgtctgatatcagtctagccagtctagccttttgatgtctactgtttgcatggtgtatttttccacccattttctttcaacatatttgtcaatatatttgctggttcttctctaataaacatatagttgggtcttgtt

SEQ ID NO: 17468 - DNA, 2665 bp, Homo sapiens
  CDS (4)..(1902)
aagatgatcgtaggcgaagagaagaagttcctgctgcccttctggctgcaggtgatcttcatttcgctgctgctgtgcctgtcgggcatgttcagcggcctcaacctggggctcatggccctggacccgatggagctgcgcatcgtgcagaactgcggcacggagaaggagaagaattacgccaagcgcatcgagccggtgcgcaggcagggcaactacctgctgtgctcactgctgctgggcaacgtgctggtcaacaccacgctcaccatcctgctcgacgacatcgccggctcgggcctcgtggccgtggtagtctccaccatcggtatcgtcgtcttcggagagatcgtgccccaggccatctgctcccggcatggcctggctgtgggggccaacaccatcttcctcaccaagtttttcatgatgatgaccttccccgcttcctacccggtcagcaagctgctggactgcgtcctgggccaggagataggcaccgtctataaccgggaaaaactgctggagatgctccgggtcaccgatccctacaacgacctcgttaaggaggagctgaacatcatccaaggggcgctggagctccgcaccaagacggtggaggacgtgatgaccccactccgggactgcttcatgatcaccggcgaagccatcctggacttcaacaccatgtctgagatcatggtgagcggctacacccgcattccagtgtttgaaggggagcgctccaatatcgtggacctgctgtttgtcaaagacttggccttcgtggatcccgatgactgtacccccctgaaaaccatcaccaaattttataaccaccccttgcactttgttttcaatgacaccaagttggacgctatgctggaagaatttaagaaaggtaaatctcacctggctatcgtgcagcgggtaaacaatgagggagaaggggatccattttatgaagttctgggaatcgtcaccttagaagatgtgattgaagaaatcatcaaatctgagattcttgatgaaacagatttatacactgacaacagaacgaaaaagaaagtggctcaccgggaacgaaagcaagatttttctgcctttaagcagacagacagtgagatgaaggttaaaatatcaccacagctcctcctggccatgcaccgtttcctagcaacagaagtagaagcatttagcccatcccagatgtcagagaagatccttctaaggctgctaaagcaccccaatgtcatccaggaactgaaatatgatgagaagaacaagaaagcccccgaatactacctctaccagcgcaacaagccagtagactacttcgttctcattctgcaggggaaagtggaagttgaagctgggaaagaaggtatgaagtttgaagcgagcgccttctcatactatggcgtgatggccctgacagcctctccagttcctttgtccctgtctcgtacctttgttgtcagcagaacagagttgttagcagcaggttctccaggtgaaaataagtcccctcctcgcccatgtggcttgaatcactcagactctctcagtcgaagcgaccggattgacgccgtcacaccaacactggggagcagcaataaccagctcaattcttcgctcctccaagtctacatccccgattactcggtgcgagccctttcggatctgcagtttgttaagatctcaagacagcaataccaaaatgccttgatggcatcccggatggacaaaaccccccagtcttcagacagtgaaaacactaaaatcgaattgactcttacggagctgcatgacgggttgccagacgagacagccaacctgctcaacgaacagaactgtgtgacgcacagtaaggccaaccacagcctgcacaacgaaggcgccatctaggccgcgctggctgcacccgcccaggcccgcacccgcccagtcccgagggcccggccctgtctgcccatgacttcactggtgtgagcttgtccgccatgctgtaccctgcaacatcctgagaccaaagaccttgtgcccttcccaggagccgcggaggaggacagtgagggaggaatggaaacgagagatgtgaagttggcagccggggcatggcgttcaagattttggagatgaactgattccgcccaaatagaatcatgtttattttttcagctctcccttttatcattattcacactcctctgccctcgatttgcatgaagttgaaaattgttgcgatttattttttcaagagatcatgtttttaaagtgtcttttgcagagttttaagttgttctgtctgaactctgctgtgatcccatgatgtgaccctgatgggctggacttgcccctccggtagccttccttggccctcccagcgaggggcacccttcctctgtgccccagtgggcatcaccgtcgatctcgctggctgaatgaagaagaccgtgttactgcagaacctgccaagtctgtcatcactgtggggtgtagcctgcctcagagggacctgcaatcacctctctgagctcagtggtattttgagaatttaatgtttaactgtacccctttccctcaggaagatttaacatttgcttgggaatgtgattttgctcccaccctaaggaatttttatcaccaaaatgaatgttaatgaatt

SEQ ID NO: 17469 - protein, 633 aa, Homo sapiens [sequence omitted]

SEQ ID NO: 17470 - DNA, 2902 bp, Homo sapiens
  CDS (216)..(1364)
tgaccagcgactgagcggcggccggcgcgcttagcgccctgaacatgcggcagtccctgcgggcgaccccgggctccggacaggcggcggcggaggcggcggctcgggagggaaggaggcggcggcgccggcggaggtggcggcggagacggccggcgcccggcgcggagccctagggaggcagttcagcgcggcctcgggcctcgtcgagaaggatgctgtcccgaaagaaaaccaaaaacgaagtgtccaagccggccgaggtgcaggggaagtacgtgaagaaggagacgtcgcctctgcttcggaatcttatgccttcattcatccggcatggtccaacaattccaagacgaactgatatctgtcttccagattcaagccctaatgccttttcaacttctggagatgtagtttcaagaaaccagagtttccttagaactccaattcaaagaacacctcatgaaataatgagaagagaaagcaacagattatctgcaccttcttatcttgccagaagtctagcagatgtccctagagagtatggttcttctcagtcatttgtaacggaagttagttttgctgttgaaaatggagactctggttcccgatattattattcagacaatttttttgatggtcagagaaagcggccacttggagatcgtgcacatgaagactacagatattatgaatacaaccatgatctcttccaaagaatgccacagaatcaggggaggcatgcttcaggtattgggagagttgctgctacatctttaggaaatttgactaaccatggttctgaagatttaccccttcctcctggctggtctgtggactggacaatgagagggagaaaatattatatagatcataacacaaatacaactcactggagccatcctcttgagcgagaaggacttcctcctggatgggaacgagttgagtcatccgaatttggaacctattatgtagatcacacaaataagaaggcccaatacaggcatccctgtgctcctagtgtacctcggtatgatcaaccacctcctgtcacataccagccacagcaaactgaaagaaatcagtcccttctggtacctgcaaatccatatcatactgcagaaattcctgactggcttcaggtttacgcacgagcccctgtgaaatatgaccacattctgaagtgggaactcttccagctggctgacctggatacataccagggaatgctaaagttgctcttcatgaaagaattggagcagattgttaaaatgtatgaagcatacagacaagcccttcttacagagttggaaaaccgaaagcagagacagcagtggtatgcccaacaacatggaaaaaatttttgagctgattttttaaaaatttaagttttgtaagagctttaaaatattttcacagataaaaaattgcaaacaagtactctggttaataaatgctgcttcctttgtggaaattataaaattctaactttacatgtattttgttattagaaattttcttttattgaatgagaaaaattagtctatcattttaagagccaatatggcaaacactttcaaatactgtatattaggaaactgttttggtattcttgatggaaaaaaatgcagcggaaatgtcattatgaacagatgttaaataggaaattattacttgttaacttcttacagcagtagtaccttctttaaaaaaaaaaaagaatctgcggtatttttttaaaaaaaaagtttactgctgtagtgtgaaatattgtctggaaagggatggtttaaatattaccatgatgtagttgaaatataaaataggatttggaaccttattgtgataaatatttatatatgatgtatgtttgtctcccctctccaaagtaaggaacccagctgggcgtggtggctcactcctgtaatcccagcattttgggaggccgaggtgggtggaccgcttgagtccacgagtttaagaccagcctgggcaacatggtgaagccctacaaaaaatacaaaaaaattagccgggtatgatggtgtgtgcctctagtcccagctacttgggaggctgaggtcagaggatggcttgagcccaagaggcagaggttgcagggtcaagatcgcaccacttgcactgcagcctgagagagagagagccagaccttgtctcaaaaaataaaaaataaaaaaataaaaacaaaataaggaatccttttaaagcatgttgagaaagtattttttggtatgaatgggtgacgggccttttaatctttcaggaatacatataagcaggaatacttagcctgtattgggaaggtgcgtgaaactcaaagttgctaacatcatcttccttattttcagccagtgctgttactgcatttagcatggctctgacgaggcagtggagagttcctgacagcatagcatactgccttctgacagactgggttaagctaccaaaaatgacaaccagggattcaaaaaaaatttttggtcattaaatcgaatgtatattattactttttaattttctaagtatttatcacaggactttaacaccatatatttccctcccagtttttctccccttttggtttaatagttaaaacattcttcataattagtgctgtacatttgattgcaaacaaattggtgatacttctaaactataactataaatctctagaattctgtgaatttcaacattatttgaagtagttcttcagttatatttacatgtgttgtaaatatgtaaatatacttttagcttaggaagtcttccagaatacaaactactcccagttagatatcagtgagtttgaataactgaagaaatgttgacaatgttaagtgtttgattttatataacaagcttattaaatatatttttgtgg

SEQ ID NO: 17471 - protein, 383 aa, Homo sapiens
MLSRKKTKNEVSKPAEVQGKYVKKETSPLLRNLMPSFIRHGPTIPRRTDICLPDSSPNAFSTSGDVVSRNQSFLRTPIQRTPHEIMRRESNRLSAPSYLARSLADVPREYGSSQSFVTEVSFAVENGDSGSRYYYSDNFFDGQRKRPLGDRAHEDYRYYEYNHDLFQRMPQNQGRHASGIGRVAATSLGNLTNHGSEDLPLPPGWSVDWTMRGRKYYIDHNTNTTHWSHPLEREGLPPGWERVESSEFGTYYVDHTNKKAQYRHPCAPSVPRYDQPPPVTYQPQQTERNQSLLVPANPYHTAEIPDWLQVYARAPVKYDHILKWELFQLADLDTYQGMLKLLFMKELEQIVKMYEAYRQALLTELENRKQRQQWYAQQHGKNF

SEQ ID NO: 17472 - DNA, 2641 bp, Homo sapiens
  CDS (897)..(2189)
ttttgcattcctccagcttgcagctccggtagttggaggctgggtagggcagggggaaccgacaggccggtgtccccagccgcaaaagagctgctgaactgtccgtttaaatgctgctgggagactcgtaaaaaaatcatcgtggacctggaggatgagaggggcgagctttatttcggtcggattgcggtgtggtggtttagctgcaaggggatgccgcagccccagttgagggggaaaatagttcttaaaaagcatatgcccccctaaggaatgtctctaaagaaccaaatcaaagctgctctttggaaggtatgaatagaatttaaaaaaaaaagatttctatggagcttaaagttcacagccattctgtgtagacaagagctgagaaaaatgtgagaattatacagaaaaccattaatcacttcttttctttaaatacgtatcctctctcctttgttattattcaacagcaaatctccttggaccggctgttgggggaaaaaagtgttagccgtctctcccggatctgcaagggggaaaaaatttggaaccataaagttgaaaacttttttctctcagtttggaagaagcccttcgtcatgaatgggatctgcagagttcgggcgagaggaggcgagaggcgcaaaggaggggagatttgtcgcctgccgctcgctctggggctcgatgtgaatatatattatgtctgcctgttctcccctcgtcggtggctaaggtcagccgcttggaacagaccccggaggaggggggcagagaggggaggtgggggggggggtccggcgtgtcacgtgacccccagggttgccaatgtccggtcctgagggtatcaggcctttccaagttgccacccactgcccaggcctcacccagcgatgcagaaagccacctactacgacaacgccgcggctgctctcttcggaggctattcctcgtaccctggcagcaatggcttcggcttcgatgtccccccccaacccccatttcaggccgccacgcacctggagggcgactaccagcgctcagcttgctcgctgcagtccctgggcaacgctgccccacatgccaagagcaaggagctcaacggcagctgcatgaggccgggtctggcccccgagcccctgtcggccccgcctggctcacccccgcccagtgccgcacctaccagtgccactagcaacagcagtaatgggggcgggcccagcaaaagtggtcccccaaagtgcggtcccggcaccaactccaccctcaccaaacagatattcccctggatgaaagagtcgaggcaaacgtccaagctgaaaaacaactcccccggcacagcagagggctgtggtggcggcggcggtggcggcggcggcggaggcagtggtggcagcgggggcggtggcggcggcggcgagggaggggacaagagccccccggggtcggcggcgtccgagcgggcgcggacggcgtacacgagcgcgcagctggtggagctggagaaggagttccattttaaccgctacctgtgccggcctcgccgtgtagagatggccaacctgctgaacctcagcgagcggcagatcaagatctggttccagaaccggcgcatgaagtacaagaaggaccagaaggccaagggattggcctcgtcgtcggggggcccatctccagccggcagccccccgcagcccatgcagtccacggccggcttcatgaacgccttacactccatgacccccagctacgagagcccgtccccacccgccttcggtaaagcccaccagaatgcctacgcgctgccctccaactaccagccccctctcaaaggctgcggcgccccgcagaagtaccctccgaccccggcgcccgagtatgagccgcacgtcctccaagccaacgggggcgcctacgggacgcccaccatgcagggcagtccggtgtacgtgggcgggggcggctacgcggatccgctgccgccccctgccggcccctccctctatggcctcaaccacctttcccatcacccttccgggaacctggactacaacggggcgccccctatggcgcccagccagcaccacggaccctgcgaaccccaccccacctacacagacctctcctctcaccacgcgcctcctcctcagggtagaatccaagaagcgcccaaattaacacacctgtgatgggaaagggcgaacgaggattaggggatggggaggaagagagagactgtggagctctggggggcaacctggaggtctgaaaagaggagccagagaaggtggtacccaggcttcctggtctgaaccggcctggagctccttcccttccccctggcctgagaggttgcttttaagtcttccaccccttgttccatctgcctgccaacccatcggaaaggaatccacatcatattggagatgaccccatcaaccccagggctccagcactaccaagttggaattccacgcccgggagtggggtagaggaagacgagacaggacgaggcagaaaagcacattttaaaaaccagacaagatggctaggccatcaccaaccaacggacttaccttacatctttgtaggtaattccccccaaatcttgatttttttttttcctcaattatccttt

SEQ ID NO: 17473 - protein, 431 aa, Homo sapiens [sequence omitted]

SEQ ID NO: 17474 - DNA, 2148 bp, Homo sapiens
tgtgatttttatctttatttagctcagactagcttattcggtcagtgagagggagcctcttcagcttggctcttgctttcttttgataagtgtgcacatgtgtgcatacatgtgtgcacagaccacacgcacagtcattgatagctccctgcagcctggcatgtcaagatgctctaggcccaatttatagagcttctgctccaaacctgtcttaaaagaaaaactttagacaagttagcagtttaattgagcagaaaatagtttcttcagctgggtagcactcaggaccaaaagtggttcagaacgttctcctgtgcgttgtgtgcaggctgtatttatttatagccacaggaagggaaagacacatgtacatggccagactgactgcaggtcagcctccacctcacataggcatgttttgggagccttcagcatgtgattggtgagactctgctgcttgttacagaagtgtactctcaagtcaggtcccagtttgcttatacattaagtgaggttataagtcactatgtacagaggcagttttaggccaaacttaattccgtttaacacttggaatccattatttttcccagagtctctggtagagatggtatttcagatccagtttaggatgctcattgctattgcgttggtcattatttctagatctttggacggagctttaaaaaaatacaaacattgcacacacatatttaaaggaagaatattttctgagcctatattgatattcccaatacaaattcagggtcctggggcctttacatagcctcctctatatgatgtctgtgtctcctgcactcggaatcctgcttctcaagacacaggacaatggcatggaatatccatcccttaatcactcacttgttttattcctctttagcatttagcatttaaaaaaaatactaataccatagcattaattgtgatgatgaaaacagcactgtgtctacgttgtcagaagaattgctcctttttaccaccattgactcatttctgtgtgttcaggtctcataaccagtctatagtcagtgtcatcttggggacagtattccttgagtttctgatgttgaattcagttttgctggatacgaaattcttggcccagattttctttgagtatcttgttttattctgttttcttccagcataaagtgatgcatgaaaagcctgatgaatcttgttttcttcccctgacagtcatatgctgtttttccttagatgcccaaaggattttttcctttttctgtcaagtcggccgttttattcgaatgtgtcatgtgttggtattggttgtcctggtccatatttgcaagcgtatggtgtgctctttctatgtgtacttcatatctgttattttaagaagatttgcttgaactggagtttagtgttacatttttcttgctttggcttttttctgtggggatccctgttatctgtatgttgaaatctaaattggctgttctcagtgtttgccactgtctcttgaatctcttttatctctttctttgtttctttttgagttttaaaagttgttattgtaccacttttgttttgttttgttatttaaaataggaacagtgtctcactgtgttgcccaggctggtcttaaactcctggcctcaagcgatcctccttccttggcctcccaaagtgctgggattacaggtgtgagccaccaaagccggccccaccttgctttttaaaacagctctgttgaggtgtaactgacaggtaatgaactgcacatacgtgaagtgaccgatgcatttgcctgtgaagctgtcgccagaacatgtccatcaccaccaacagcagtttcacaccccggtctaaaccgtccctcgtgtcctccatgttcaggcaaccactggtctgctccctctcactaaaggttaatttatatattctagaattttatctgagtggaatcgcagagcaagtactgtggggggaggtgcttctactcagcataattattttggcattcacccattttgtgtacatcaataatccacattttgtattgcatggatataccacagtttatttatttacctgttgaccgatatttcgattatttccaatttctaaataaaaataaagcaaataaagctgccgtgaacattt

SEQ ID NO: 17475 - DNA, 2405 bp, Homo sapiens
  CDS (198)..(1160)
atgacactctgagcgctccgggaacggacagcccggcggcttcccgaagccggcggcgcagctgcccggggcgagggggagaaagggagagagggagggggagggcgggcgaagcgggagagccagagactcctcggcgctgagcgcggcggcggcccgggcagccccacgcccctgcctcgcgcgccgcccgcgccatgaagcacatcccggtcctcgaggacgggccgtggaagaccgtgtgcgtgaaggagctgaacggccttaagaagctcaagcggaaaggcaaggagccggcgcggcgcgcgaacggctataaaactttccgactggacttggaagcgcccgagccccgcgccgtagccaccaacgggctgcgggacaggacccatcggctgcagccggtcccggtaccggtgccggtgccagtcccagtggcgccggccgttcccccaagagggggcacggacacagccggggagcgcgggggctctcgggcgcccgaggtctccgacgcgcggaaacgctgcttcgccctaggcgcagtggggccaggactccccacgccgccgccgccgccgcctcctgcgccccagagccaggcacctgggggcccagaggcacagcctttccgggagccgggtccgcgtcctcgcatcttgctgtgcgcaccgcccgcgcgccccgcgccgtcagcacccccagcaccgccagcgcccccggagtccactgtgcgccctgcgcccccgacgcgccccggggaaagttcctactcgtcaatttcacacgtaatttacaataaccaccaggattcctccgcgtcgcctaggaaacgaccgggcgaagcgactgccgcctcctccgagatcaaagccctgcagcagacccggaggctcctggcgaacgccagggagcggacgcgggtgcacaccatcagcgcagccttcgaggcgctcaggaagcaggtgccgtgctactcatatgggcagaagctgtccaaactggccatcctgaggatcgcctgtaactacatcctgtccctggcgcggctggctgaccttgactacagtgccgaccacagcaacctcagcttctccgagtgtgtgcagcgctgcacccgcaccctgcaggccgagggacgtgccaagaagcgcaaggagtgactggctgcaggcaagaccaaggccaccactgtgggccctccttccagtcaggcctgaggacaaggtgagctcgctgagtccagcctcgtggtcttctccaagatgccgccagatgcccagcctacagcctctcagggtcggatcggagcacgcctgcctccctctcccctccgccctcacccagccaatccgaggctgcttcgcactttgccctctgcctggtggggaggggagagctcagcccccgactcactcagaccccaaggcccactgtccagctgcagaaattcgttgccaaagattggacagagacaccgaaggaaatggggtggtgaaaccccacagcgaaaagccacaccgttgctctgtgacttttgctcctcctgttgcctgagccccatctcaagccaaagatgagtcagtggttctgctaggaactcatggaatggatgggcatttgatgacccctgggggtcatcttggccctctgacctggtgctctctctccactgggccttgtgctggctgagtgcaagacaagccttaggggctgtgagagggaggctggggtgcctgggcggggctgggagtgggacctgagatccctgcccactctctccccttcattggctgcccaggccactggccccagttctcagtgtcccttgggtccaggctccttgggccctaagcatcaccagaagggagtaagcagggagagaagcaatattactccctcccctacaccagggacttgccccagggcagctacctatgggtctttgcttccccagccagcctctcctcactgtgacccacccccatgggcccccgtcccaggcagccagcaccatgggcaggccctgccatgggcagaaaaagagtttttctcttgttcagcctgcacgtggcctgaggaaggagtagaggctgggttggctggagccgtcctactgggcaagatggcgccccacttggagggcggtggtctgttacagggtgtgcaggggcagagaaggaagggaccaggggactgggccagtatgtggaggatggggcctgcgtgttcaaagccaaggcccgccccttccttgtgctcaaatggccaaagctgttcacgtctgtgctcaaccatctgcttcaaattgaagtaaaagccccaaaatgtcaagaaaaaaaaaaaaaaaaaaaaaaaaaaaaaaaaaaaaaaaaaaaaaaaaaaaaaaaaaaaaaaaaaaaaag

SEQ ID NO: 17476 - protein, 321 aa, Homo sapiens
MKHIPVLEDGPWKTVCVKELNGLKKLKRKGKEPARRANGYKTFRLDLEAPEPRAVATNGLRDRTHRLQPVPVPVPVPVPVAPAVPPRGGTDTAGERGGSRAPEVSDARKRCFALGAVGPGLPTPPPPPPPAPQSQAPGGPEAQPFREPGPRPRILLCAPPARPAPSAPPAPPAPPESTVRPAPPTRPGESSYSSISHVIYNNHQDSSASPRKRPGEATAASSEIKALQQTRRLLANARERTRVHTISAAFEALRKQVPCYSYGQKLSKLAILRIACNYILSLARLADLDYSADHSNLSFSECVQRCTRTLQAEGRAKKRKE

SEQ ID NO: 17477 - DNA, 2534 bp, Homo sapiens
  CDS (84)..(1550)
ccttggccaagaagttgccaccaccaccgggcagccccctgggccactcaccaactgcctctcctcctcctacggcccgaaagatgttcccaggcctggctgcaccctccttgcccaagaagctgaagcctgaacaaatacgggtggagatcaagcgggagatgctgccgggggcccttcatggggaactgcacccatctgagggtccctggggggcaccacgggaagacatgacacccctgaacctgtcgtcccgggcagagccggtgcgcgacatccgctgtgagttctgcggcgagttcttcgagaaccgcaagggcctgtcgagtcacgcgcgctcacacctgcggcagatgggtgtgaccgagtggtccgtcaatggttcgcccatcgacacactgcgagagatcctcaagaagaagtccaagccgtgcctcatcaagaaggagccaccggctggagacctggcccctgccctggctgaggacgggcctcccaccgtggcccctgggcccgtgcagtccccactgccgctgtcgcccctggctggccggccaggcaaaccaggtgcagggccggcccaggttcctcgtgagctcagcctgacgcccatcactggggccaagccctcagccactggctacctgggctcagtggcagccaagcggcccctgcaggaggaccgcctcctcccagcagaggtcaaggccaagacctacatccagactgaactgcccttcaaggcaaagacccttcatgagaagacctcccactcctccaccgaggcctgctgcgagctgtgtggcctttactttgaaaaccgcaaggccctggccagccacgcacgggcacacctgcggcagttcggcgtgaccgagtggtgcgtcaatggctcgcccatcgagacactgagcgagtggatcaaacaccggccccagaaggtgggcgcctaccgcagctacatccagggcggccgccccttcaccaagaagttccgcagtgccggccatggccgtgacagtgacaagcggccgtccctggggctggcacccgggggcctggccgtggtcggccgcagtgccggaggggagccagggcccgaggctggccgggcagccgacggtggtgagcggcctctggcagccagcccgccaggcaccgtgaaggctgaggagcaccagcggcagaacatcaacaaatttgaacgccgacaagcccgccctccagatgcctccgcagcccggggaggcgaggacaccaatgacctacagcagaagctggaggaggtgcggcaacccccaccccgagtccggccagtcccctccctggtgccccggcccccccagacatcacttgtcaagttcgtgggcaacatctacaccctcaaatgcaggttctgtgaggtggaattccagggccccctctccatccaggaagagtgggtgcggcacttacagcggcacatcctggagatgaacttctccaaagcggaccccccacctgaggagtcccaggccccgcaggcacagacagcggcggcagaggctccctaacacaaaagcattccagatcccctctcgtgccacctctgtctcctcttcttcctcctctgtgtcctcgtccctcttcctctttctttccgtttccaaaggagcaagccaaaacctcaaaccggcgccccttgggggccgggcacactacagccagggcgccgggagccagctagctgcccttcccccagcccgaggactctggggccacagggtgtcttccttcagcccatgcccacctggtccagcaggggcagcagccaggtctctgatggcagccggtctggtcacaggggaggacagcactcccccgtctagcagccaggcagggcgatgtctgccatccgtggccatttgcaaagaccccaaagacccctgttctggttccctctctcccccatgaatatcctctcacacacatgtacatgcgaacacacacaacacgcacctcgtgagacccgggacctgccccggacccccagttcctgggttgaacgaccacatcatgccacggtgcttgctcaggggaagccacgctccctctgtggggcctgctggggcctgggagccccccactgagcccacaatgccacggaaatccttgttggctgcccccgagaggggccttcccagctgggaagagctcagagctgacagctgcctcctgccatgtcaaggccccccaaagagcctcaggggctctggggccctggagggtggggttggggggtgggactctcctcccccactcctgctccctctcccttttcactgttgctttctatgtatagctccctagacctttcacttttttaaaaacgcgttttgtgtagagaataaggaacgtggatctttttattttgcaatcctgggccagctagaagccaggagctgattgaccttttaacttttttcagtggccacattttggttatcgatgtacctagaagtatgtaaattagattaaatttctcttctggaaac

SEQ ID NO: 17478 - protein, 489 aa, Homo sapiens
MFPGLAAPSLPKKLKPEQIRVEIKREMLPGALHGELHPSEGPWGAPREDMTPLNLSSRAEPVRDIRCEFCGEFFENRKGLSSHARSHLRQMGVTEWSVNGSPIDTLREILKKKSKPCLIKKEPPAGDLAPALAEDGPPTVAPGPVQSPLPLSPLAGRPGKPGAGPAQVPRELSLTPITGAKPSATGYLGSVAAKRPLQEDRLLPAEVKAKTYIQTELPFKAKTLHEKTSHSSTEACCELCGLYFENRKALASHARAHLRQFGVTEWCVNGSPIETLSEWIKHRPQKVGAYRSYIQGGRPFTKKFRSAGHGRDSDKRPSLGLAPGGLAVVGRSAGGEPGPEAGRAADGGERPLAASPPGTVKAEEHQRQNINKFERRQARPPDASAARGGEDTNDLQQKLEEVRQPPPRVRPVPSLVPRPPQTSLVKFVGNIYTLKCRFCEVEFQGPLSIQEEWVRHLQRHILEMNFSKADPPPEESQAPQAQTAAAEAP

SEQ ID NO: 17479 - DNA, 2702 bp, Homo sapiens
aaatgctcggtgctttaaatttgcaattaccatatttgcagaaacttgaaaaatcatcccaattaaatgacaaaatgtataggaggattatctttcttttgcccttacaactcaaattatattcgaagtaacatttttacagcagtcaaaacttttaaccaaaactcacacctgcagtctcataagtttaacaaaatggccacattccacgctttattttcttaacaaccctgactgtttaaatgactcccattgaaccaacagcttacagttgctgggcaataaaaaagcgagcaaaaggacctccagccctgctgttttagctattacccagcactctcagagtttgctctagtctggctgttcaatcaaattcattttccagtagcttctggcctttgtctcctctttctggccacgcatttcattgcctcctgaatttgatgacaacattttctttcttcactttgaatcttggcccagaatctcactctcccagccccatggaaagatggggaaaagatttcattctgctgatcaaatttgttagaagacattctttagagtctgaaaaaatatatttcattagcagttctctaggtagtggaatttttagtgatgtttactcttttttccttgttctaattttcctctaataaacagaaaaaaagcaagagtaacccaccaaatttggataaagggcttctgcttttcatattctcttcaaccagaacagcttaacttttctccatttatttatttaagtatttattcatatttgaaacaggctggggtgcagtggcatgatctcagctcactgcaacctccacctctcgggtacaagtgattctcctgccttggcctcccaaagtgctgggattataggcgtgagccaccgcacctggccttaatttgatttttattatccacaacactcatatctctttttgatcctactgtaatatcacattatcctacctaaagatgaattgttccaaccctgatgctttggtaatcatcttttctaaattaaaaattgaggccaggtgcagtggctcaggcctgtaatcccaacactttcggaggacgaggcaggtggatcgcttgagatcaggagtgagagaccagcttggccaacatggtgaaaccccatctctactaaaaatgcagaaaaattagctgggcatggtggtgcatgcctgtaatcctagctacttgggaagctgaggcacgagaatctcttgaacccgggaaggagagattgcagtgagccaagatcatgccactgcactccagcctgggtgacagaacgagaccctgtctcaaaaaaagaaaaaaaaaaaagagagagagagatttgtaatctagcaaaatatgttatttacttattttctttccaacttttagtgtgggcccaagcgggtacctgtgcaggtttgtttcacgagtaaattgtgtgtcatgggggtttgttttacagatgattttgttactgagataatcagcataatatgtgatatgtagttttttaatccttaccctcctcttatctccaccctcaggtaggccccagtgtctgttgttcccttctttgtgtccatgtgtactcaatgtttagctcccacttataagtgagaatatgcagtatttggttttctgttcctgcattaatttatttagagatcttttatttaaatacatgaattcattttcaggaaaagccttccagagatataaaagtcaaaatccaataaaagaatgacctttgttatggaaaaacaaagaaagaaagaaatcaggtcttttttggaaaatctgggacattgaattgttacacgtaacatgtgtccccctagggacataggtcactttcagtatttgccaaagcattaggtcagccagacatgtgaaacatctcggagcttaataactgagctgcttcaatgtgttttgataaaagtttaaattctctggccccaatttattgaacacatgcctttgacaatacagcatttctttcttaggctattagtgaaagattaaccatctactcagtgattgttattgtgcctgtatgtgtgcagtatgaacagttatgtaacaaaactgcaaagattagagacctttaaaaggatctggggaaataggaagagtctataatcttataggaaaggaatgattatgcaagcaactaagtgtgtcaatattctctgcttcacaaacaaattggaaaccagtggtaaactttagatcagaaacagaaactcaaaaaatgaaagaactggccatgagcagtggctcaggcctgtaatcccagcactttgggaggtcgaggcaggcggatcacctgaggtcgggagtttgagaccagcctgaccaacacggagaaaccctatctttactaaaaatacaaaaaattagacaggcatgatggcagatgcctgtaatcccagctacttgggaggctgaggcaggagaatcacataaacccaggaggtggaggttgtggtgagcctatgttgcgccattgcacttcagcctgggcaacaagagcaaaactctgtctcaaaaaaagaaaaaagaaaaagaaaagaagaaaaagaaagaacctagaaacttagaggtcaactaaggagacaggcatttttataaaaagagttgaaagaaatttgtggtagaataacagaaaatacagacaagtt

SEQ ID NO: 17480 - DNA, 2231 bp, Homo sapiens
  CDS (88)..(1443)
agtgctacgcggaggattagagcaggcggtgcgctgggggcgggagcagcgcggagcccggctcggccacaccgatcgcccgccgccatgggctcctcgcaaagcgtcgagatcccgggcgggggcaccgagggctaccacgttctgcgggtacaagaaaattccccaggacacagagctggtttggggcctttctttgattttattgtttctattaatggttcaagattaaataaagacaatgacactcttaaggatctgctgaaagcaaacgttgaaaagcctgtaaagatgcttatctatagcagcaaaacattggaactgcgagagacctcagtcacaccaagtaacctgtggggcggccagggcttattgggagtgagcattcgtttctgcagctttgatggggcaaatgaaaatgtttggcatgtgctggaggtggaatcaaattctcctgcagcactggcaggtcttagaccacacagtgattatataattggagcagatacagtcatgaatgagtctgaagatctattcagccttatcgaaacacatgaagcaaaaccattgaaactgtatgtgtacaacacagacactgataactgtcgagaagtgattattacaccaaattctgcatggggtggagaaggcagcctaggatgtggcattggatatggttatttgcatcgaatacctacacgcccatttgaggaaggaaagaaaatttctcttccaggacaaatggctggtacacctattacacctcttaaagatgggtttacagaggtccagctgtcctcagttaatcccccgtctttgtcaccaccaggaactacaggaattgaacagagtctgactggactttctattagctcaactccaccagctgtcagtagtgttctcagtacaggtgtaccaacagtaccgttattgccaccacaagtaaaccagtccctcacttctgtgccaccaatgaatccaactactacattaccaggtctgatgcctttaccagcaggactgcccaacctccccaacctcaacctcaacctcccagcaccacacatcatgccaggggttggcttaccagaacttgtaaacccaggtctgccacctcttccttccatgcctccccgaaacttacctggcattgcacctctccccctgccatccgagttcctcccgtcattccccttggttccagagagctcttctgcagcaagctcaggagagctgctgtcttccctcccgcccaccagcaacgcaccctctgaccctgccacaactactgcaaaggcagacgctgcctcctcactcactgtggatgtgacgccccccactgccaaggcccccaccaccgttgaggacagagtcggcgactccaccccagtcagcgagaagcctgtttctgcggctgtggatgccaatgcttctgagtcaccttaactttgaaccattctttggaattggcgtggtatatttaaccacgggagcgtgtctggaaacgcaaactatcattaatttcatactagtttgtaccgtatctgtaggcatcctgtaaataattccaaggggaaaactaaacgaggacgtgggttgtatcctgccaggttgagtggggctcacacgctagggtgagatgtcagaaagcgcttgtattttaaacaaccaaaaagaattgtaagggtggcttgctgccaggcttgcactgccgttcctgggggtgtgcatcttcgggaaaggtggtggcggggcgtccactaggtttcctgtcccctgctgctccttccgtaagaaaatgaaatattctatgcctaatactcacacgcaacatttcttgtactttgtaagtcgtttgcgagaatgcagaccacctcactaaactgtaaacggtaaagagatttttacttttggtctccgtgagtcgcatctctactaaggtttacacaggaattccacctgaagacttgtgttaaagttctacagcgcgcactgttaactgaacgtctttttcttcagcctatacgcggatccttgttttgagctctcagaatcactcagacaacattttgtaactgctgctgtcgctttctacatacaccttataaagtgacatttcaaaagaaataaggtgccacagttttaaaccagaaggtggcactctgtggctccttgtagtattatagctatactgggaaagcatagatacagcaataaagtacagtaatttt

SEQ ID NO: 17481 - protein, 452 aa, Homo sapiens [sequence omitted]

SEQ ID NO: 17482 - DNA, 2583 bp, Homo sapiens
  CDS (178)..(1599)
ccatatgccgccccggagctgtttcagggcaagaagtacgacgggccggaggtggacatctggagcctgggagtcatcctgtacaccctcgtcagcggctccctgcccttcgacgggcacaacctcaaggagctgcgggagcgagtactcagagggaagtaccgggtccctttctacatgtcaacagactgtgagagcatcctgcggagatttttggtgctgaacccagctaaacgctgtactctcgagcaaatcatgaaagacaaatggatcaacatcggctatgagggtgaggagttgaagccatacacagagcccgaggaggacttcggggacaccaagagaattgaggtgatggtgggtatgggctacacacgggaagaaatcaaagagtccttgaccagccagaagtacaacgaagtgaccgccacctacctcctgctgggcaggaagactgaggagggtggggaccggggcgccccagggctggccctggcacgggtgcgggcgcccagcgacaccaccaacggaacaagttccagcaaaggcaccagccacagcaaagggcagcggagttcctcttccacctaccaccgccagcgcaggcatagcgatttctgtggcccatcccctgcacccctgcaccccaaacgcagcccgacgagcacgggggaggcggagctgaaggaggagcggctgccaggccggaaggcgagctgcagcaccgcggggagtgggagtcgagggctgcccccctccagccccatggtcagcagcgcccacaaccccaacaaggcagagatcccagagcggcggaaggacagcacgagcacccccaacaacctccctcctagcatgatgacccgcagaaacacctacgtttgcacagaacgcctgggggctgagcgcccgtcactgttgccaaatgggaaagaaaacagctcaggcaccccacgggtgccccctgcctccccctccagtcacagcctggcacccccatcaggggagcggagccgcctggcacgcggttccaccatccgcagcaccttccatggtggccaggtccgggaccggcgggcagggggtgggggtggtgggggtgtgcagaatgggccccctgcctctcccacactggcccatgaggctgcacccctgcccgccgggcggccccgccccaccaccaacctcttcaccaagctgacctccaaactgacccgaagggtcgcagacgaacctgagagaatcgggggacctgaggtcacaagttgccatctaccttgggatcaaacggaaaccgccccccggctgctccgattcccctggagtgtgaagctgaccagctcgcgccctcctgaggccctgatggcagctctgcgccaggccacagcagccgcccgctgccgctgccgccagccacagccgttcctgctggcctgcctgcacgggggtgcgggcgggcccgagcccctgtcccacttcgaagtggaggtctgccagctgccccggccaggcttgcggggagttctcttccgccgtgtggcgggcaccgccctggccttccgcaccctcgtcacccgcatctccaacgacctcgagctctgagccaccacggtcccagggcccttactcttcctctcccttgtcgccttcacttctacaggaggggaaggggccagggaggggattctccctttatcatcacctcagtttccctgaattatatttgggggcaaagattgtcccctctgctgttctctggggccgctcagcacagaagaaggatgagggggctcagcgggggagctggcaccttcctggagcctccagccagtcctgtcctccctcgccctaccaagagggcacctgaggagactttggggacagggcaggggcagggagggaaactgaggaaatcttccattcctcccaacagctcaaaattaggccttgggcaggggcagggagagctgctgagcctaaagactggagaatctgggggactgggagtgggggtcagagaggcagattccttcccctcccgtcccctcacgctcaaacccccacttcctgccccaggctggcgcggggcactttgtacaaatccttgtaaataccccacaccctcccctctgcaaaggtctcttgaggagctgccgctgtcacctacggtttttaagttattacaccccgaccctcctcctgtcagccccctcacctgcagcctgttgcccaataaatttaggagagtccccccctccccaatgctgaccctaggattttccttccctgccctcacctgcaaatgagttaaagaagaggcgtgggaatccaggcagtggtttttcctttcggagcctcggttttctcatctgcagaatgggagcggtgggggtgggaaggtaaggatggtcgtggaagaaggcaggatggaactcggcctcatccccgaggccccagttcctatatcgggccccccattcatccactcacactcccagccaccatgttacactggactctaagccacttcttactccagtagtaaatttattcaataaacaatcattgacccatgcctactcc

SEQ ID NO: 17483 - protein, 474 aa, Homo sapiens [sequence omitted]

SEQ ID NO: 17484 - DNA, 2194 bp, Homo sapiens
ttttccgccatctttccgcgccgccacaatggtgcgcatgaatgtcctggcagatgctctcaagagtatcaacaatgccgaaaagagaggcaaacgccaggtgcttattaggccgtgctccaaagtcatcgtccggtttctcactgtgatgatgaagcatggttacattggcgaatttgaaatcattgatgaccacagagctgggaaaattgttgtgaacctcacaggcaggctaaacaaggttggagtgcagtggcacgatcttggctactgcaacctctgtctcccaggttcaagcgattctcctgcctcagcctccctagtagctgagattacagtgtggggtgatcagccccagatttgacgtgcaactcaaagacctggaaaaatggcagaataatctgcttccatcccgccagtttgggtaagttggcctttccttaattaaaagaagttaatgctaagaatttctgtggtgcagtttgacttaagggtttttttctttttttctgtttaaaacaaagcagtggtaatttgtctactcttaaccattttgacctaatagctcaagtgttatccatatttcttttctctctctttaaaaagagacagggttggccaggcacagtggctcacgcctgtgatcctagcattttgggaggctgaggcaggcggatcacctgaggttgggagttcgagaccaccctgaccaacatggagaaccccgtgtctacctaaaatacaaaattagccaggcctggtggcacacacctgtgatcccagctacttgagaggctgaggcaggaaaatagcttgaacccgggagagaggttgcggtgagctgagattgtgccattgcactccagcctgggcaacgagtgaaactctgtctcgagaaaaaagagagagagacagggtttcactttgttgcccaggctggagtgcagtggctgttcacaggtgcggtcataacacgctacagccttggcttcttggcctcgagcagtcctccccgctcagcctcttgtggatttgggaatacaggcgcctgccaccgtgcctggctatttgccacatttcatgtgttgagcttcaggttctgagaggcacatgagagcttagactggcagaaaaggggggtcgtgtccactttcatgtctgcccttttggctcactgcagatagttccctgtgatcccagatgagggccagaatcagttctaagcctaggcctttgggaaaacttagtttgggagtctttgtccttaaaagcctatctgagttcaaacccttgtttttctgctttaaagccatgagatcttgggcaagtcacagccttgatttcttcatccgtaaaagtggtaatagttcctctgtttatcacctgatttaattttggtaaagcactttatgagctgacacagtaaatgtgtatctttgtggttaagaatttataccctccaaattatgcgtctggtgccttggttgaaagtattctcacttcatggttgctgtattacaggtacggtattctcaccaaaatcatttctctttgtaattatgatactgattttaatgccgcacatttgcatactatatgcttgttacagtgatccccacagtaactcatgaagcagccactcattgtacaaatgaacgtctccatataatagtttagctattatacagtacatggcagaaacacaattcaaactcaagtttatacgaatactttcaagtctccttacctgagagcagaaagtgacatttaaatttaaaggagttcccagcctttgttttcagtgcagtttgtttcatggtgtaggcagaagtcagggctgtgtgattgtgtggctgggctctctggatttggctctttgggttgcaggagtcatggctcatacgctacatgaggcaccagctcatgtaggcactgtcagttcctatgtgccccacaggaaagcgcccttaaccactgatgagtgttgatgtttttctgcactagaaggcactatgttgaactattaaacttaccagcactttctttttccactccatagtttcattgtactgacaacctcagctggcatcatggaccatgaagaagcaagacgaaaacacacaggagggaaaatcctgggattctttttctagggatgtaatacatatatttacaaataaaatgcctcatggac

SEQ ID NO: 17485 - DNA, 2561 bp, Homo sapiens
  CDS (141)..(2549)
agacgacgtagcagccatcttttccctggctttggtgattcagccctgacttctcaaaaagcactgcacagaggaggaggcagcagaaccccacttcagcttcttaggactctgcacttccccagaaggaagaattaaaaatgaatatgttcaaggaagcagtgaccttcaaggacgtggctgtggccttcacggaggaggaattggggctgctgggccctgcccagaggaagctgtaccgagatgtgatggtggagaactttaggaacctgctgtcagtggggcatccacccttcaaacaagatgtatcacctatagaaagaaatgagcagctttggataatgacgacagcaacccgaagacagggaaatttaggagagaaaaatcaaagtaagttaattactgttcaagacagagaatcagaagaagagctttcttgttggcaaatctggcaacaaattgcaaatgacttaaccaggtgtcaagactccatgatcaataattctcagtgtcacaaacaaggtgatttcccttaccaggtagggacagaactgtctattcaaatttctgaagatgagaactatatagtaaataaagcagatggtcccaataatactgggaatccagagtttcctatcttgagaacccaggattcttggaggaaaacattcctgactgagtcacagagattgaacagagatcagcaaatttccataaaaaataaattatgtcaatgtaagaagggtgttgatcccatcggttggatttcacatcatgatggtcatagagtacacaaaagtgaaaaatcttatagacccaatgattatgaaaaagacaacatgaagattttgacatttgatcacaatagcatgattcacacaggacagaaatcgtaccagtgtaatgagtgtaaaaaacccttcagtgatctctccagctttgatcttcatcagcagttacaatcaggagagaagtctcttacatgtgttgagcgtggaaaaggcttctgttacagcccagttcttcctgttcatcagaaagtacatgtgggagaaaaacttaagtgtgatgagtgtggtaaggaattcagtcagggcgctcatctacagacccatcagaaagtccacgtgatagagaaaccatacaaatgtaagcaatgtgggaaaggtttcagtcgtagatcagcacttaatgttcattgcaaggtccacacggcagagaaaccttataattgtgaggagtgtgggagggccttcagtcaggcctctcatcttcaggaccatcagagactccacactggggagaagccattcaaatgtgatgcatgtggtaagagcttcagtcggaattcacatcttcaatcccatcaaagagttcatacaggagagaaaccatacaaatgtgaggagtgtggtaagggcttcatttgtagctcaaatctttacattcatcagagagtccacacaggagaaaaaccctataaatgtgaggaatgtggtaaaggctttagtcggccttcaagtcttcaggcccatcagggagttcacactggagagaagtcatacatatgtactgtatgtgggaaaggctttactctgagttcaaatcttcaagcccatcagagagtccacactggagagaagccatacaaatgcaatgagtgtgggaagagcttcaggaggaattcccattatcaagttcatctagtggtccacacaggagagaaaccctataaatgtgagatatgtgggaagggcttcagtcaaagttcgtatcttcaaatccatcagaaggcccacagtatagagaaaccttttaagtgtgaggagtgtgggcagggtttcaatcagagctcacgacttcagattcaccagctgatccatacgggtgagaaaccatacaaatgtgaagagtgtggcaagggatttagtcgtagagcagatcttaaaattcactgtaggatccacacaggagagaaaccatataattgtgaggagtgtgggaaggtcttcaggcaggcctcaaatcttttggcccatcagagagtccacagtggagaaaaaccattcaaatgtgaagaatgtgggaagagtttcggtcggagtgcacatcttcaagcccatcaaaaagtccacactggagataagccatacaaatgtgatgagtgtgggaagggcttcaagtggagcttgaaccttgacatgcatcagagggtgcacacaggagaaaaaccatataaatgtggggagtgtggtaagtacttcagtcaggcctcaagtcttcaacttcatcagagtgtccacacaggagagaaaccatacaaatgtgatgtgtgtggtaaagtcttcagtcggtcttcacaactacagtctcatcagcgagttcacactggggagaaaccttataaatgtgagatatgtggtaagagcttcagttggcgatcaaatcttacagttcatcacagaatccatgttggtgataaatcctataaaagtaataggggtggtaagaacatcagagaatccacacaggaaaaaaaatctataaaatgattctttgtg

SEQ ID NO: 17486 - protein, 803 aa, Homo sapiens
MNMFKEAVTFKDVAVAFTEEELGLLGPAQRKLYRDVMVENFRNLLSVGHPPFKQDVSPIERNEQLWIMTTATRRQGNLGEKNQSKLITVQDRESEEELSCWQIWQQIANDLTRCQDSMINNSQCHKQGDFPYQVGTELSIQISEDENYIVNKADGPNNTGNPEFPILRTQDSWRKTFLTESQRLNRDQQISIKNKLCQCKKGVDPIGWISHHDGHRVHKSEKSYRPNDYEKDNMKILTFDHNSMIHTGQKSYQCNECKKPFSDLSSFDLHQQLQSGEKSLTCVERGKGFCYSPVLPVHQKVHVGEKLKCDECGKEFSQGAHLQTHQKVHVIEKPYKCKQCGKGFSRRSALNVHCKVHTAEKPYNCEECGRAFSQASHLQDHQRLHTGEKPFKCDACGKSFSRNSHLQSHQRVHTGEKPYKCEECGKGFICSSNLYIHQRVHTGEKPYKCEECGKGFSRPSSLQAHQGVHTGEKSYICTVCGKGFTLSSNLQAHQRVHTGEKPYKCNECGKSFRRNSHYQVHLVVHTGEKPYKCEICGKGFSQSSYLQIHQKAHSIEKPFKCEECGQGFNQSSRLQIHQLIHTGEKPYKCEECGKGFSRRADLKIHCRIHTGEKPYNCEECGKVFRQASNLLAHQRVHSGEKPFKCEECGKSFGRSAHLQAHQKVHTGDKPYKCDECGKGFKWSLNLDMHQRVHTGEKPYKCGECGKYFSQASSLQLHQSVHTGEKPYKCDVCGKVFSRSSQLQSHQRVHTGEKPYKCEICGKSFSWRSNLTVHHRIHVGDKSYKSNRGGKNIRESTQEKKSIK

SEQ ID NO: 17487 - DNA, 2717 bp, Homo sapiens
  CDS (474)..(2357)
acttaaaagtgaggggaaaactgagacaacaatgcaagtgggtaatagtcaaacaaaagttaaaggtgaagattcaaaaaatataccattggagaaagaaacaagaaaatcactggtttcagattcaggtggacaaaggacaagtgataaaatccaagaatatccacagctcagagaagaaacgatctagccctgctatttcagatctttcacagatccttaagtctcaagatgaatcagcatttttagagagttcaaatgaagtttcagttgctgaaaaccaatcctataaatctccatcagagacccatgataaatcacttacaacagtatcatccagcaaagaagttcaagattcactgtctgttggaacattggctcaaaaaaacgaaacagtgatatcaccattcattttacctcctgttcttacagaaagtaaaaaggctgatgtttcagaagaacaattacaaaagatgactgaagaacaaacttaccaagcagcagaaaaatctcaagctcataatgaagtaccaaatgaaaggcttgtagttgagcatcaagaatcattgtcaaaaaccaaattacaagtaaagaaacaagaaacttctacagagcaaccactcaccactcctgataaagaaccaaatgaaaatcttatacttaggcatcaagactcaatgtcaaaatcagaaatgcaagtgaaggaacaaagaactctcaaagggcaaagaattattactcatgatgaagaaccaggcaaaaatcttgtgcctgaacatcaagattcagtgtcaaaactggaaatgcaaattgaaaaaaccaaaaaacttcctagagagaaaagacatagtactcatgatgaagaatcaggtgaaaatcctatgcttaaacatcaagattcagtgtcaaaaatccaagtgcaattagagattcaagaaacttctgaaggagaaggacgtagcataccagataaaaattctatgtttgttcatcaagattcagtgtcaaaactccaaatgcaagaaaagaaaaaaataactcctggaagggaaaggcgtaatactcgtattgtagtaccaaatgaaagtgtgatttctgttcatcaagattcaaagtcaaaactccaaatgcaagaaaagaaacaaataaattctggagtggaaagacacaagacgtttcctttagaaatcaaaaaaaaggatatatcacttgaacatctgttgcctgaggagaaagttttattatcaagaagcgaatctcaaaccaagaaacttcaagctaaagtaacttcaagaaaaaagactgatatagaaagcttgagaggtgctttgggaagacgcttattaaatgatgaattcaagacacagtcaaagagtttccctgggcctgatatagaacaattgacagatgcatttggaagagatatactaaaggatgaattcaagacacgatcaaagagtctccctgagactgatgaacgattgcatagtacaactgagagaggtacaataaatgatgcaattaagacgcagttaaagagaaagagttaccctgagactgtcttaaaacacttgaaaggtgttaatggaaaagatataataaagcatctaatcaacatacagtcaaagagtcatgcagagactgataagaacttctttgcctatgctactggaagaggtctaatgaaggagtcaaccacgacacaattaaaaagtcacccagagactgataaggaattcttggcagatgctattggaagaggtataataatagggccaatcactacacaactgaagagtcaccgagagactgataaagaactcttaaaagatgctattggaagagatataataaagggaccaatcagtgcacaattaaagagtcaccaggagactgatgtagaacccttgacaaatgccattggttcaagtaaaacaattggtgagataaagacacaactaaggactcactatgatgtgaacttatttaaaaacaaagatatgtccgtacaacgtcaagaaggtatctttactaggagcattacaccaagtaaattcccaacaaaagtgatcaatttatcaccctttgaaaataaagaggaaacttatgagtactcttcaccctatgtgactgcaccttcaaaagcaatttatagaacatatagggctggtccaagcttttctaaagacatccaccttcctttactgaatcaactcccttcagggcattcgaaagttgttaccttaagccaaaaaactattgaatttactctgcctactgtgaccaatacaattggaaaacctacctataaagtgttacatgctgctgcccgaaaatctgtaccacacccatacttttgagaatgaaggaaattctgagcaagataagcaacatgacaaattcagaaatgcaggaaaggaaatcgcaagtatagaagccttttgaaaataatactgactcgtgtggatggtgcttattgaaaaacagctggaaatacagtggatcaacagggtaggcccagatcacagaaggcctgaccaggcagtgaatgtgtctttaccatatggaacaattttgaacttctaagatcaagcctttttgttgctgagggtaagaaaggagctctgtgatgaggttccagcttacttctattcgccagtgtccctgtaatgctttctggtgtgatgtaaaatcaattaaacaaaacttgtgctctg

SEQ ID NO: 17488 - protein, 628 aa, Homo sapiens
MTEEQTYQAAEKSQAHNEVPNERLVVEHQESLSKTKLQVKKQETSTEQPLTTPDKEPNENLILRHQDSMSKSEMQVKEQRTLKGQRIITHDEEPGKNLVPEHQDSVSKLEMQIEKTKKLPREKRHSTHDEESGENPMLKHQDSVSKIQVQLEIQETSEGEGRSIPDKNSMFVHQDSVSKLQMQEKKKITPGRERRNTRIVVPNESVISVHQDSKSKLQMQEKKQINSGVERHKTFPLEIKKKDISLEHLLPEEKVLLSRSESQTKKLQAKVTSRKKTDIESLRGALGRRLLNDEFKTQSKSFPGPDIEQLTDAFGRDILKDEFKTRSKSLPETDERLHSTTERGTINDAIKTQLKRKSYPETVLKHLKGVNGKDIIKHLINIQSKSHAETDKNFFAYATGRGLMKESTTTQLKSHPETDKEFLADAIGRGIIIGPITTQLKSHRETDKELLKDAIGRDIIKGPISAQLKSHQETDVEPLTNAIGSSKTIGEIKTQLRTHYDVNLFKNKDMSVQRQEGIFTRSITPSKFPTKVINLSPFENKEETYEYSSPYVTAPSKAIYRTYRAGPSFSKDIHLPLLNQLPSGHSKVVTLSQKTIEFTLPTVTNTIGKPTYKVLHAAARKSVPHPYF

SEQ ID NO: 17489 - DNA, 2659 bp, Homo sapiens
atagcacttttaggaaactgattattgtaaatgtttaattttgtctcaaatatagttggcattggaagtttagcctttacttgaatgtatactgtagatttttaacaaagcgagttctatatttattatgtttagtgtggtttgaaattacctctttcatatgttttaaataaagtgaaatttatgtatgttttgtacatagatacacatgattatgttaagaggctttaagatttaaaagtttcacacaaccataagtatagtatttcatgccagtaaaatttttttagtggtattctgtttacagatgtattaggaccattgatgcattacatttaagaattctctttaatacatctgggcaataaatattgaaaggtattccatgaagctgagttctttagataatcaacattactaacattacatttttgagatttttatgacattagatttttattttgtatatgtagaatattataatttttaaaaggactattgatgatagaagaataggggcaagacgacaaaagtacctttgaataaaacaatttaagaaattggtttaagatattggatgatagaagacatttaagatatctagatggtgatattttccttacaagatgggtaccagtatagtaatatctgtatactaactagggctttgtattgtcaataattttttaataattttttaatgaggtatttaccactgaagaaatatgataatgtaaaaccatcaaattttataattgagatgatactctggaaaaacatgtcatttcattttcagaaaactcttaagctctcttcagtctctgtaatgtttctgattgcatgtttcttcatgaaaagtatgttgttgttttgatagtaataataataaatgtaggctcagctctttcccaggattttcatcaaaaagctttaagtgcctaaccctgcttgtctctgtacatagaagcctgcacagatccaacccttgctaggtatcatagtttaggcccatttaccttcccctgtactggcagttcagccgcttacatgcactcaccctgtttgtggctattttaaattcatattattaaaaaacaaaaaaaacccacctatttgtgttgtccattcactatacgtaactatgtaactctttggagttgcatagcagcagccattttttcagggctgataggatatcattaagagtgtcttatgagacattagtggatatactcatagtaaccatatttatagttttaaagagctagctcttgagcattagtcactaccttcagcttgatgcatggtcacttctttactatttaaaatactacacattgtacaaaatatcgaagacactaccatatgctaaaggaagaaatctagctgggatataggatttttgttgtttttgtttttgtttgttttgctatttagcaataacatggtcaaaaaggcaatcagaaattttaaatacagttaatggatacatttggcaacaattttcccccgagggttttccatggtgtactttgcaagaaataagcactctaatttttaaagtaaatctcttattttagcaaatattatatttcatgacaatggagttctagaaagcagcatctgttttttgttgcgtgtttccattttaaagtgagttgagttctcaaattggaaagaaagattccttgagacgtacttttaaaatctaaagtgtgaaagaaacagcagagtaaaagccagactcattgcaccttcaatgtctgcatagatccagaagttgtacattttacctaacaacatcacttttgttgaacattccaactccagaatgatccccaatcaccctaatctcagaatgctggaatgatgtctgttggaaaacccaggactccacacacaaaactcctgggattttgtttcccatctctttctaggtgtttgcaatgtacaaataatacagctgtgctaatctcacatttagccatgatagatgatggttctagagtgtacttccatttgtaagtcctcctgataagtgctttcttgtttatcactatgtaaatctgaaatattttgtacttcatttgtttttatccattctgaattttcaaagcataaaaatgtcaaagaaaaattgagataaacattttgttcaccattaaatgtttgcatctgcagtctatgatgagaaacaatgaaattatgactaaaatttaacaaatagtattttcttatagaagcaatgtattaaatgattagatacacaggacagttcacagcaaattgtttacttacatggcataattgaaatactgttatttgtaaagagttctatactgcctaccttagctaaccagaattgttcatagacttgtgataatatggtgttatgggaaaacacattttgtgcgcatgatgaagagagcaccgtgaatctagtcttgactgcccctggtggaacatttgaaagcccttgggactccaggagagatgtttttgcagcatgtatgctaaatttgtgagttagcaagaccctgctgtgattactatgttgtacagatcttcaaagtatattgcctaatatgagtcatgttatttctagattgaatttaaagtaagtatggattatggaagtctagtaaatatacttttccct

SEQ ID NO: 17490 - DNA, 2466 bp, Homo sapiens
  CDS (13)..(1800)
acaaaagtaactatgtttccggtagcccctaaaccccaggattccagtcaaccatcagacagactcatgactgaaaaacagcaggaagaagcagaatgggaaagcataaatgtgctattgatgatgcatggcttaaaacctttgtctctagtcaaaagaacagacaaagatctcatcatttttgacaaacagtcatcacaaaggatgagacagaatttgaaattgttggtggaagaaacatcatgtcaacagaacatgatacaggagcttatagaaactaatcaacagcttagaaatgaacttcagctagagcaaagccgagcagccaatcaagaacaacgagctaatgacttggaacaaattatggaaagtgtgaaatccaaaattggtgaattggaggatgaatcactaagtagggcttgccaccaacagaataaaataaaagatcttcaaaaggagcagaaaactttacaggtgaagtgccagcattataagaaaaaacgaacggagcaagaagaaactattgcttctttgcaaatggaagtctgtagattaaaaaaggaggaagaagatcgcattgtcactcaaaacagagtgtttgcctatctgtgcaaaagagttcctcataccgtcttggatagacagttgctttgtctaattgattactatgaatctaaaattagaaaaattcatacacaaaggcaatataaagaagatgaaagtcagtcagaagaagaaaacgactacagaaatctggatgcctcaccaacttataaaggccttttaatgtcattacagaatcaactcaaggaatcaaaatctaagattgatgcactttcaagtgaaaagctgaacctccaaaaagatttggaaaccaggcctacacagcatgaattaagactttataaacagcaggtgaagaagctggaaaaagcccttaagaaaaacgtcaaattacaggagcttattaatcataagaaggctgaggacacagagaagaaagatgagcccagcaaatataatcagcaacaggccctaattgaccagagatactttcaggtgctgtgtagcatcaattcaattatccacaatccaagagctccagtaataatttataaacggaccaaagggggagtccaaaattttaataaagatcttgttcaagattgtggatttgagcatcttgttcctgtaatagaaatgtgggcagatcaactgacatccttaaaggatttgtataagtccttgaaaacactatctgcagaactggtaccttggcttaatttgaagaagcaggatgaaaatgaaggtatcaaagttgaagatttgttgtttatagtagatactatgctggaagaagttgaaaataaggaaaaggacagcaatatgccacactttcaaactttgcaagctattgtttctcacttccaaaagttatttgatgtgccttctttaaatggagtctatccccgaatgaatgaagtttatactaggcttggagaaatgaacaatgctgtgagaaacctccaagaactcttagaattagatagttcatcctcattgtgtgtgctagtaagcactgttggaaaactctgtaggctgattaatgaagatgtgaatgagcaggttatgcaggtattaggacctgaagacctccagagcattatctacaaattggaagaacacgaggaatttttcccagcatttcaggcatttactaatgatctacttgaaatcttagaaattgatgacttggatgccattgtacctgcagtaaagaaattaaaagtactttcatactgaaatcaaatcatttttactgtgtaaattgtattcttaacattttgtattttgtaggattgatcttattttgagacaagggttgtaaaatgtatttgctctcagaattcatccccttcttagtattaggtcattcttcatctgtataatttttattaactttgagattcttatacagaaaatagttgcaagggtaaggtaattaactttagatcccttcatttctaaagcaattattgagtgcttaaaatttaaggttgttttagagtggagtttgtgagtaaaagaggagcccagggagacagattgcaagtagtaggttgcaatcttttagattcagcttgtaataatctttgagccacaccaaaaggaatgccaagggctctctaaatttagccagtaggaagctactgctctcctggcaaggattaattggcacattctgttaagatatccctcatgacagttgccctttcaaagcaggaggaagaaaaggaagaaagaaaaactgtttcatcatttctgttagggtaggaaatgaatcatagggtaaaatggatgagtagatagaagtctctcatttaaaaagtgtcttttgcaatcttgatgtaatgcactttttataaggacttgagatctcaaataaaatttctgtaaagaatttcc

SEQ ID NO: 17491 - protein, 596 aa, Homo sapiens [sequence omitted]

SEQ ID NO: 17492 - DNA, 2544 bp, Homo sapiens
  CDS (215)..(643)
gaagatagtgatccggggagacaggaacacgggcaagacagcgctgtggcaccgcctgcagggccggccgttcgtggaggagtacatccccacacaggagatccaggtcaccagcatccactggagctacaagaccacggatgacatcgtgaaggttgaagtctgggatgtagtagacaaaggaaaatgcaaaaagcgaggcgacggcttaaagatggagaacgacccccaggaggcggagtctgaaatggccctggatgctgagttcctggacgtgtgcaagaactgcaacggggtggtcatgatgttcgacattaccaagcagtggaccttcaattacattctccgggagcttccaaaagtgcccacccacgtgccagtgtgcgtgctgggaaactaccgggacatgggcgagcaccgagtcatcctgccggacgacgtgcgtgacttcatcgacaacctggacagcagacctccaggttcctcctacttccgctatgctgagtcttccatgaagaacagcttcggcctaaagtaccttcataagttcttcaatatcccatttttgcagcttcaggtaagcactcaccacgtggggtggagtggctgctggtctctcacctccttccaggtgtctcctgtgtagcaacgggtctccctcctaacccctgagaaagctgtggacctgctcggagattggctgctggcaagggcccagcgttctactgcacctgcctgctctgggtggcagagggtacagggtcctgagggctagacccagtcccaggagcccctccacctctgcggggaccccttgctcagtttcccccagtgtttttggttgtttttgtttgttgagataaggtcttgctgtgtggcccaggctggagtgcagtggcgcaatcatggctcactgcggcctcaaactccggggctcaggcagtcctcccacctgtctcccaaagtgctgggatgccaggcgtgagtcaccgaggtcgctgttcacatctcacatttccctggtgcttgtgtcaaaaccaaggaaccaactttggcctacggactaaactcactttcctttgtagaaacaagggccaggccagctgtggctgcaaagtagcccagcaaatgatgaggcttgaacctcctcgccctgggctgccctgattgggtctgggggacctgaacctcctcgccctgggctgccctgactgggtctgggggacctgaacctcctcgccctgggctgccccagctgggtctggggacctgaacctcctcgccctgggctgccccgcctgggtctggggacctgaacctcctcgccctgggctgccccgcctgggtctggggacctgaacctcctcgccctgggctgccccgcctgggtctggggacctgaacctcctcgccctgggctgccccagctgggtctgggggacctgaacctcctcgccctgggctgccccagctgggtctgggggacctgaacctcctcgccctgggctgccccagctggatctgggggacctgaacctcctcgccctgggctgccccgcctgggtctgggggacctgaacctccttgcctgggctgccccgcctgggtctgggggacctgaacctcctcgccctgggctgccccagctgggtctgggggacctgtacctcctcgccctgggctgccccgcctgggtctgggggacctgaacctcctcgccctgggctgccccgactgggtctgggggacctgaatctcctcaccctgggctgccccagctgggtctggggacctgaacctcctcgccctgggctgccccagctgggtctgggggacctgaacctcctcgccctgggctgccccgactgggtctgggggacctggggcccagctgcagctgcagcagccttggtctttctccagaaggatgtcaggcttgcccaggaaaggggctgtgctgtcgtcctggtgtcagaagaagtgaggatgcctgcaggctgggactgctgctggggacgtttgggttggaaggaaggcggcagtcagacttgtcctgtgccggcactgctggggaggcccctccttcctgcagagccgtcccctcatcactgggttgattactccttagagagctccccactgctcagctgctccattccctaatggtttgccctccaaacccttccaaagcctcccagggagagaacgggaccctggacagagtcttgagctggaagcgtagggctgagctgtgtgtgactatccttttgctatggatgtgttcaagcagatctgatgtcctcgcctgtctcagcagcgggacccctgtttcctctttgtcttgcccctggattgcctggaagcaaatttcaggccttctttatgtcacctaaaaatatttcaaacacatctctaaaaaaatcagttgtttttttaacctgaccgtagtacctaatgtaataccgcatgttaaactcacagaaggtttttcttggagaaataagccacaataacaaattgaaaaaataaaattcccaaagagtt

SEQ ID NO: 17493 - protein, 143 aa, Homo sapiens
MENDPQEAESEMALDAEFLDVCKNCNGVVMMFDITKQWTFNYILRELPKVPTHVPVCVLGNYRDMGEHRVILPDDVRDFIDNLDSRPPGSSYFRYAESSMKNSFGLKYLHKFFNIPFLQLQVSTHHVGWSGCWSLTSFQVSPV

SEQ ID NO: 17494 - DNA, 2729 bp, Homo sapiens
  CDS (712)..(1389)
cggtgctcgaggcggaggggaggaggcggggaaggcgaaaggaggggttcggaggagagggttcgatctccgtacgcaccaggtggagagcgcgcgcctggggaaggaggcgtgtcgagtagcgggagggaagttgtagtacgggtggggagaaccacactaaagggagatgggggtgagcagttaaggaaccgcgagagcgccaggtagagagctgcccttaatgggggaacctggagaagagtgtgagcgtagtggggaagaagggagaagacaaataggttcgggaatgtgtctccgagggcgcgagcgggcgctaggacccggcgtcgaaaagatgaggctttggggctgtcggggcgcgcgctcccgttggtgacgcgggggtggcggaggtctccggccgggacgaagccccgcagggagtggatactcgacagccttcggcctccgctcgcttctccctgcgcgctttcctgctcccctttccggctacagccctggggtcgagctctggtcgaagcgcattccgcctctcctttggccctgcggcttcctttgcaacccgccgcccacccttgctctccgtggtttacccctgggctctgaggcctggtggtagcggccactgccgcggattggctgttgcggacccggggcggggcaggtgggagaggctcgttctccgcgggtttcgttgtgtttcgcgccatgtcgtttgctgagagcgggtggcggtcggctctgcggcgccgcggtcccggcaccccgggccctgtggctcggccatcgtattcctcctttactcagggggacagctggggtgaaggcgaagtcgacgaggaggagggatgcgaccaagtggcccgcgacctgcgggcggagttctcggctggggcgtggtcagagcccagaaagcgctcggtgctcccgccggacgggaacgggtcgcccgttctgcccgataagcgcaatggtatctttcccgcggccgcgggcagcagagcccagcctcggcggtggccggtccaggtcctctctattctctgctcgctgctcttcgccattcttctcgccttcctcctcgccatcgcctacttgatcgttaaagagttgcatgctgagaatttgaaaaatgaagatgatgtagacactggactattaggattctggactctacttataatatccctaactgctggattctcctgttgcagcttttcttggacagtgacttactttgattcttttgaaccaggaatgtttcctcctactcctctttcacctgccaggttcaagaaactgactggacattctttccacatgggctatagcgtggcgattttgaatggcatcgtagctgctcttactgtagcatggtgcctcatgtaaacccacactggagcgatattgttggcaaaacttaatcatgattgttttgtaataacaagaaggagcatcactgtctactcagaagactgagaaacctgctgttcattatgtagttcagatatttatcacaatcatcctcattatggaagaccttttaaagcattgttttagaatgtctgagtattaagatacagattaattgggaatatctgagtattaagtactttcttcagagtataagatgtttacctcatctttttacttttgtgtgtgtagttctttcaagttgtaggaaacattttaatggaatttaaactcaaaaacttgaatacaggacaatgcttgccttttcatgtatgtactacattttttgctaagaaatactgatatttctgtttagttgagctagaaatacttcttatttatacatttaggaaagcaaataatgcctactactccgacttttatagaagctacttttaaatcagaatatttaatttttgatattcatataattaatagaagttgcatttatattttttatggggcatagttccttatgtgtttttttaatgtattttcatactacatactgaatttgtatgtttttaaaattgttacatctagacaactgtaaacattatttttttagctagtgcaaacctagtacctgccatttttactaatttttgtctttaaaaaaagcaaaaaagcacattgacctaagttgaaaattaagtaagtttatttttaacaaaaaatgcctgaaaaaagctaaattatttaagtcattaagatattgagaaaaaatttgaaatttttactatctctgtttccacaattccaaatatttatcttggtgtatatattgttactttaacagaacttgcattattttgtttttaataaatataaacatgaaatttttgtatgtgagaatgattgaactagtttgttcttaatctcaaaaatttagttaccaaagtagaaaaggtattttgatactagatattaaaaactacatatagttaatataattttataatttttgtaattaaatgtgcttctgtaattgtgatattttgttttctaagtaattaagccttaatttttcccctatgttactaaagacttttaatgtttagaaagttacctcagttttagaaagatggactacttacaaagctgttttccctggccataggaaaacttacaataagaaaccattaagtagtcaaactgcttattcaggctaagtgggaaatgaatttgtgcagtgtgttcccttaattatctactgaatgttgttaccgactaaacaaggtttctaaaagtct

SEQ ID NO: 17495 - protein, 226 aa, Homo sapiens [sequence omitted]

SEQ ID NO: 17496 - DNA, 2672 bp, Homo sapiens
  CDS (28)..(486)
agagccgcgggatttgcggccgccgccatgccgtcgtccccgctgcgggtggcggtggtgtgctcgagcaaccagaaccggagcatggaggcgcacaacatcctcagcaaacggggattcagcgtccgatcctttggaacagggactcacgtgaagcttccaggaccagctcccgacaagcccaatgtttatgatttcaaaaccacatatgaccagatgtacaatgatcttcttaggaaagacaaagaactgtatcccagcgggttgccctttaaaaaccccccgtgtggtcctccctggaaggtgttacgtgtggctcgggcacaggaggcgtgtcaccctgtgcagtgcacacactggctcctctgtctttgcgagagcttggtttctattcctggtgcacgtcggatcgtccacgggttagttccagtgccacccatggcagtaggcgtggtgaggcgcacagacacggtgtggggttcaccctgacgtggttcagcagagggtcgtgacatagcgtagaccagggatgcttaggtgaggaggtggaacccacaaaatcccattgcttttcacactgcagggctgccccgttatttcctttgcaggttggtgtgcgtgcgtgtgtgcgtgcgtgcctgatacacatggagccgggctgcttcacacatctggtgaggtcgttagaaggtcagataaagaagagggcggagcttgctaaccaagctgttagaagaaataatgggagagaacattccttcatctcaggaggacacagagcaggctaggtctgccgcgaagactcctatagagagaagagtattcttaaactagattctgatggacgcaacaccagttgcataatggttatgacaatcagtgcccgggtttttgaccaggcatttcatggtcacccccacgctaatggaaagtttctggatcttattttgttatagtgagtgatttgtagttttcagaacggaggccaggccaaacgtattccaaatgaaaagagaataggtgtcaaatgctaaaccttttatcttcgtgttggcactgttgccatccccgccctctcccgacatccccgcccttgaccagcatctctggccttgcccagcattgtctatgtattggcactcttgccatccccgccctttcccagcagagtctcactgtgtcaccccggctggagtgcagtggcgagatcttggctcactgcagactcactgcaacatccacctcccgggttccagtgattctcctgcttcagcctcctgggtagctgggattacaggcacgcgccaccacacctggctaatttttgtatttttagtagtcacagggtttcaccatgttggccaggctggtcttaaactcctgacttcaggtgatccaccctcctcgtcctcccaaagtgctgggattacaggcgtgagccaccatgctcagccctactcttgtatttttttttttttttttttttgagatggagtcagagtctcaccctgttgcccaaggtggagtgtagcggcttgatctcagctcactgcaacctccccctcccaagttcaagcgattctctgcctcagcctcccgaatagctgggattacaggcatccgctgtcatgcctggctaatttttgtatttttagtagagacgggggtttcaccatcttgaccaaactggtcttgaactcttgacctcgtgatccagctgcctcggcctctcagagtgttgggattacaggcgtgagccaccatgcctggcctcttggaatatttaataagctaaaaaattcttatacacaggtagattaattaggtagccaggagtggcccctgaaagtatgtctggcaaaacctagaactgcatcctagccatcactgtaccttctgccctccctgctgtctcctctgccagttacagttaaaaggttgtgggtgaggacgctgggcagagtcccaggcgtctgctgtcagctccccagcccggcctgcctgccgagccatctgggcgtcccacggtggagagtgtggtgcttgtgacgcggtggtgctgggagccatcctggtggcagatgtgggctctcactgcaagtcagtgtaagtccccagggactgtcagcagcacgtcctgctgcccctctctctgcagaagccctggtaacctgcgtttggaaaaatctctaaggatttctgaggagctgtcaggccatgtccttgtccaccctgtgtggggcacggcttcgacatggctctgctcccgtcgtgggctgagaaggagcaggtggggctgtgccttggaaaggaggccctcccgacatgcctttgtgcgaggtccctgtccatgctgtctccatcccggagccttacggcgatgggtggccacagagcctattccaagagtctggtttagggctgggtcttcccatcttcacctctgagtcttaggcgatgcgtgaccacgcagccccttccaggagtctggtttagggctgggtcttcccatcttcacctctgagtcttaggcggtgcatgaccacgcagccccttcccggagtctggtttagggctgcgtgctcaagagtctggtttggggctgggtcttcccatcgccctggaggaggcttttgtctcatctcatgattcacattaaactctgtgccatg

SEQ ID NO: 17497 - protein, 153 aa, Homo sapiens
MPSSPLRVAVVCSSNQNRSMEAHNILSKRGFSVRSFGTGTHVKLPGPAPDKPNVYDFKTTYDQMYNDLLRKDKELYPSGLPFKNPPCGPPWKVLRVARAQEACHPVQCTHWLLCLCESLVSIPGARRIVHGLVPVPPMAVGVVRRTDTVWGSP

SEQ ID NO: 17498 - DNA, 2454 bp, Homo sapiens
  CDS (356)..(2371)
gaaccccaagtccagtttctggaagctggtgcggcacctggaccgcgtggatgccgtgctggtgacccaccctggcgccgacagcctccccggcctcaacagcctgctgcggcgcaaactggcggagcgctccgaggtggctgctggtgggggctcctgggacgacaggctgcgcaggctcatctcccccaacctgggggtcgtgttcttcaacgcctgcgaggccgcgtcgcggctggcgcgcggcgaggatgaggcggagctggcgctgagcctcctggcgcagctgggcatcacgcctctgccactcagccgcggccccgtgccagccaaacccaccgtgctcttcgagaagatgggcgtgggccggctggacatgtatgtgctgcacccgccctccgccggcgccgagcgcacgctggcctctgtgtgcgccctgctggtgtggcaccccgccggccccggcgagaaggtggtgcgcgtgctgttccccggttgcaccccgcccgcctgcctcctggacggcctggtccgcctgcagcacttgaggttcctgcgagagcccgtggtgacgccccaggacctggaggggccggggcgagccgagagcaaagagagcgtgggctcccgggacagctcgaagagagagggcctcctggccacccaccctagacctggccaggagcgccctggggtggcccgcaaggagccagcacgggctgaggccccacgcaagactgagaaagaagccaagaccccccgggagttgaagaaagaccccaaaccgagtgtctcccggacccagccgcgggaggtgcgccgggcagcctcttctgtgcccaacctcaagaagacgaatgcccaggcggcacccaagccccgcaaagcgcccagcacgtcccactctggcttcccgccggtggcaaatggaccccgcagcccgcccagcctccgatgtggagaagccagcccccccagtgcagcctgcggctctccggcctcccagctggtggccacgcccagcctggagctggggccgatcccagccggggaggagaaggcactggagctgcctttggccgccagctcaatcccaaggccacgcacaccctcccctgagtcccaccggagccccgcagagggcagcgagcggctgtcgctgagcccactgcggggcggggaggccgggccagacgcctcacccacagtgaccacacccacggtgaccacgccctcactacccgcagaggtgggctccccgcactcgaccgaggtggacgagtccctgtcggtgtcctttgagcaggtgctgccgccatccgcccccaccagtgaggctgggctgagcctcccgctgcgtggcccccgggcgcggcgctcggcttccccacacgatgtggacctgtgcctggtgtcaccctgtgaatttgagcatcgcaaggcggtgccaatggcaccggcacctgcgtcccccggcagctcgaatgacagcagtgcccggtcacaggaacgggcaggtgggctgggggccgaggagacgccacccacatcggtcagcgagtccctgcccaccctgtctgactcggatcccgtgcccctggcccccggtgcggcagactcagacgaagacacagagggctttggagtccctcgccacgaccctttgcctgaccccctcaaggtccccccaccactgcctgacccatccagcatctgcatggtggaccccgagatgctgccccccaagacagcacggcaaacggagaacgtcagccgcacccggaagcccctggcccgccccaactcacgcgctgccgcccccaaagccactccagtggctgctgccaaaaccaaggggcttgctggtggggaccgtgccagccgaccactcagtgcccggagtgagcccagtgagaagggaggccgggcacccctgtccagaaagtcctcaacccccaagactgccactcgaggcccgtcggggtcagccagcagccggcccggggtgtcagccaccccacccaagtccccggtctacctggacctggcctacctgcccagcgggagcagcgcccacctggtggatgaggagctcttccagcgcgtgcgcgcgctctgctacgtcatcagtggccaggaccagcgcaaggaggaaggcatgcgggccgtcctggacgcgctactggccagcaagcagcattgggaccgtgacctgcaggtgaccctgatccccactttcgactcggtggccatgcatacgtggtacgcagagacgcacgcccggcaccaggcgctgggcatcacggtgttgggcagcaacagcatggtgtccatgcaggatgacgccttcccggcttgcaaggtggagttctagccccatcgccgacacgccccccactcagcccagcccgcctgtccctagattcagccacatcagaaataaactgtgactac

SEQ ID NO: 17499 - protein, 672 aa, Homo sapiens [sequence omitted]

SEQ ID NO: 17500 - DNA, 3913 bp, Homo sapiens
  CDS (141)..(1799)
gttctccgcccccgccgccgccattacggagctcccagtggttgattcttcaccacactgaaaccattaggaaaaatccttgtggttaacagcagaggcttcagagtgtaacctgtactcgggcctagaaattatttaaaatggcgactgatacgtctcaaggtgaactcgtccatcctaaggcactcccacttatagtaggagctcagctgatccacgcggacaagttaggtgagaaggtagaagatagcaccatgccgattcgtcgaactgtgaattctacccgggaaactcctcccaaaagcaagcttgctgaaggggaggaagaaaagccagaaccagacataagttcagaggaatctgtctccactgtagaagaacaagagaatgaaactccacctgctacttcgagtgaggcagagcagccaaagggggaacctgagaatgaagagaaggaagaaaataagtcttctgaggaaaccaaaaaggatgagaaagatcagtctaaagaaaaggagaagaaagtgaaaaaaacaattccttcctgggctaccctttctgccagccagctagccagggcccagaaacaaacaccgatggcttcttccccacgtcccaagatggatgcaatcttaactgaggccattaaggcatgcttccagaagagtggtgcatcagtggttgctattcgaaaatacatcatccataagtatccttctctggagctggagagaaggggttatctccttaaacaagcactgaaaagagaattaaatagaggagtcatcaaacaggttaaaggaaaaggtgcttctggaagttttgttgtggttcagaaatcaagaaaaacacctcagaaatccagaaacagaaagaataggagctctgcagtggatccagaaccacaagtaaaattggaggatgtcctcccactggcctttactcgcctttgtgaacctaaagaagcttcctacagtctcatcaggaaatatgtgtctcagtattatcctaagcttagagtggacatcaggcctcagctgttgaagaacgctctgcagagagcagtagagaggggccagttagaacagataactggcaaaggtgcttcggggacattccagctgaagaaatcaggggagaaacccctgcttggtggaagcctgatggaatatgcaatcttgtctgccattgctgccatgaatgagccgaagacctgctctaccactgctctgaagaagtatgtcctagagaatcacccaggaaccaattctaactatcaaatgcatttgctgaaaaaaaccctgcagaaatgcgaaaagaatgggtggatggaacagatctctgggaaagggttcagtggcaccttccagctctgttttccctattatcccagcccaggagttctgtttccgaagaaagagccagatgattctagagatgaggatgaagatgaagatgagtcatcagaagaagactctgaggatgaagagccgccacctaagagaaggttgcagaagaaaaccccagccaagtccccagggaaggccgcatctgtgaagcagagagggtccaaacctgcacctaaagtctcagctgcccagcgggggaaagctaggcccttgcctaagaaagcacctcctaaggccaaaacgcctgccaagaagaccagaccctcatccacagtcatcaagaaacctagtggtggctcctcaaagaagcctgcaaccagtgcaagaaaggaagtaaaattgccgggcaagggcaaatccaccatgaagaagtctttcagagtgaaaaagtaaattttataggaaaaaagggtatcatgatgaaattcaaaatcttattttctaaggtcagtgtgcatttgtttagttttgatgcttttcaaattacattattttcctcccctatgaacattgtggggagggactctaaataaaccagtttaggcatttgctagctttaggtgcttttattggtgcctgcccttttccttgttcattttaatttctgcaataatcctggactttcctaaactatgtaatgtatacttgtcccttttctctgcctcccccaaccccctgttgtttttatggtcagctttgccttttttttttcttccaattttatctaaacagttgcagagatttttatatttgtagaaagcatcaagaacggtatgccagtcaggtcctggaagtaaaatggaggcacaatatagcactgactgagttgtaaagcctcctgcctggagacttcagttatagctgtaataattaatcttatttataaaagccactccactaaccttttctctccaactgtaaacacagagacagctttgggaataagccaaaaacagggtgatctcattagattttgaagatatatgactcctttgggctacatttcatattgatcaatttctaggtatttttcactggcccaaagtattgcattcccttaacagcaagcacaagttctctatatcacttgttttttgttgttgttgttgttgtcgtcgttgttttgagacggagtcttgctcaggtgccccggagtgcagtggtgcaatctcagctcactgcaacctccacctcctgggttcaagcaattctcctgcttcagcctcccgagtagctgggattacaggtgtgtaccaccacgcctggcaatttttttgtatttttagtagagatggggtttcgccgtgttggtcaggctggtctcaaactcctgacctcaggtgatccgcctgcctcggcctcccaaagtgctgggattacaggagtgagccactgtgcctggcctatcccacttggtttttgactgaaggggaagtgtagaaatatattgatttgtgatttctggtgtcacctgtgttaccaaaaatcaaaacaaatcttttttattttttattattattattatttttgagacagagtctcgctctgtcgcccagtgtggagtgcagtggtgtgatcttggctcactgcaaactccgcctcccaggttcaagcgattctcccacctcagcctcctgagttgggtcctacaggcgcacacgaccacgcccagctaattttttgtatttttagtagagttggggtttcaccatgttagccaggatggtctcgatctcctgacctcgtgatccactcacctcagcctcccaaaatcctggggttacagatgtgagctaccactcacggcccaaatcttcttgatcatatgtttaaatatattttttaatatttggagcatgagttgtcacttcttgtttgccttttttataaggaaatgttggagagttacatcattgctaatgtagaaatgttaagtggaaaaatatacagtttggtaaaataaactagattctacatttatttgtgggtttttttcccctcctttctttccacagcacttttgatatcaagcaagtggcttcctttttgagatattaaaaaaaaaaagaaaaggaaaaaagtaaatgaagcccaactacctaaccctttcttatttgtatttgttttagtattgtgaagttgtgttaaatagtactagctagaaatacaaatttctggttatcatttctcttccctgtggcacttgacattctaattgtcttaaagtttttgaagtacatcttctggccccttgagtactgccagaggcaaaagatgtttgtttcttattcattccacttttgtctcctgggatcccttctgtagcctaaagtatggctgggaaatggacttgagaagattggcttgaattagatcataatcatgtgtgatcccatcatgaattcattggaatttgtgttgcatgtaaggcaatctttcctgttgtaaatcttccttttttaatgtacatatattttgaaaaatatgaataaacatgaaatttt

SEQ ID NO: 17501 - protein, 553 aa, Homo sapiens
MATDTSQGELVHPKALPLIVGAQLIHADKLGEKVEDSTMPIRRTVNSTRETPPKSKLAEGEEEKPEPDISSEESVSTVEEQENETPPATSSEAEQPKGEPENEEKEENKSSEETKKDEKDQSKEKEKKVKKTIPSWATLSASQLARAQKQTPMASSPRPKMDAILTEAIKACFQKSGASVVAIRKYIIHKYPSLELERRGYLLKQALKRELNRGVIKQVKGKGASGSFVVVQKSRKTPQKSRNRKNRSSAVDPEPQVKLEDVLPLAFTRLCEPKEASYSLIRKYVSQYYPKLRVDIRPQLLKNALQRAVERGQLEQITGKGASGTFQLKKSGEKPLLGGSLMEYAILSAIAAMNEPKTCSTTALKKYVLENHPGTNSNYQMHLLKKTLQKCEKNGWMEQISGKGFSGTFQLCFPYYPSPGVLFPKKEPDDSRDEDEDEDESSEEDSEDEEPPPKRRLQKKTPAKSPGKAASVKQRGSKPAPKVSAAQRGKARPLPKKAPPKAKTPAKKTRPSSTVIKKPSGGSSKKPATSARKEVKLPGKGKSTMKKSFRVKK

SEQ ID NO: 17502 - DNA, 2936 bp, Homo sapiens
  CDS (332)..(1894)
gcggggcctctaccggcccgatggagcgcgcgggcgctactagccgcgggggccaagcccctggcttcttactgcggcttcatactgagggccgagccgaggcggcgcgggtgcaggagcaggacttacggcagtgggggctgacagggattcacctacgctcttaccagctggagggagtaaactggctcgcccagcgcttccattgtcagaatggctgtatcctgggagatgagatgggcctggggaagacctgccaggaagattaaatggtgaagggccatttctgattctttgtcccttgtctgttttgagcaactggaaagaagaaatgcagagatttgctccaggtctttcctgtgtaacatatgcaggcgacaaggaggaaagagcctgccttcagcaagacctgaaacaggagtcacgttttcatgtgctactgactacctatgagatttgcttgaaagatgcatcatttctaaaatcattcccttggagtgttcttgttgtggatgaagctcacaggttgaaaaaccaaagctccctgctgcataagaccttgtcagagttctcagtagtcttcagtctcctgttgaccggaactcccatccagaacagcctccaagagctctactccctcctcagttttgtggagcctgatctcttttccaaggaagaggtgggagattttattcaacgctaccaggatattgagaaagaatctgagtcagcaagtgaactgcacaaactcttgcagccatttctgctgaggcgagtgaaagctgaggtagctacagagcttcccaagaagacagaagtagtgatataccatggcatgtcagcattgcagaagaaatactacaaggccattttgatgaaagacctagatgcatttgaaaatgagacggcaaagaaagttaaactacagaacattttgtcccagcttcgaaagtgtgtggatcacccatatttgtttgatggtgtggagccggagccttttgaagttggagaccacctgactgaggctagtgggaagcttcacctgctggataagctactagcattcctgtattctgggggccatcgggttttacttttctcccaaatgacccagatgttggatattccccaagactatatggattacagaggctacagctatgagcgtgtggatggttctgtgagaggagaagagagacacttggccattaagaactttggacagcagcccattttcgtttttctcctgagtactagggcaggtggagttggcatgaacttaacagcagcagatactgtgatttttgttgacagtgactttaatcctcagaatgacttgcaagcagctgccagggctcatcgcattggccaaaacaagtctgttaaagttattcggctgattggtcgagacactgtggaagaaatagtctataggaaagcagcctccaaactgcagctcaccaacatgatcatagaaggaggccattttactctgggagcccagaaacccgctgccgatgctgacctccagttgagtgagatactcaaatttggtttggataaactgctggcctctgaggggagcaccatggatgaaatagacctggagtccatcctgggagaaacaaaagatggccagtgggtctctgatgccttgcctgcagcagaaggagggagcagagatcaagaggaaggaaaaaatcatatgtacttatttgaaggtaaagattattctaaagagcccagtaaggaagacagaaaatcatttgaacaactggtaaccttcagaaaacccttttggagaaagctagtcaagagggccgatcactccgaaataaaggcagtgttctcatcccaggccttgtggagggatctaccaaaaggaagcgggttctgagtccagaagagctggaggacagacagaagaaaagacaagaagcagctgccaagagaaggagactcatagaggagaagaagaggcaaaaggaagaggctgaacataagaaaaagatggcctggtgggaatccaacaattaccagtccttctgcctgccctctgaggagagcgagccagaggaccttgagaatggggaagagagctctgctgagctggattaccaagacccagatgctacttccctcaagtacgttagtggtgatgtcacccaccctcaggctggggccgaggatgctctcattgtgcactgcgtagatgactctggccactggggcagaggtggtttatttacagctctggaaaagcgatccgctgagccaagaaaaatatatgagctggctgggaaaatgaaagacctgagtttgggaggtgtccttttatttcctgttgatgataaagaatcaagaaacaaagggcaagatttgttggccttgattgtggctcagcatcgtgatcgttccaatgtcctgtctggcattaagatggcagccctagaagagggcctgaagaagatatttttagcagcaaaaaagaagaaagcaagtgttcatcttccacgtattggacatgccacgaaaggttttaactggtatggtactgagcgacttattcggaaacatctggctgcaagaggcatcccaacttacatatattattttcctagaagcaagtctgctgtccttcattcacagtcttcatcttcctcctcaagacagctggtgccttaagaattggcccagcctcagatcctgtctttagcaaccagctaatatttacccagaggtactgcaatagagtatttcaaaatggaatcaggatctggtgggcctcagaaattgtctcttttctgagtttcagtttggttctcctggatgttttgctctgttttgatacctgtaatatagggaaacacaactttttttgggaaagccctttgaccccagcttgctagttgcataataataaattttctgttcct

SEQ ID NO: 17503 - protein, 521 aa, Homo sapiens
MQRFAPGLSCVTYAGDKEERACLQQDLKQESRFHVLLTTYEICLKDASFLKSFPWSVLVVDEAHRLKNQSSLLHKTLSEFSVVFSLLLTGTPIQNSLQELYSLLSFVEPDLFSKEEVGDFIQRYQDIEKESESASELHKLLQPFLLRRVKAEVATELPKKTEVVIYHGMSALQKKYYKAILMKDLDAFENETAKKVKLQNILSQLRKCVDHPYLFDGVEPEPFEVGDHLTEASGKLHLLDKLLAFLYSGGHRVLLFSQMTQMLDIPQDYMDYRGYSYERVDGSVRGEERHLAIKNFGQQPIFVFLLSTRAGGVGMNLTAADTVIFVDSDFNPQNDLQAAARAHRIGQNKSVKVIRLIGRDTVEEIVYRKAASKLQLTNMIIEGGHFTLGAQKPAADADLQLSEILKFGLDKLLASEGSTMDEIDLESILGETKDGQWVSDALPAAEGGSRDQEEGKNHMYLFEGKDYSKEPSKEDRKSFEQLVTFRKPFWRKLVKRADHSEIKAVFSSQALWRDLPKGSGF

SEQ ID NO: 17504 - DNA, 3015 bp, Homo sapiens
  CDS (27)..(680)
cattcaccaacaggatattttttgccatggtggattttgatgaaggctctgatgtatttcagatgctaaacatgaattcagctccaactttcatcaactttcctgcaaaagggaaacccaaacggggtgatacatatgagttacaggtgcggggtttttcagctgagcagattgcccggtggatcgccgacagaactgatgtcaatattagagtgattagacccccaaattatgctggtccccttatgttgggattgcttttggctgttattggtggacttgtgtatcttcgaagaagtaatatggaatttctctttaataaaactggatgggcttttgcagctttgtgttttgtgcttgctatgacatctggtcaaatgtggaaccatataagaggaccaccatatgcccataagaatccccacacgggacatgtgaattatatccatggaagcagtcaagcccagtttgtagctgaaacacacattgttcttctgtttaatggtggagttaccttaggaatggtgcttttatgtgaagctgctacctctgacatggatattggaaagcgaaagataatgtgtgtggctggtattggacttgttgtattattcttcagttggatgctctctatttttagatctaaatatcatggctacccatacagctttctgatgagttaaaaaggtcccagagatatatagacactggagtactggaaattgaaaaacgaaaatcgtgtgtgtttgaaaagaagaatgcaacttgtatattttgtattacctctttttttcaagtgatttaaatagttaatcatttaaccaaagaagatgtgtagtgccttaacaagcaatcctctgtcaaaatctgaggtatttgaaaataattatcctcttaaccttctcttcccagtgaactttatggaacatttaatttagtacaattaagtatattataaaaattgtaaaactactactttgttttagttagaacaaagctcaaaactactttagttaacttggtcatctgattttatattgccttatccaaagatggggaaagtaagtcctgaccaggtgttcccacatatgcctgttacagataactacattaggaattcattcttagcttcttcatctttgtgtggatgtgtatactttacgcatctttccttttgagtagagaaattatgtgtgtcatgcggtcttctgaaaatggaacaccattcttcagagcacacgtctagccctcagcaagacagttgtttctcctcctccttgcatatttcctactgaaatacagtgctgtctatgattgtttttgttttgttgtttttttgagacgctactgcgctccagcctgagtgatagagtgagactctgtctcaaaaaaaagtatctctaaatacaggattataatttctgcttgagtatggtgttaactaccttgtatttagaaagatttcagattcattccatctccttagttttcttttaaggtgacccatctgtgataaaaatatagcttagtgctaaaatcagtgtaacttatacatggcctaaaatgtttctacaaattagagtttgtcacttattccatttgtacctaagagaaaaataggctcagttagaaaaggactccctggccaggcgcagtgacttacgcctgtaatctcagcactttgggaggccaaggcaggcagatcacgaggtcaggagttcgagaccatcctggccaacatggtgaaaccccgtctctactaaaaatataaaaattagctgggtgtggtggcaggagcctgtaatcccagctacacaggaggctgaggcacgagaatcacttgaactcaggagatggaggtttcagtgagccaagatcacaccactgcactccagcctggcaacagagcgagactccatctcaaaaaaaaaaaaaaagtaagaaagaaaaggactcccttagaatgggaaagaaaaatcataaaatattgagctgatgcctgtatatagaaattaagcgtttctcgaaagctgttctatgttttgctgttattttagtctttattctcttcctttaggtggagaaacaaagtaccaatttgaagggattttttttattttgtcttttggtttctgtcagtagaaataaccatatgtgctaaccaaatttctgtgaagaatgttttcatggttatcattatatctaactataacctcccccatagttatgaagagtaacctgaaatgccactattgtggaaataggataattgtaattgtgaaaaaataattttaaggaaatcttacaagtattacattaaaaagatactatgactgccacctgccatttaccttctaataaccctgccatgtggtttgcagaaagagatggatatagtagcctcagaagaaatattttatgtgggttttttgtttttcgttactagatttcatggatgaggggatatggttgaccttttactttttaatggagcagccagtttttgttaattactcacttgtaaattgtgagattctgaattccttacctgctattcttgtacttgtctcaggccaaatctatgctgtggttcttatgagacttgtatgaagatgccctgatttgtacagattgaccacgggaatactactgccatgtaatctgtatagttccagataatttgtcatgaacattgacagaatgacaattttttgtatttgctttttctccctttaagagcacattcttctgtaaggagaaaggcagcattctggctaaaatgtgtagaaggtaatttactacacttataaaatagtgtgacttttgtgaaaattttgaattagctttcatatgaagtgccttaagtagactcttcatttacttttctggtaatggtttaaatatcatttgttatgcatttttaagatacagttcagaatgacacattgtagtggcaaagataaccaaatgtctggctgtttgctttttgaccatatcaataaacttttacaatct

SEQ ID NO: 17505 - protein, 218 aa, Homo sapiens
MVDFDEGSDVFQMLNMNSAPTFINFPAKGKPKRGDTYELQVRGFSAEQIARWIADRTDVNIRVIRPPNYAGPLMLGLLLAVIGGLVYLRRSNMEFLFNKTGWAFAALCFVLAMTSGQMWNHIRGPPYAHKNPHTGHVNYIHGSSQAQFVAETHIVLLFNGGVTLGMVLLCEAATSDMDIGKRKIMCVAGIGLVVLFFSWMLSIFRSKYHGYPYSFLMS

SEQ ID NO: 17506 - DNA, 3741 bp, Homo sapiens
  CDS (110)..(892)
attgaagattaaacgttctctcttcaactaccatgacacgaggatccatgcctgcctctactttattgcccctactggacattcactaaagtccctggatctggtcaccatgaaaaagctggacagtaaggtgaacatcattccaataattgcaaaagctgacaccattgccaagaatgaactgcacaaattcaagagtaagatcatgagtgaactggtcagcaatggggtccagatatatcagtttcccactgatgaagaaacggtggcagagattaacgcaacaatgagtgtccatctcccatttgcagtggttggcagcaccgaagaggtgaagattggcaacaagatggcaaaggccaggcagtacccctggggtgtggtgcaggttgagaatgaaaatcattgcgattttgtgaaacttcgagagatgctgatccgcgtgaacatggaggacttgcgagagcagactcacacccgccactatgaattgtaccgacgctgtaagcttgaagagatggggttcaaggacactgaccctgacagcaaacccttcagtcttcaggagacatatgaagcaaaaaggaatgaattcctgggagaactgcagaagaaagaagaagaaatgagacaaatgtttgttatgagagtgaaggagaaagaagctgaacttaaggaggcagagaaagagcttcacgagaagtttgaccttctaaagcggacacaccaagaagaaaagaagaaagtggaagacaagaagaaggagcttgaggaggaggtgaacaacttccagaagaagaaagcagcggctcagttactacagtcccaggcccagcaatctggggcccagcaaaccaagaaagacaaggataagaaaaatgcaagcttcacataaagcctggcaagccaaggatgttcccgcattcacctgcttttgcagtaatatcgtatctctgccatgtgtgttctttagttttattttattttattttatttttttacccttcctcaaacaccagtaactattattaactcgttttgctgaatgttgttgggtggtagaaaatgatagaacaagggaataaccgcgaatgctctgtgcagctggactctgtttccggaaagtaaatgatttgctttttatgcctgttctgaatggcagcacgaagcaggcctgttacttgtatgtcgctttggacagaggaaagtggggtaaaatgctacctgtacgtctgacatgaaaacttctcaccgcctcagcagctgaactaaaaacctgaatagccatgacaagagtttgcattttcttgatgattcatctccatgagtgcacaatccctgaactcactgtcttttctccacacttgtcctaagccaaggtagatttgtacgtagacagactggtgagcaagcattatattttatttttacccttgcatgacattttcattttaatcaataacattatttggcctgggcttgtgggtctgttcagactgtctcctctcatggtttgaaactgcatctgaatgcctgccttcaatcctggccaagttggagtagactggtatgagaaaactatgattagttcacatttactggtgcatccttgatcctctcacagatagaggtcttaaaggttggatcatgtaacattgcttagtagaagaatcttcttctaaggatgatgggctttctacagcctgcttaccactaacagtaaggaatctttcataaacacacctcagtttgttcccagtgggcttagagggaggacctgatgactgattccaggatacttgtacttctaataacatttttcatgaatcatgagaaaatttccacagatacttcccttagaaaatttgctataaactctgtatcattggtagcacaaatttgagcgaggccttgtcaattttaaggtggaaataggaaggaccacaacatgacccgtaagtcaagaaggtagacatttcatatccagcttccttgcttagtctcctttcagtatttggcaataaaagaaagaagaaatagaacagctgaagtctcaaatcattgtctggaattttcctcaccttggctagctccacctgctctttgtctaaggcccttgcctcatcagggattagaactggcccatatgccagaacctgtactaaatgcctaatttgtatggaagagtgcatatttaatctcttttctatactgctcctttctgatgcttatcctttcatctgtgtgattgttttttcccctctactaacaagatcctcccagctttctctctacatgtagaaaggataacatttctcatgaacccactgcccctctgcattttcctcactggttagagattaagtaaataggatagaatatgctgcgtctcccctgacacacactttcttttttgaatgagcaagtctccattttgatttcagcaaagattttttctccttttctttgtcctcaaccatacttagaggaaagaaggaatggtcttccatgaactgattatgcttaattaagcaaagtaaggaaattagtttcatggaagcctaaacaaagctggaatagaaactacacactagacacagcagtagtcatagtcttcacaggtttaggagctactggaccaacattcttgtttttgcttttgtttttttaaataattctagtctggagctaactgtggagcagccaaatagtagctggcatgttgattcaaaccatgggctgaatttgctcataggctgtgcatcagacaaaagcttgaatatttgtgttgtatgcttgttccaaccaccgcttgtgtgagcatttttgtggcttgtacagaaagtacacttttaaattgtctcttgcatcactaaaatttttttaaaatgagcataacaacgaaaggcatccagctgactttttgattccaagattattgattggattgacttttttgcattaaatttttcccagcaaaataaatcatatggcgagtcagggaataaaaagtcaaaagaaacaaatagaagcttttttttttaaaaaatgtattgcttctgaacttttttctgccactgctccctagccctgtttagtttgttattgctgcttttcttttttctttctgtatctatgcctttttttcacagtagtccttggctctgcacggaataaatgataccctcaaatctaattggatgtgctttcgcctttgcatgtaagtacggtagtaagaaacctttgagatctttctgacttttcaaaattagagaaagcaaatgggatggacagattttttttttcttttcaaggggggcaggaaggtaatggtttgagtagcctttgtttaaaaaaaaaactaaatatatttaaaaggccacatttatatttttttcacaagaaccacataataaattccacttcttgacctgaatttggaaatccgaaattactaatccaggccaggtgtggtggctcatgcctgtaatcccagcactttgagaggccgaggtgggcagatcacttgaggcctggagttcaagaccaccttggcgaacacggtgaaaccccgtctctacaaaaaatacaaaaattagccaggcgtggtggcacgtgcctgtagtcccagctacttgggaggctaagtcaggagaattgcttgaacttgggagatggaggttgcagtgagccaagattgcaccactgcattccaacctgggtgatgaagtgagactctcc

SEQ ID NO: 17507 - protein, 261 aa, Homo sapiens
MKKLDSKVNIIPIIAKADTIAKNELHKFKSKIMSELVSNGVQIYQFPTDEETVAEINATMSVHLPFAVVGSTEEVKIGNKMAKARQYPWGVVQVENENHCDFVKLREMLIRVNMEDLREQTHTRHYELYRRCKLEEMGFKDTDPDSKPFSLQETYEAKRNEFLGELQKKEEEMRQMFVMRVKEKEAELKEAEKELHEKFDLLKRTHQEEKKKVEDKKKELEEEVNNFQKKKAAAQLLQSQAQQSGAQQTKKDKDKKNASFT

SEQ ID NO: 17508 - DNA, 3710 bp, Homo sapiens
  CDS (414)..(2558)
cctgatattctctccttcttttgaagacctgcctccatccatgagctgtatcttgatctgtctgactgtccatgttttccacctgcaaccatttgcatgtgtacagcctactgtttgtctccagtttttaaactgtacaagttgtgtttcttaatcttcccttctgccttgttctggggaggtggttattcatcatttggaatcacctttccccctcccatgtgctttccttcatttgagatcttttgacctttggctttatttgggagggggaagggtgataaagttttctgtttccctggttttcttttgtactcctctctgttgcttccctcctcccattttcttgtctattctgccgctgtgtgggcctgggctatgcggcagggcagatttcccatcagagctccaacatgcccgcagagtctggaaagagattcaaacccagcaagtatgtcccggtctctgcagccgccatcttcctagtgggagctacgacactcttctttgcctttacgtgtccaggactaagcctgtatgtgtcacctgcagtgcccatctacaatgcaattatgtttctctttgtgttggccaacttcagcatggccaccttcatggacccagggattttccctcgagctgaggaggatgaggacaaggaagatgatttccgagctcccctttacaaaacagtggagataaagggcatccaggtgcgcatgaaatggtgtgccacctgccgcttttaccgtccccctcgatgttcccactgcagtgtctgtgacaactgtgtggaggaatttgatcatcactgcccctgggtgaataactgtattggtcgccggaactaccgttattttttccttttcctcctttccctgacagcccacattatgggtgtgtttggctttggcctcctttatgtcctctaccacatagaggaactctcaggggtccgcacggctgtcacaatggcagtaatgtgtgtggctggcttattcttcatccctgtagctggcctcacgggatttcacgtggttctggtggccaggggacgcacaaccaatgaacaggttacgggtaaattccggggaggtgtgaaccccttcaccaatggctgctgtaacaatgtcagccgtgttctctgcagttctccagcacccaggtatttggggagaccaaagaaagagaagacaattgtaatcagacctcccttccttcgaccagaagtttcagatgggcagataactgtgaagatcatggataatggcatccagggagagctgaggagaacaaagtctaagggaagcctggagataacagagagccagtctgcagatgctgaacctccacctcctcctaagccagacctgagccgttacacagggttgcgaacacacctcggcttggctactaatgaggatagtagcttattggccaaggacagccccccgacacctaccatgtacaagtatcggccgggttacagtagcagcagtacgtcagctgccatgccgcattcctccagcgccaagttgagtcgtggggacagcttgaaggagccaacctcaattgcagagagcagccgtcaccccagctaccgctcagagcccagcttggaaccagagagcttccgttctcctacctttggcaaaagttttcacttcgatccactatccagtggctcacgctcctccagcctcaagtcagcccagggcacaggctttgagctgggccagttgcaatccattcgttcagagggcaccacctccacctcctataagagcctggccaaccagacacgcaatggaagcctatcttatgacagcttgctcacaccttcagacagccctgattttgagtcagtgcaggcagggcctgagccagacccacctttaggctatacctctcccttcctgtcagccaggctggcccagcaacgggaagctgagaggcacccacgtttggtgccaactggcccaacacaccgagagccctcaccagtccgttacgacaatctgtcgcgccacattgtggcctctctccaggaacgagagaagttgctgcgccagtcacccccactcccgggccgtgaggaagaaccaggcttgggggactcaggcattcagtcaacaccaggctcgggccatgcccctcgtactagttcctcctcagatgattcaaagagatcacctttgggcaagactccactgggacgcccagctgtcccccgttttggcaagccagatgggctaaggggccggggagtagggtcccctgaaccaggcccaacagccccatacctgggccgatcgatgtcttacagcagccaaaaagcccaacctggtgtctctgagacagaagaagtggccttgcagccattactgacacccaaagatgaagtacagctgaagaccacctacagcaaatccaacgggcagcccaagagcttaggctcagcctcccctggcccaggccagccacctctcagtagccccacgaggggaggagtcaagaaggtgtcaggggttggtggtaccacctatgagatttcggtgtgagccttcggcacctcccctccccaacgcctctgcgcctacaccaaagggccccaggtggccaccttccttccctcaaggggctcccctcccgtgcatggacattttttaaaccaccgattccaagaggatgaggagtgttttctaaaatgcagtaggcttggggagtcggagagttggggccctgagactggggtagcaacccccccttttatcttttaagaccttcccttccttgatccctggaccagactcagtggacatttgtgcaattgctcgccctggagggaaccagatcatttttaaaccagaaataattttttttattattgttacggattctatttttttcctcttctgcgttaccaggtgtgtgtgtacatataatatatatatatatatattataaatatcaaagaaattatatatctatcctgggatgggaaaatgagggagggatacatatacggagggggatcttactcttcccattcctcagaccagcaggaaaagaggggagacgtcagtctttttcctgtggttccctctcatttgtcccagttactaactacggaaatagcatcctctgctggtgctaagtgtgattaggaagaagcctggggagaggtgagtctggaattttggtcacaagagggaaggacttggagaggagaattagttttctaggctcattggcatttagtttccctaggaaaggggtcaaaacttcaagacactggtggtggtgggagatcaggaaaataacttggcctagctcaaacaatattggataatcccctccttgggggagagggattagagtgtgctcctactggccccttggagcctcccctagcttacacagttaacttgattttaaaatccaaggccaggagagaagaatccaaaaagcaatatttttcatcacatgccaaaaacgggggatagagagaaggagtggcaggcctaggcccctccgattgtcccttgggggttacccctcagcccacctcactatggtgctgggtagaggggatacctgggttctaacctctaaataggggagatcccagcctccacaaagaggcccttttattttttattctgattagccattttaaaccaacgaggaataaaaagaaatcctgatct

SEQ ID NO: 17509 - protein, 715 aa, Homo sapiens
MPAESGKRFKPSKYVPVSAAAIFLVGATTLFFAFTCPGLSLYVSPAVPIYNAIMFLFVLANFSMATFMDPGIFPRAEEDEDKEDDFRAPLYKTVEIKGIQVRMKWCATCRFYRPPRCSHCSVCDNCVEEFDHHCPWVNNCIGRRNYRYFFLFLLSLTAHIMGVFGFGLLYVLYHIEELSGVRTAVTMAVMCVAGLFFIPVAGLTGFHVVLVARGRTTNEQVTGKFRGGVNPFTNGCCNNVSRVLCSSPAPRYLGRPKKEKTIVIRPPFLRPEVSDGQITVKIMDNGIQGELRRTKSKGSLEITESQSADAEPPPPPKPDLSRYTGLRTHLGLATNEDSSLLAKDSPPTPTMYKYRPGYSSSSTSAAMPHSSSAKLSRGDSLKEPTSIAESSRHPSYRSEPSLEPESFRSPTFGKSFHFDPLSSGSRSSSLKSAQGTGFELGQLQSIRSEGTTSTSYKSLANQTRNGSLSYDSLLTPSDSPDFESVQAGPEPDPPLGYTSPFLSARLAQQREAERHPRLVPTGPTHREPSPVRYDNLSRHIVASLQEREKLLRQSPPLPGREEEPGLGDSGIQSTPGSGHAPRTSSSSDDSKRSPLGKTPLGRPAVPRFGKPDGLRGRGVGSPEPGPTAPYLGRSMSYSSQKAQPGVSETEEVALQPLLTPKDEVQLKTTYSKSNGQPKSLGSASPGPGQPPLSSPTRGGVKKVSGVGGTTYEISV

SEQ ID NO: 17510 - DNA, 4214 bp, Homo sapiens
  CDS (761)..(1126)
ttttttaatagcatgtatggggttctgttccatgtctgtgttgtggacattccgcggcatgaccgcgtgaactgcacggtggagctgcctcagggctgtcggtcaggttggtccagtgaggggtgactgcagccggtcaggtgggcgaggagaaggggggctgcccctttcctacctgtgcttgaggggccggaggcaggtgctgcctggcagagctgtgttaccgtcttggcctcggggtctggtccacactctgtgctcccagccttgaggctgcagtaggactctgatctcacctgccagaagagaggcggggccgcgtcctcctggcgtcaccggcgtcactgtcattccttggtgtctgtgctgggcatggttggcttgggggtctgtggtttcctgggccttgtggcagggtttctcccgtgggagaatttggtgtggaaagcataggaggccccttccgaggttgacaccgtgtcctccgcggtgtttctcgcctggtcgtctcgtcgtgtggacgctgccgttctggttctcggaggtgtgtccttcgccgtgttggggttatttgtctgtgttcctgcacttttcccgggctctgagctggattgatggggccagtctcccccctcccatcttgaggtcgttctccacattccttccagcacacctgtcctttccatagccctttttggacctttagaaccacagatgataggaccagcccaatgagccacagtcagagagtagattgtgcatgtgtgagcacccagctactggggacgggggctctcccacgacccctcctcctgtgtttgccagagctcccatctgccccactcgcctttgccccgtcatcgatgattcaggcagagccagattcgttaggtccctggaggaaggactgactggaccagagggaccctctggctcaggagggttgggtccctgggaggccggcagccaggccacagaatccacacgtggaccattgtgggtccctgggaggccggcagccaggccacggaatccacacgtggaccattgtgggtcccttgggaggccagcagccagactacggaatccacatgtggaccatgggaagtcagtctcttgcgtgtcctagaccttgtgggtggcgccctgcataggggagcagggggaacgggtctgatgtccctgtgctggctgagggctcagagctgcccgcactccgtagctcatgggatgtgctgggcctgcctttggcgccatgctgcagactccagtgggcctggtttctgctgaatgtccatggtggccgctgcagagttgcagaggtccctgtagagataaagctgaggaggaggctgtgtgtgatggctctggctcggaccaaccagatgagcctcctgaagcccccttccctgcctgcctgctgacccgtggccccagctcactcattgccctcagcagccacccgaggctgtgcagaagggtaggttcaggttgaccaggaagctgccaaaagggacatggatatgaggatacatctggacgtgcttaggaacagggtgctggttgagggcccccagctgacccctactgcggatccgcatgtggaccatgagccggctgccagcactaggtcctgggcagctttgtttgtcccacttttctttgtttcttctcactaaaatgatcacgaagacctttgacaagaggagagatatgcactgtgatattaaattagaaataatttatcaaaatcagacctctcctaaaagaataagaaattcattgtttggcccatcctgaaaggtgaggtggcgagacagtggggtgcctccgtgccgcttcgtgcagcagcaagttcagcctgagatgctggctgtactcagcctttgcaatttttgtagatgtagcttaggacgtgagttatttttccgcagactggccaagagccaggttctaagcttggacctaaggtagaaagctgcccatcgggggccctagctcagccccaccaggccctctgttgggcctgcacacagctctgtggctagaacactccaaggcccttcggtacccatcagagtgggccccttgccaggtggcttttcagttacagagtccagtggaccattttgtagaaccatgcagctccctgcggaaggtggggtagggtgggaaagaggagcaggtctggaggtttgtggaacccagtcccctgcagaatctgtaaaacctaataaatcatggttgtggccattctcacggtggtgattgtgattagacgacccccgggaagcccagacactcggggcctggagttcctccccctgcctgacctagaagcagaaccgttttcagcgctctgccctgttggctttaaggctttgtcttaatttaaggaaaaagatcctcccgggttttatttctctctttcttgagtggactgtttccctataattaaaagaggtggtgagtcctggggcagcttccgcgcctccctgtccacgtgctaacagatcaggacgcccccagcacccctgcctgcttttgctggtggcagtgacgggaccccgactcctcactctcgggccgcagacaatgctgtgagcaagtgtggccatgggcacagaatgtccctttggacgccgctgctgggggctgccaggggccctctggggtcgtgctttgaggcccgtccggttcacgagggggtccgggcagcactgactgcttccgacctgcaggaggcgtaggagcggccctgcgggccctttcacggcagctgctgctgtatagatttgtctccactcagtgacgtgggatttttttgtcttccttttggctttatttttaaactgctttagatattactgctcagtgtttgtgaactttcctagttctctatgttgttagtgcagccagcacccagtggggacctactagaaaaaggaactggcatgcacacgtgcccagcaggaaaagcttcgtcttcacgtcggctgctgccatccagaagaggccctggagcctcacgccgtcgaggctgctctcaggcgttctgttccgggcgaggcttgtgctgcaaggaagggcaccagcatgcaggctgccactggagggtccgggtgctgcgggcagagttcagcgcttgtccaccctcccttagctctgactcagtgcatcctactgtggggacatctcgtgaggggacacgaaatgactgatctcaccctttcccagtattcagagctgtgaacccctgtggcgcaggactggcctgtgtctgttattttggttgtaaatcattctcctgtggaattggcaaaagctacatttttactgtccttaccagcaacagtttgcgtcgtcacatgctgtgagtgtgggctgtggtgtgtccgtgtgtgtacatatgtgtatatgtatatatcacgcagcaggagtgtcattcatgctgctgtcccctggtgaagtgacaagtacaattaaaggtggctctgaaatggcctctggtttcttgggagtcgggcagggacctgcaggaggctttcccagcaggtgcacagaaggaagcgctgagcccactgtgtgcagagggtgtgtgcccagggcactgccacggcccccaccagcattggcctctgctctgcagggtggggtgcccatcctgggggctgtgtgtcatgctcacctgacccaggtgtgtgtcccggtgtgaaatcgaggaggggactggaagcccttccccgccttgaaacatgaaagctgattttctgagcagcagatacggtcagtggcaaagctgcatctgaagggcggcctgggaaggggccctgtgctggccccgggtccgccccagaggagtccacacagcaccacctccagaaggggctgggcccggggtcctgcaggcggcaccttttggtagagtttgtttccctggaaaatggggaaaatgtttcaagccaggtgaggggggaagttaacactgaaatatgtattgtttttaaaaatcaaatgcacacgcatggaagctgcttgtccatgcactggttttgtcactggcgtcctggaatccgaccgtgttggggtgcaggcgctgtcagactccggctgatcctggctcgagcacacacatctaagggccaggctggttccgcatggtgatctccgtcttgtatgtctggatgttggcctaaaataaagattactgttgt

SEQ ID NO: 17511 - protein, 122 aa, Homo sapiens
MCEHPATGDGGSPTTPPPVFARAPICPTRLCPVIDDSGRARFVRSLEEGLTGPEGPSGSGGLGPWEAGSQATESTRGPLWVPGRPAARPRNPHVDHCGSLGRPAARLRNPHVDHGKSVSCVS

SEQ ID NO: 17512 - DNA, 2192 bp, Homo sapiens
  CDS (49)..(2106)
ggggcggagagaggcgagcaccgggaaggggagcgtggggccgctggaatgggtgaatttaaggtccatcgagtacgtttctttaattatgttccatcaggaatccgctgtgtggcttacaataaccagtcaaacagattggctgtttcacgaacagatggcactgtggaaatttataacttgtcagcaaactactttcaggagaaatttttcccaggtcatgagtctcgggctacagaagctttgtgctgggcagaaggacagcgactctttagtgctgggctcaatggcgagattatggagtatgatttacaggcgttaaacatcaagtatgctatggatgcctttggaggacctatttggagcatggctgccagccccagtggctctcaacttttggttggttgtgaagatggatctgtgaaactatttcaaattaccccagacaaaatccagtttgaaagaaattttgatcggcagaaaagtcgcatcctgagtctcagctggcatccctctggtacccacattgcagctggttccatagactacattagtgtgtttgatgtcaaatcaggcagcgctgttcataagatgattgtggacaggcagtatatgggcgtgtctaagcggaagtgcatcgtgtggggtgtcgccttcttgtccgatggcactatcataagtgtggactctgctgggaaggtgcagttctgggactcagccactgggacgcttgtgaagagccatctcatcgctaatgctgacgtgcagtccattgctgtagctgaccaagaagacagtttcgtggtgggcacagccgagggaacagtcttccattttcagctggtccctgtgacatctaacagcagtgagaagcagtgggtgcggacaaaaccgttccagcatcacactcatgacatgcgcactgtggcccacagcccaacagcgctgatatctggaggcactgacacccacttagtctttcgtcctctcatggagaaggtggaagtaaagaattacgatgccgctctccgaaaaatcacctttccccaccgatgtctcatctcctgttctaaaaagaggcagcttctcctcttccagtttgctcatcacttagaactttggcgactgggatccacagttgcaacaggcaagaatggggatactcttccactctctaaaaatgcagatcatttactgcacctaaagacaaagggtcctgagaacattatctgtagctgtatctccccatgtggaagttggatagcctattctacagtttctcggttttttctctatcggctgaattatgaacatgacaacataagcctcaaaagggtttccaaaatgccagcattccttcgctctgcccttcagattttgttttctgaagattcaacaaagctctttgtagcatcaaatcaaggagctctgcatattgttcagctgtcaggaggaagcttcaagcacctgcatgctttccagcctcagtcaggaacagtggaggccatgtgtcttttggcagtcagtccagatgggaattggctagctgcatcaggtaccagtgctggagtccatgtctacaacgtaaaacagctaaagcttcactgcacggtgcctgcttacaatttcccagtgactgctatggctattgcccccaataccaacaaccttgtcatcgctcattcggaccagcaggtatttgagtacagcatcccagacaaacagtatacagattggagccggactgtccagaagcagggctttcaccacctttggctccaaagggatactcctatcacacacatcagttttcatcccaagagaccgatgcacatccttctccatgatgcctacatgttctgcatcattgacaagtcattgccccttccaaatgacaaaaccttactctacaatccatttcctcccacgaatgaatcagatgtcatccggaggcgcacagctcatgcttttaaaatttctaagatatataagcctctactcttcatggatcttttggatgaaagaacactcgtggcagtagaacggcctctggatgacatcattgctcagctcccaccacccattaaaaagaagaaatttggaacctaaaacagggcactgtctgtgtccttccttgaactgtctaccctgttgcttttcacaaatcatggtaataaaacaagttattcttg

SEQ ID NO: 17513 - protein, 686 aa, Homo sapiens
MGEFKVHRVRFFNYVPSGIRCVAYNNQSNRLAVSRTDGTVEIYNLSANYFQEKFFPGHESRATEALCWAEGQRLFSAGLNGEIMEYDLQALNIKYAMDAFGGPIWSMAASPSGSQLLVGCEDGSVKLFQITPDKIQFERNFDRQKSRILSLSWHPSGTHIAAGSIDYISVFDVKSGSAVHKMIVDRQYMGVSKRKCIVWGVAFLSDGTIISVDSAGKVQFWDSATGTLVKSHLIANADVQSIAVADQEDSFVVGTAEGTVFHFQLVPVTSNSSEKQWVRTKPFQHHTHDMRTVAHSPTALISGGTDTHLVFRPLMEKVEVKNYDAALRKITFPHRCLISCSKKRQLLLFQFAHHLELWRLGSTVATGKNGDTLPLSKNADHLLHLKTKGPENIICSCISPCGSWIAYSTVSRFFLYRLNYEHDNISLKRVSKMPAFLRSALQILFSEDSTKLFVASNQGALHIVQLSGGSFKHLHAFQPQSGTVEAMCLLAVSPDGNWLAASGTSAGVHVYNVKQLKLHCTVPAYNFPVTAMAIAPNTNNLVIAHSDQQVFEYSIPDKQYTDWSRTVQKQGFHHLWLQRDTPITHISFHPKRPMHILLHDAYMFCIIDKSLPLPNDKTLLYNPFPPTNESDVIRRRTAHAFKISKIYKPLLFMDLLDERTLVAVERPLDDIIAQLPPPIKKKKFGT

SEQ ID NO: 17514 - DNA, 4496 bp, Homo sapiens
  CDS (191)..(3814)
actcagctgtgcgctctgatttcgtgcgcttcctcgtccttcatgttggatggccagtttttcgtttgtgcgtcatcctctacctgagaaatggtcgcttgcccctagtctagacacgcattaaagggcagtatttaaagtcagttggcaagcagtggaataagatttttgtaaagaaaccttgtgcagcatggattctctaccagatgaattttttgtgaggcatcctgctgtggaggatcagaggaaggaagaaactgagaataagctagaaaaatcatctggtcaactgaacaaacaggaaaatgacatacctactgatcttgtccctgttaacctactattagaagtgaagaagttattaaatgcaattaatactctaccaaaaggtgtggttcctcacattaagaagttcttacaagaagatttttccttccaaactatgcagagagaagttgcagctaacagccagaatggtgaggaaattgttcctgctttgactttacgtttcttgattacacagctagaagcagcacttaggaacattcaagctggcaattataccgcacaccagattaatattggttattatttgacattactgtttttatatggagtagcactcactgaaagaggaaagaaagaggattatacagaagctgagaataaatttctggtgatgaagatgatgatccaagaaaatgaaatttgtgaaaactttatgtctttagtttattttggacgtggtttactgcgatgtgctcaaaagagatataatggaggactgctagaatttcataaaagcttacaagaaattggagacaaaaatgaccattggtttgacatagatcctacagaagatgaagatttacctacaacttttaaagatcttcttaataattttatcaagacaactgaaagcaatataatgaagcagacgatttgtagttacctagattgtgaacgatcttgtgaagctgacattttgaagaacaccagttataagggattttttcagttaatgtgcagtaaaagttgctgtgtttatttccataaaatttgctggaaaaagttcaagaatttaaagtatccaggtgaaaatgatcagagttttagtgggaaaaaatgtttgaaggaaggatgtacaggtgacatggtaaggatgctgcaatgtgatgtacctggaattgttaaaattttgtttgaagttgtgagaaaggatgaatatatcaccattgaaaatttaggagcaagttatagaaagttgatatctctgaaaataactgatactgatataagaccgaagatcagtttaaaatttaatacaaaagatgaaatgcctatcttcaagcttgattataattatttctatcatctgcttcatataattattatttctggtactgacattgttcgacaaatatttgatgaggctatgccacctcctcttttgaaaaaagagcttcttatacacaagaatgtgctggaatcctactacaaccatctttggaccaatcatcctttgggtggatcatggcatctgctttatcctcctaacaaggagttaccgcaatccaaacagtttgacttatgcctcctgttagctcttataaaacatttaaatgtgttccctgcacccaaaaaaggatggaatatggaaccgccatcttctgacatctctaaatctgcagacatcctgagactgtgcaaatacagggatatcctccttagtgagattttgatgaatggtctcactgagtcacagttcaattcaatttggaaaaaagtttcagatattcttctgcgccttgggatgatgcaagaggatattgacaaagtgaaggagaatcccattgagaatatctcccttgattaccatcagctatctgtctacctaggcataccagtaccagaaatcatacagaggatgttatcctgctatcaacaaggaattgctctacagtcaataacaggcagtcagcgtattgaaatagaagagttacagaatgaggaagaagaactaagtccacctctcatggagtacaatataaatgtgaaatcacaccctgagatacagtttgcagaaattaataaagatgggacctcaatacccagtgaatcttcaacagaatctcttaaagatctccaggaagttaagagtaaacaaaggaaaaagaagaagactaagaataaaaagaataaagactcaaaagaagaccaagtcccatatgtggtagaaaaggaagagcagttgaggaaagaacaagcaaatccacactcagtcagtagacttataaaagatgatgcaagtgatgttcaagaggattctgcaatggaagacaagttctatagcctggatgaattgcatattctggacatgatagagcagggctcagctggcaaagtaactacagactatggagaaactgaaaaggaaaggcttgctcgtcaaaggcagctttataaattgcactatcagtgtgaagatttcaaaagacagttgagaacagtgacttttcggtggcaagaaaaccaaatgcagattaaaaagaaagacaaaattatcgcatctcttaatcaacaagttgcttttggaatcaataaggtttccaaattacagcgtcaaatccatgctaaagataatgaaatcaagaaccttaaagagcaactttctatgaaaagatctcagtgggaaatggaaaaacataatctggaaagcacaatgaaaacatacgtaagcaaactgaacgcagaaactagcagagctttaacagccgaggtgtatttcttacagtgtcgtagggattttggtttgcttcatctagagcagactgaaaaggaatgtctcaatcagcttgccagggtgactcacatggcagcaagcaacctagaatcacttcaattaaaggctgcggtagacagttggaatgccattgtggcagatgttagaaacaagattgcattcctcaggacacagtacaatgaacaaataaacaaagtcaagcaaggatttgccttgagtaccttgcctccagtccagcttcctcctccaccacccagtcctgagatactgatgcagcagttcttaggaagaccccttgtgaaagaatctttctttagacccatacttactgttcctcaaatgcctgcagtttgcccgggagtcgtctctgcaactggccaacctagagcccccctgatgactggcatagcctgggctctgccagcgcctgtgggagacgctgtgcctcccagtgcaggtctgcggagtgatccctccatcatgaattgggagagaattacagacaggctgaaaactgcctttccacagcaaaccagaaaggaacttacagatttcttacggaaattgaaggatgcttatggaaaatccttgtctgaactgacatttgatgaaattgtttgcaagatttcccagtttattgaccccaaaaagtctcagagtcaaggaaaatcagtgtcaaatgttaattgtgtttcacctagtcattctccatcacagcctgatgctgcccagcccccaaaaccagcctggaggccactcacttcacagggtcctgccacatgggaaggagccagtaatccagatgaggaagaggaagaagaagagccttgtgtgatctgtcatgagaatctgtctccagaaaatctttcagttttgccttgcgctcacaaattccatgctcagtgcattagaccatggttgatgcaacaggggacatgtccaacgtgcagactccacgttttgctaccagaagaattccctggtcaccccagccggcagttgcccaagatctgatacaaggtacccatgaagagattatgaactacttgaaggtggagactgtacggtggtgtgttggagctggcttgtaatgtcttatgagtgacaatcgttagtttgaggaattttgtgagacagttgtcaaattgttgctagcttgaaatctgcggcaattggagtatttacaccatagaaatgctataagtgaagacctacctttcccttaagagctagttgttaaacctttaccagcataccactggaccttgtctaaaatttctttgtgttcccagtgtcttgcccagtagatacaagataaatattgccagaatcagatatcaggaagtagtaagaaaaggagttaatatgcaaactaaatcactcgctcaattgaataattgagatcttctgttcatttgttccttggaccttaatcatttgcattttggagaaaattttttctgctttaaaagtctgtaatttcagtttttgtgtcggggagagggaaaaactatttgtctgtagttgctttttgtgacaaagtgaatacccactgggctaagtttcatatctaaagcttgtcactaagaattttcatttttaggggtcaaaaacctattttgaaaatagtgttgtgtgaatgctgtaagtgttgtacatgtctctggtttcagaattaaaagaattcagagtt

SEQ ID NO: 17515 - protein, 1208 aa, Homo sapiens
MDSLPDEFFVRHPAVEDQRKEETENKLEKSSGQLNKQENDIPTDLVPVNLLLEVKKLLNAINTLPKGVVPHIKKFLQEDFSFQTMQREVAANSQNGEEIVPALTLRFLITQLEAALRNIQAGNYTAHQINIGYYLTLLFLYGVALTERGKKEDYTEAENKFLVMKMMIQENEICENFMSLVYFGRGLLRCAQKRYNGGLLEFHKSLQEIGDKNDHWFDIDPTEDEDLPTTFKDLLNNFIKTTESNIMKQTICSYLDCERSCEADILKNTSYKGFFQLMCSKSCCVYFHKICWKKFKNLKYPGENDQSFSGKKCLKEGCTGDMVRMLQCDVPGIVKILFEVVRKDEYITIENLGASYRKLISLKITDTDIRPKISLKFNTKDEMPIFKLDYNYFYHLLHIIIISGTDIVRQIFDEAMPPPLLKKELLIHKNVLESYYNHLWTNHPLGGSWHLLYPPNKELPQSKQFDLCLLLALIKHLNVFPAPKKGWNMEPPSSDISKSADILRLCKYRDILLSEILMNGLTESQFNSIWKKVSDILLRLGMMQEDIDKVKENPIENISLDYHQLSVYLGIPVPEIIQRMLSCYQQGIALQSITGSQRIEIEELQNEEEELSPPLMEYNINVKSHPEIQFAEINKDGTSIPSESSTESLKDLQEVKSKQRKKKKTKNKKNKDSKEDQVPYVVEKEEQLRKEQANPHSVSRLIKDDASDVQEDSAMEDKFYSLDELHILDMIEQGSAGKVTTDYGETEKERLARQRQLYKLHYQCEDFKRQLRTVTFRWQENQMQIKKKDKIIASLNQQVAFGINKVSKLQRQIHAKDNEIKNLKEQLSMKRSQWEMEKHNLESTMKTYVSKLNAETSRALTAEVYFLQCRRDFGLLHLEQTEKECLNQLARVTHMAASNLESLQLKAAVDSWNAIVADVRNKIAFLRTQYNEQINKVKQGFALSTLPPVQLPPPPPSPEILMQQFLGRPLVKESFFRPILTVPQMPAVCPGVVSATGQPRAPLMTGIAWALPAPVGDAVPPSAGLRSDPSIMNWERITDRLKTAFPQQTRKELTDFLRKLKDAYGKSLSELTFDEIVCKISQFIDPKKSQSQGKSVSNVNCVSPSHSPSQPDAAQPPKPAWRPLTSQGPATWEGASNPDEEEEEEEPCVICHENLSPENLSVLPCAHKFHAQCIRPWLMQQGTCPTCRLHVLLPEEFPGHPSRQLPKI

SEQ ID NO: 17516 - DNA, 2268 bp, Homo sapiens
  CDS (7)..(987)
gtgaagatggcggcagtggtggaggtggaggttggaggtggtgctgctggggaacgggagctggatgaggttgatatgtcagatctctctccagaagagcaatggagggtcgagcacgcacgcatgcatgccaagcaccgtggccatgaagctatgcatgctgaaatggtcctcatcctcatcgcaaccttggtggtggcccagctgctcctggtgcagtggaagcagaggcacccacgctcctacaatatggtgaccctctttcagatgtgggttgttcccctctatttcacagtgaagctgcactggtggaggttcctagtgatctggatcttgttctctgctgtcacagcctttgttaccttccgagccacccgaaaacctctagtacagacaaccccaaggttggtttataagtggttcctgctaatctataaaatcagctatgccactggcattgttggctacatggctgtcatgtttaccctctttggtcttaacttattattcaagatcaaaccagaagatgccatggactttggcatctcccttctcttctatggcctctactatggagttctggaacgggactttgcagaaatgtgtgcagactacatggcatctaccatagggttctacagcgagtcgggcatgcctaccaaacatctttcagacagtgtgtgtgctgtgtgtgggcagcagatctttgtggacgtcagtgaagaggggatcattgagaacacgtataggctgtcctgcaatcatgtcttccacgagttctgcatccgtggctggtgcatcgtgggaaagaagcaaacgtgtccctactgcaaagagaaggtagacctcaagaggatgttcagcaatccctgggagaggcctcacgtcatgtatgggcaactgctggactggcttcgatacttggtagcctggcagcctgtcatcattggtgtagtccaaggcatcaactacatcctgggcctggaatagtgatgaagagcatcagtggaaaacccaccccacacgccatggacctcagggcactctcctccctgcccacaaagacctcctgggtgggaaagactcaaaggggcgcttgggccactcaggacccctccggctgtgtcggactggggagggatatgatggagagccagccagtggggctgtcagcagtggggggctttttaaaagaaaactattttgatgaatatatttaaaaaacctttttttattgtggagcataggaattgcccccctccaggcttcaccctccctgcctaagcagggtgggggcagagccatgacatttttggtttaaaggagccttctcatctctggccgagaacactgctgggctcccaggtagctgaaggcctcagcccacccactcccttcttccctgtgtggggctcaagcctggtgcacttagtatagaagagctaacgtactcaggcttgtgccacgggtgagcactgaggccccaggtgtcctccctcccccactgtctgggacacaggacaggtgttgcgtctgactctgtctccccctgtccaagagctataggctggttgaggcaagtggaaccttatcagtgacttggccaacaagggaagccttggggcctcagaattcattgaaaatttgttttgggacaactggaagaatcagcaccatggatactcgcccgtgggcagggctgtggtcagccaagaatagaggtcatatagttgggccatggggcaattgttggcagccatgactgacggccccttgtgcaagctcattcttcagtggatccttcagtggagtggtgacacgtgccagcggtcactctgccacatcacttccttcttgaaagcctaagagtgcgtatgcgtgtgtgtgtgtgtgtgtgtgtacgtgaggcagaagaatatgacagatgtcagcttctccctgtgtcagatgatatgtccttgaagctggcaggggattcccagtccagggaatatccctacatgatttttgtcattcatgggtcctccctgggcctgacaacgggagtggtgggtgggtgagaacaggttctgagagggggcttctaggaaggccccagccctagtcctaggcgacttgaataaagtgggaggtcaaacatgggccttcggcattgggtttctagggaatatggctcagtagggcctgccccttcaagggcagcaagaacgaagcaggatgttgtcactcccgtctgaataaagctccatgagctgggttggaaagctg

SEQ ID NO: 17517 - protein, 327 aa, Homo sapiens
MAAVVEVEVGGGAAGERELDEVDMSDLSPEEQWRVEHARMHAKHRGHEAMHAEMVLILIATLVVAQLLLVQWKQRHPRSYNMVTLFQMWVVPLYFTVKLHWWRFLVIWILFSAVTAFVTFRATRKPLVQTTPRLVYKWFLLIYKISYATGIVGYMAVMFTLFGLNLLFKIKPEDAMDFGISLLFYGLYYGVLERDFAEMCADYMASTIGFYSESGMPTKHLSDSVCAVCGQQIFVDVSEEGIIENTYRLSCNHVFHEFCIRGWCIVGKKQTCPYCKEKVDLKRMFSNPWERPHVMYGQLLDWLRYLVAWQPVIIGVVQGINYILGLE

SEQ ID NO: 17518 - DNA, 4113 bp, Homo sapiens
  CDS (171)..(2096)
tgaggcgcgggaggcccgcgccccgcggctcgctgtgcgtgggagggcgcgagcgaacgcgggcgaggagcggccgagccgctgaagaggagctgggcgccggccgcccggccgcgctcggcccgcggatcgcctccgcccggtcttcgccggccccggcccctggcgagatgccgtgtggggaggattggctcagccacccgctgggaatcgtgcagggattcttcgcccaaaatggagttaatcctgactgggagaagaaagtaattgagtattttaaggaaaagctgaaggaaaataatgctcctaagtgggtaccatcactgaacgaagttccccttcattatttgaaacctaatagttttgtgaaatttcgttgcatgattcaggatatgtttgaccctgagttttacatgggagtttatgaaacggttaaccaaaacacaaaagcacatgttcttcattttggaaaatatagagatgtagcagagtgtgggcctcaacaagaacttgatttaaactctccacgaaataccactttggaaagacagactttctattgtgttccggtgcctggggaatctacgtgggtaaaagaagcctatgttaatgcaaaccaagctcgagtcagtccctcaacatcctacactcctagtcgccacaagaggagttatgaagatgatgacgatatggacctacagcccaataagcagaaagaccaacatgcaggtgccagacaagcagggagtgttggtggtcttcaatggtgtggagagccaaaacgtttagaaactgaagcttctactgggcaacagctgaactctctgaacttgtcttctccttttgatttgaattttccattgccaggagagaagggccctgcatgccttgtgaaggtttatgaagattgggattgtttcaaagtaaatgacattcttgagctatatggcatactgtctgtggatcctgtgctgagtatactgaataatgatgaaagggatgcctctgcactgctggatccgatggagtgcacagacacagcagaggagcagagagtacacagtcctcctgcttcattagtgccgagaattcatgtgatcttagcccagaagttgcaacacatcaacccattattgcctgcctgccttaacaaagaggagagcaaaacctgtaagtttgtttcaagtttcatgtccgaattgtctccagtcagagcagaacttcttgggttccttactcatgcccttctgggggatagtttggctgctgaataccttatattacatctcatctccacagtatatacaagaagagatgtccttccactaggaaaatttacagttaacttgagtggttgcccacggaatagtaccttcacagaacacttgtatcgaattattcaacatcttgttccagcatcttttcgtctgcagatgactatagagaacatgaaccatttgaaattcattccccacaaagactacacagccaatcgcttggtcagtgggctcctccagctgcccagcaatacttcccttgtaatcgatgagactctcctggaacaggggcagctggataccccaggtgttcataatgtgacagccctgagcaacctcataacgtggcagaaggtggattatgacttcagctaccatcagatggaattcccctgcaatattaacgttttcattacttcggaggggaggtcactcctcccggcagactgccagattcacttacagccccagctaattccaccaaacatggaggagtacatgaacagccttctctcagcggtgctgccttccgtgctgaacaaattccgcatttatctaactcttttgagattcttggaatatagcatatctgatgaaataaccaaggcagttgaagatgactttgtggaaatgcggaagaacgaccctcagagcatcactgctgatgatcttcaccagctgctcgtggtggctcggtgtctgtctctcagtgctggtcagacaacgctgtcaagagaacgatggctgagagcaaagcagctagagtctttaagaagaacgaggcttcagcagcaaaaatgtgtgaatggaaatgaactttaaagatgtaatacctatgaagagtaatgggcaaactgtagccacataattgtaaaattcagatattcatttataccacattgttttataggtaatttctatcacaaaccagtgacatttcctgaaatcaagcctggtaacacctgatgtttatatgatattcagtaaggacttttaccttactgatttcatggagcttttgaagtttgttttataataattatataaattagtaatgatgtaaaaaaagtatttgatattaaaagtttaatattgataatgttgctgattgtaccatttccttagcttcagctgagtcataggccagactgttgaaatgctgaaatgaagaaggttgttgcagtttcaaagtcagaggaatcgtgcttcggatttcttatgttttctagttctctgtttttccagttcacagtgggttggggtgcattcagtagtccatctttggggaacggaggcgtacttgccattgattcacatgactacatgaaattctgtactgtcatttcccagatgtttggccacagaaactttttcccacttaacatttgttaacagcctgcaaaactaaacttgtacatggcagtggttcccagacttttgtattttatggaccggtagtaatatttccaaaaatctggggtactataaggttgccaatttaccttgccaagtaatccgaataaatcactgtattatcaccatttttttcataaaaggaaaggacaatctatctctgaataagaggagtcctttaaacggaatgaatgtggcttttgggggcaaaagaaaccaagacactacattgtctttattttctcctatcccagtgcatttgagaaccatgcataagggaatgctgtgctacaaagctgtgcccaaatatgaaaacaaaataggaaacttaaaaagcaataccccctttagaaagtttttattttcttaaatgtcattgagttgctttgattctattggatttttggcattttttatgggatcatcagttggttccaagtatgttagatcagctaacatctgctactccagtaacagcctcgtacaactgcaggtaggttttctccagaccaattagttttaatagagcaaactaacaacagactgtagtagcatggttatggcaaccagaatcttcagaaaggttaggacattactttttaagctgtcagtggtatcaaataacttacctagttggaggcagataaaggatcccttacgttttttcctataaggcctaaattgaaattgttaaccaaggaaacagggtcagccttgaaaaatcaaggaattcattgtacctaataactgaagtaaaaataactagttgttcaacttttcctaaactcaaatctatttttataaacaaatgtaaataatgtttatattagagttgaactggttttcatttttataactggtagactagaccttccttaaacttttagaaataaaatgaaggcttcactggatttgtgaggataaaatacattttctttaattgtcctagagcaaagtacattagtcaccatgtgttttttgtgccaatgtaacttgtaatttaccaaagaaaaatacatacattgcttggtcttgcagaaaagttcccttgaaagaacctttccaataaataaaacgtcccaaattagcagtaccttgggctgtttttcatgagtaagaagattcaccatcccatgtgatctgtgtggaaaaagaccatgtcctcttggtggaagacatgagagagctgaactgaagtggaggaggtggtgcaagagggaccttcctgctcaaggcccgcccaggcagcggaatagagtgcagtgcttggctgcagaaaccctttgtccctcacctatatatacacggacagtcaagtttgttgctctaacgtaaggcacagcgttaatcctgtatggccaggaaactgagtagactcctgtgtaaccctgtttggaactttgccttcttaaaatgatttttc

SEQ ID NO: 17519 - protein, 642 aa, Homo sapiens
MPCGEDWLSHPLGIVQGFFAQNGVNPDWEKKVIEYFKEKLKENNAPKWVPSLNEVPLHYLKPNSFVKFRCMIQDMFDPEFYMGVYETVNQNTKAHVLHFGKYRDVAECGPQQELDLNSPRNTTLERQTFYCVPVPGESTWVKEAYVNANQARVSPSTSYTPSRHKRSYEDDDDMDLQPNKQKDQHAGARQAGSVGGLQWCGEPKRLETEASTGQQLNSLNLSSPFDLNFPLPGEKGPACLVKVYEDWDCFKVNDILELYGILSVDPVLSILNNDERDASALLDPMECTDTAEEQRVHSPPASLVPRIHVILAQKLQHINPLLPACLNKEESKTCKFVSSFMSELSPVRAELLGFLTHALLGDSLAAEYLILHLISTVYTRRDVLPLGKFTVNLSGCPRNSTFTEHLYRIIQHLVPASFRLQMTIENMNHLKFIPHKDYTANRLVSGLLQLPSNTSLVIDETLLEQGQLDTPGVHNVTALSNLITWQKVDYDFSYHQMEFPCNINVFITSEGRSLLPADCQIHLQPQLIPPNMEEYMNSLLSAVLPSVLNKFRIYLTLLRFLEYSISDEITKAVEDDFVEMRKNDPQSITADDLHQLLVVARCLSLSAGQTTLSRERWLRAKQLESLRRTRLQQQKCVNGNEL

SEQ ID NO: 17520 - DNA, 3260 bp, Homo sapiens
  CDS (7)..(1506)
gtcgccatggcctccgtcgcccaggagagcgcgggctcgcagcgccggctaccgccgcgtcacggggcgctgcgcgggctgctactgctctgcctgtggctgccaagcggccgtgcggccttgccgcccgcggcgccgctgtccgaactgcacgcgcagctgtcgggcgtggagcagctgctggaggagttccgccggcaactgcagcaggagcggcctcaggaggagctggagctggagctgcgcgcgggcggcggcccccaggaggactgcccgggcccgggcagcggcggctacagcgcaatgcctgacgccatcatccgcaccaaggactccctggcggcgggtgccagcttcctgcgggcgccggcggccgtgcggggctggcggcaatgcgtggcggcctgctgctccgagccgcgctgctccgtggccgtggtggagctgccccggcgccccgcgcccccggcagccgtgctcggctgctacctcttcaactgcacggcgcgcggccgcaacgtctgcaagttcgcgctgcacagcggctacagcagctacagcctcagccgcgcgccggacggcgccgccctggccaccgcgcgcgcctcgccccggcaggaaaaggatgcgcctccacttagcaaggctgggcaggatgtggttctgcatctgcccacagacggggtggttctagacggccgcgagagcacagatgaccacgccatcgtccagtatgagtgggcactgctgcagggggacccgtcagtggacatgaaggtgcctcaatcaggaaccctgaagctgtcccacctacaggagggaacctacaccttccagctgaccgtgacggacactgccgggcagagaagctctgacaacgtgtcagtgacagtgcttcgcgcagcctactccacaggaggatgtttgcacacttgctcacgctaccacttcttctgtgacgatggctgctgcattgacatcacgctcgcctgcgatggagtgcagcagtgtcctgatgggtctgatgaagacttctgccagaatctgggcctggaccgcaagatggtaacccacacggcagctagtcctgccctgccaagaaccacagggccgagtgaagatgcagggggtgactccttggtggaaaagtctcagaaagccactgccccaaacaagccacctgcattatcaaacacagagaagaggaatcattccgccttttggggaccagagagtcaaatcattcctgtgatgccagatagtagttcctcagggaagaacagaaaagaggaaagttatatatttgagtcaaagggtgatggaggaggaggggaacacccagccccagaaacaggtgcagtgctacccctggcgctgggtttggctatcactgctctgctgcttctcatggttgcatgccgactacgactggtgaaacagaaactgaaaaaagctcgtcccattacatctgaggaatcggactacctcataaatgggatgtatctatagtaatgtaatttcaataccttggggcagggacatgttttgtttataatttatacatctattaagttctggatatttacagcttcttttgtttttaattgggccagaagattctgcaaatcccaaatctttctttattatttattgtaaaaaaagtttccttagaagtcataaaatattttgaaatttagagaggaattcatgattaaagattcctaaaaatataattctgatttatgtaagctgtccctgaaaatagaaatgtgtacttagctgagagaaaattcagcatctcaggaggtggtattaggatgactgtgttaacccattaccttttagaagccaactgttggccccttaccatgctggactgctataggcccagcttccccttgttctgtggcccttttcttcctccttgaagctcccagtattctttttcttttcccctctaaacctgtttctgagagtggatctcgagcaagttcatgccttcaatcagatgttacttagggtgggtatacctaaattataaaccttatgtacaagtcagtaagccttagggaaggtgagtgtgggtccttcctaatccctctgacgtcatgtcatataggtggctgcctccttagactgacctttgggagaaaaaaaccccagactttgaattagtaacagctctaagatggtcatgcagtgagataggaaatcaagatggaagcagagaatctggcatgccaaaaactaacagaaacttagttgaaggcaaagagagcaaggagaacgtttaatacttcattacatcaaatcaacactgctccatggtgagagcacagcaactcatttatatatatatatataggctttgttgatgaaaaacgacaattgaagagaggacgttgagtggattcctgggtacagcttttgtaaaaatgtcaccatggctttcatccaatggaatgagtcgatgttttttaatgctataaaatgttagaatgtgccatcagctaatgccaggcttacgtatttctagaccataaagcagtttttcacaaattcatctttacagaaaaccagcatctagcttagcatctttccccttttaatttgtaggcttttaaaggcaaatcattcccaccatcacttaacgccgggattatacacattctagaaatgattctgagaggagtgtatagtatggtgcctatctacactcacatgatattcttattcacgttttttttaaccataagtggcaaatattttaaaatatttgaaaaacactccagaatctagtacgctttatttttagactgaacctaaagtaggttgctcttttaacaaagggtttaattcgggtggggaatataacatatcaaaatacatgaacaaatggaaagttacttctagaaaagcaaagaaattgggtatcatttttgtttcttgggaagctaattttgttgaatgtttagaattgagcaaagatgtaaatttttgaagggcagtttagaaaaattaactttgtgaatgaacttaagatgtctgtactctatatgtgatgctgtgcagtttgtttttatatggaaagatgtcaactatagccataaccaataaaataaaaactgatgaggcatgcagctttcagcacatcttttatacatgaagaaattaattttgtgttgctatggtgttgaaatatccaagatgttctgtatctatgtaaacatgattcctttaataaattgtattttattatt

SEQ ID NO: 17521 - protein, 500 aa, Homo sapiens
MASVAQESAGSQRRLPPRHGALRGLLLLCLWLPSGRAALPPAAPLSELHAQLSGVEQLLEEFRRQLQQERPQEELELELRAGGGPQEDCPGPGSGGYSAMPDAIIRTKDSLAAGASFLRAPAAVRGWRQCVAACCSEPRCSVAVVELPRRPAPPAAVLGCYLFNCTARGRNVCKFALHSGYSSYSLSRAPDGAALATARASPRQEKDAPPLSKAGQDVVLHLPTDGVVLDGRESTDDHAIVQYEWALLQGDPSVDMKVPQSGTLKLSHLQEGTYTFQLTVTDTAGQRSSDNVSVTVLRAAYSTGGCLHTCSRYHFFCDDGCCIDITLACDGVQQCPDGSDEDFCQNLGLDRKMVTHTAASPALPRTTGPSEDAGGDSLVEKSQKATAPNKPPALSNTEKRNHSAFWGPESQIIPVMPDSSSSGKNRKEESYIFESKGDGGGGEHPAPETGAVLPLALGLAITALLLLMVACRLRLVKQKLKKARPITSEESDYLINGMYL

SEQ ID NO: 17522 - DNA, 2830 bp, Homo sapiens
  CDS (104)..(2830)
ttatgctgcactttgttgtgaaatcaagaaattaaaatatgaggctgaaactaaattttacaatggtctcttgttttatggagaaggagctacagatgccagcatggtggaaggtgattgccaaattcaaatggggagatttatttcattcttacaggaactgtcttgctttgttacgaggtgctatgaagtggtgatgaacgtagtccaccagttggctgccctctatatcagtaacaagattgcacccaaaattatagagacaactggagttcattttcagactatgtatgagcacttgggagaactgctaacagttttgctcaccctggatgaaattattgataatcatatcacactgaaagaccactggactatgtacaaaaggttactgaaatctgtccatcacaatccttcaaaatttggaattcaggaagaaacattaaagccatttgaaaagttcttgctgaagctagaagggcaattactggatggaatgatattccaggcctgtatagaacaacaatttgattctctcaatggaggagtatctgtgtcaaaaaatagtacttttgctgaggaatttgcacatagtattcagtcaatttttgcaaatgtagaagccaaacttggagaaccttctgaaattgaccagagagacaagtatgttggaatttgtggactctttgtattgcactttcagatttttcgaactattgataaaaagttttataagtctttattggacatttgtaagaaggtaccagccatcactctaactgctaatattatttggtttcctgataattttctgatccagaaaataccagcagctgccaaactgctagacagaaaaagtcttcaagccattaaaatacacagggatacttttctacaacagaaagctcaatcacttaccaaagatgtacagtcttactacgtctttgtgagctcatggatgatgaaaatggaatctattttgtctaaagagcagagaatggataaatttgctgaagatctcaccaatagatgtaatgtttttatacagggcttcttgtatgcatatagtattagtaccattattaaaaccacaatgaatctctacatgtccatgcaaaagccaatgaccaaaacctcagttaaggcattgtgcaggcttgttgaacttctcaaggcaatagagcatatgttctacaggagaagcatggttgtggctgattcagtttcacatataacacagcaccttcaacatcaggctcttcattctatttctgtggccaagaaaagagtgatttctgacaaaaaatacagcgaacagcgtcttgatgtgctctctgctctagttttggctgaaaacactctaaatggaccaagcacaaagcaacggcgacttattgtttctttggcactaagtgttggcacacaaatgaaaacatttaaagatgaagaactctttccacttcaagtagtcatgaaaaaactggatcttattagtgaacttagagaacgagtccaaacacaatgtgactgttgttttttatactggcatcgagctgtcttcccaatttatttagatgatgtatatgaaaatgctgttgatgcagccagattacattacatgttcagtgctttgcgcgactgtgtacctgctatgatgcatgcaaggcatttagagtcctatgagatacttctggattgctatgacaaggaaattatggaaattttaaatgagcatttgctggacaaattatgcaaagaaatagagaaagatctgcgactttctgtgcatactcatttaaagctggatgaccgaaaccctttcaaagttggcatgaaagacctggctctttttttctctctgaatccaattcggtttttcaatcgtttcattgacattcgggcttacgtaactcactacctagacaagactttctacaatctaacaactgtagcccttcatgactgggccacttatagtgagatgagaaacttagctactcagcgttatggactggttatgacagaggcacatcttcccagtcagactttggaacagggccttgatgttttagaaattatgagaaacattcatatatttgtgtcccgatacctctataatctcaacaatcagatttttattgaacgaacaagcaataacaagcatttgaatactattaatattcggcatattgctaattcaattcgaacacatggcacgggaattatgaatacaactgttaatttcacctaccagtttttgaaaaagaagttctatatatttagccaatttatgtatgatgaacacatcaaatccagattgattaaagatattcgatttttcagggaaattaaggaccaaaatgatcataagtatccttttgatagagcagaaaaattcaatcgaggcatcagaaaacttggaataacacctgagggacagagctaccttgatcaattcaggcaactcatcagccagattggtaatgctatgggctatgtacgaatgataagatctggtggtcttcattgtagcagcaatgccattagatttgttcctgatcttgaagatattgtaaattttgaagaactagtaaaagaagaaggtcttgcagaagaaacattaaaagcagcaaggcatttggattcagtcctcagtgatcacacacgaaattctgccgaaggcacagaatatttcaaaatgcttgtagacgtttttgctccagaatttcgaaggccaaagaatatacatctccgaaatttctatataattgttccccctctgaccctcaactttgtagagcattccattagttgcaaggaaaaattaaat

SEQ ID NO: 17523 - protein, 909 aa, Homo sapiens
MVEGDCQIQMGRFISFLQELSCFVTRCYEVVMNVVHQLAALYISNKIAPKIIETTGVHFQTMYEHLGELLTVLLTLDEIIDNHITLKDHWTMYKRLLKSVHHNPSKFGIQEETLKPFEKFLLKLEGQLLDGMIFQACIEQQFDSLNGGVSVSKNSTFAEEFAHSIQSIFANVEAKLGEPSEIDQRDKYVGICGLFVLHFQIFRTIDKKFYKSLLDICKKVPAITLTANIIWFPDNFLIQKIPAAAKLLDRKSLQAIKIHRDTFLQQKAQSLTKDVQSYYVFVSSWMMKMESILSKEQRMDKFAEDLTNRCNVFIQGFLYAYSISTIIKTTMNLYMSMQKPMTKTSVKALCRLVELLKAIEHMFYRRSMVVADSVSHITQHLQHQALHSISVAKKRVISDKKYSEQRLDVLSALVLAENTLNGPSTKQRRLIVSLALSVGTQMKTFKDEELFPLQVVMKKLDLISELRERVQTQCDCCFLYWHRAVFPIYLDDVYENAVDAARLHYMFSALRDCVPAMMHARHLESYEILLDCYDKEIMEILNEHLLDKLCKEIEKDLRLSVHTHLKLDDRNPFKVGMKDLALFFSLNPIRFFNRFIDIRAYVTHYLDKTFYNLTTVALHDWATYSEMRNLATQRYGLVMTEAHLPSQTLEQGLDVLEIMRNIHIFVSRYLYNLNNQIFIERTSNNKHLNTINIRHIANSIRTHGTGIMNTTVNFTYQFLKKKFYIFSQFMYDEHIKSRLIKDIRFFREIKDQNDHKYPFDRAEKFNRGIRKLGITPEGQSYLDQFRQLISQIGNAMGYVRMIRSGGLHCSSNAIRFVPDLEDIVNFEELVKEEGLAEETLKAARHLDSVLSDHTRNSAEGTEYFKMLVDVFAPEFRRPKNIHLRNFYIIVPPLTLNFVEHSISCKEKLN

SEQ ID NO: 17524 - DNA, 2504 bp, Homo sapiens
  CDS (166)..(675)
aggaaatttaaactgaagccgcggccgaaaacgccaagagattgatgctgtagctgccctgagataaccaggactgtggaatcgggaagagctcatggagctcgcgaatgtaatacggaggcctctgaggaaggagtacggaggccgagaaggagccggcatttgatgagcgaaccgggaaagggagacgattgcctcgagctggagagttccatggctgagagtaggctccgggccccggacctaggagtttccaggtgtctaggaaaatgccagaagaactcaccaggtgccaggaagcatcccttttccggaaagtccttttacttggatctgcctgctggcaagaatctccagtttttgacgggggccattcagcaactgggtggggtaattgagggttttctgagcaaagaagtaagttacatcgtgtccagccgcagagaagtaaaggcagagagcagtgggaaaagccatagaggctgccctagccctagccccagtgaggtcagagtggaaacatcggccatggttgatccaaaaggcagccaccccaggccttcacggaaacccgttgactcggtgcctctaagcagagggaaggagctgctgcagaaggctatcagaaaccaggtgagctggggcaagatgggacagagccggtggtctccagcatagggagggatttcactcttcttcccaggttcttctgaagcacccacacaaaatgcacactctgcgatatgtagtattgtcattatttccttcttctacatcaggtagtggaggctcagacaagttatttagccattcacctagagagtaagtgttgaagccagagccacctccaactctggagcctaccaagagaactgtggggatgtgggatgtggcgggacagggttgctgggtacagaagccagacttcttttacaagtaactctaggctgggtgtggtggctcacgcctataatcccagcactttgggaggctgaggtgggtggaccacttgaggccaggagttcaagaccagcttggccaacatggcgaaaccccatctctaccgaaaaattagcagggtgtggtggcacgcacctgtagtccccgctacgcaggtggctgaagcagaagaatcacttgaacctgagaggtggaggttgcagtgagccgagattgtgccactgcactccagcctgggcgatagagctagactctgtctcaaaaaaaaaacaaaaaacaagtaactctttattccttgtgtgaaaatccagggctgttaaagtttagtggcaggaggaggagttaaggtgatcttgtgagaagagtcatgctggtgacatcaggaggggtacatggctgtgatgggggaggtggtgctgctggactgagccagtggagggggaagatctgcagctagcatagtttcatgctcagtgaggatgatggtcaccgtgtttgttgtgtacttactgtgctgagagctttcctcgcagaggccctcccaacgaacagctctctcagaagcatctgttccttcctggtcacgaggtggccagagcacaatgtataggcagaccagtggtccttcctctcccaatgtggccatgtggaggacaggatgtcttcctgggggttgggatggactctctgggcactgtactctctctcctacctgcctccctgcagtccctcccatggatgactcaggcctcccagaagcaatttctatctgtccccttcactttcaggccttggggagtctctgctcctacctgactctgtgttgtaatttcaggggagcatcagtggaggaggcagtgggggcagcagcagcctcctgaccaatgcccgctcttggggagtgaggattctgcacgtggatggtaccctttctgtgctgggctcctgtggagggagaattggtgactttgaccaggagtgtcagcttttagaaggatcatggtcatgtgagcttctggtcaccggaagccagaaatactcagctgccatgttgatccacaaaggtgggaggatgtggggaagggggaaagcggtgaggacgcagagtgcaggctgtggcctcggcatcccgcaggaggtccctagaacatgccgtttcatgtcacctgctacagctctcccccagctagtatgatgatccgttttacaaatgcagaaatgatcttaatattcatgaccactggccaggcgaggtggctcacacctgtaatcccagcactttgggaggccaaggcgggtggatcacaaggtcaagagttcgagaccagcctgaccaacgtggtgaaaccccgtctctactaaaaatagaagcattagccgagcctggtggtgcgtgcctgtaatcccagctactcaggaggctgaggcaggagaatcacttgaacccaggaggcagaggttgcagtcagccaagatcatgctactgcactccagcctgggtgacagagcgagactccgtctcaaaaaaaaaaaacgacaaatat

SEQ ID NO: 17525 - protein, 170 aa, Homo sapiens
MSEPGKGDDCLELESSMAESRLRAPDLGVSRCLGKCQKNSPGARKHPFSGKSFYLDLPAGKNLQFLTGAIQQLGGVIEGFLSKEVSYIVSSRREVKAESSGKSHRGCPSPSPSEVRVETSAMVDPKGSHPRPSRKPVDSVPLSRGKELLQKAIRNQVSWGKMGQSRWSPA

SEQ ID NO: 17526 - DNA, 3286 bp, Homo sapiens
gatcaccatgacagatataataacataatagtaacagaaaagtttgaaaaatgcaaattaccaaaatgtgagctcatggttttggagaaaatggttccaatagactcaccagatgcagggttgccacaaatcttcaatttgtaaaaaacgcaatatctctgaaccacagtaaagttgaagtgcaacaaaattaggtatgcctgtatggaaacgcagagctcacacccttctgatgaacagacagaagtgtcagatccttttctatgctagcaaaggattttaagggtttggaattctctaaaagtgtaaagctcttaggagggcgttacttggcaaagcagtgctttatcccattctcttgtttgcctgttcaaacttcccacccattgtagacccacttgctgtgttattgcaggttaagcccccaagacccttttctctcaccttttttgttcacttcccatcccctttccttctcaggtcatcctccatgcccttctgatgtccacatgtctcttcattttcttctcaggcctcctctttctctcaccatctaagttattgaaattcttgaaatcctaagcaggcctggcactgagaggtaagcacctgagagtgtcagtcttccctagataaatggaactgtgtgcagatctgggactgctggaagggtgtggggtagggatttaaggatggcgcaagtagggtggggctaaaaaagaccttgtcttctttatataggagcatcgagattaaagggtgtgaggtaggggtttaaggatggcgcaagtcaggtggggctaaaaaagaccttgtcttctttatataggagcatcgagattaaacactgaattcagcagtgttcaattcatttcttattttccactgtatttcatttcaacccatcctctatattttgtgagcccaaagcctttagatatgtgtagaggaaggtgtgatacagctttcaacttcttgaaatttgcccaagaaatactttgtatcatgaggtctgcagttatttatacaaatccctgaaaatatttcatggcaaatctgtagcacccagttgagatgagaccaaactggaaaaatctctgtggctgtggttattgtcagttctgtaagatgaagatgggaccagtgacaagaatgtgcactatttactgagcactcacctgcacggggccatgtgcttttcagacattgcctctttcagtcttgagcacaatgccagttgtgccatcccctgacatatagatgagatgaagatccagacataaccagcaagggcagggctgggatgcgatccatgtgtgcctggttcccagggttcgcatgtttgcagtgttctctccataatggtttgccttaatgaagagaggattcaggatgtccagtttcagcctcactggctgggctggaatcttccattgacccttccactctacattcctccctggcctgggatgctcactcgagtgggcttctcgctgcgcttggccagtgggggttgccatcaggagacaacagggcatctgcttctccagggcatcccccagggcacagtgctttgtgactcaagggtctgcccctcttggtttccctaaacctcactcctctctttgtaaacagcccctttataaattacgcaccttgagggtgtcatctgctttctttcaggagcaggactgactcactagcatcactcctaaataatgtgaacttgttttgattttttgtttgaggcagagtctctcacagtgttcctaggctggagtgcagtggcatggtcttggctcattctgggctcaagcaatcctttcaccttagccatctcagtagctgggactataggcatgcgccaccatgctcggctaatttttaaaatatttgtagagatggggtcttgctatgttgccaggctggtcttgaactccagggctcaagtgatccttctgcctcggcttcctaaagtgttgggattacaggtatgagccactgcacctgcccaatgatgtgaacttttagtaagtcacttcagttatctgggcccaacttgctttacctgtcaagcagggaccatggtgcctggtctcccagattgtgaatgtcaaagaaaacaggtagagaggcactttggaagataaacactcctcagaatgggagctagcagtgtaattccacaaggcacagaatgggcattcactgcatagcctgactggaagtggagcatcctttgtgagaaaaggaaacctctgagacagtgaatatgttcccattttgaaaagcttgatgcaatcaaaatagaagaaagagcaccgctgaagagaataagagaagagatctttgttttgtttttgcttgtttctttgtggtagtgacagcgtatttcatgtaggaacctgtgacaaagctccccataataaacatcagaaagtcaaggatgatggttttggccaaggagcaaatgacacatgccacagctctcctggcaggtccccttttcgagattgtgtcctcccggataggactctcaagcagctgcaacaggcatcttccagctgggaaaggccacttgacctctttttctctttcgaaagccgggcagctgtgagtccaggcttgtcactcctgggtgcaggctcaggaattgaaggcgggtctgccaagccacacaccctcgttgaaacacctctgctctgtggccaggcttttcagcccctccccactccccatcagcagtggcttctggaatctccctgtctgtagaatgagaatagttacatcaaaatttcttcccaaggagctaattggaatattgtaatacaaatatttgcagagaattaatactgagagatgctaaaggagaatttagctcatgtaattactaatcagtgtcttttttccaggtactctgtaagggagctgaaacttccagcctttcttcctattcacaaacccacctttacccgcccccaatgctggactttggtttttcatattgcttttgcagaactttaaaacatttgaatctttccctgatgagtttttgtcctgaggggccagtgcagttttcttgccactttgttttcctctcatataacttttccctgtcaataaggcatttaggctgagagaaaaagttattgagcatgtgcatccaaatttgagatgattgttatttcattacctaatgactttaacttctttgatactgtgtttgtcttatgaatataatggctttctcactttaatgaaaagttatacaataaaattgaaaagt

SEQ ID NO: 17527 - DNA, 3040 bp, Homo sapiens
  CDS (35)..(604)
ggcgcgcggcgagctgagggtggcggcggtcgacatgttccaggtcccggatagcgagggcggccgcgccggctccagggccatgaagcccccaggaggagaatcgagcaatctttttggaagtccagaagaagccactccttccagcaggcctaataggatggcatctaatatttttggaccaacagaagaacctcagaacatacccaagaggacaaatcccccagggggtaaaggaagtggtatctttgacgaatcaacccccgtgcagactcgacagcacctgaacccacctggagggaagaccagcgacatttttgggtctccggtcactgccacttcacgcttggcacacccaaacaaacccaaggatcatgttttcttatgtgaaggagaagaaccaaaatcggatcttaaagctgcaaggagcatcccggctggagcagagccaggtgagaaaggcagcgccagaaaagcaggccccgccaaggagcaggagcccatgcccacagtcgacagccatgagccccggctggggccgcggcctcgctctcacaacaaggtcctgaacccaccgggaggcaaatccagcatctccttctactaagagaagccactgctccacccggagccagaccagaaactcaagagatagggtagccatgttttcatttccttttgcccaaatgagcggggtgggaagagggttagtcttatgtgagcctggctgctcagcgtctcctggccgtcatgacagctgcttggagacccgtgccttccagatggctgggagatgcctctgtggggatgaaatggggcacccctggccatcactcatgtgtagtccaggtttgagaggaactggaaggggggtgagggtggggaggtggggcagggcatggtccttggatcaacagcccgccagctgattggatgtctaggaatgactgaaagaaaccaaaacagcctgtccactgctgctgtgggatggaggaggcgtaagcagaaacactaacagtatattgacctcttagcagaaccgcttccattctggagatcacggctgctaaatccagcatccccacttcattttacccccagcatattgttctgtagtcttttcttgaaacatcttgattgcttttcctcggcagctttcaaaaaaccaaataataatagttatccgtcttctacttcatggaagattgttttggtgccctgaccctctgaagtgcccagttcctgccatctgaaacctcggcctgatctgatctcatgttggaatctgcctgtctttcacacagggctggtcttggtcctttacatgccagttttgcttgtgaattcttgcttttttcctctcatcagccttaagtttaggcgtttgttgttctccagtgatgtagacagttcccttcacaagtcacagttcttcccataaatgaggcccgctgacctctgcgggactttaaaaatctattcagatatttccgagtaagtggcttgtttaaattcttcctgtgtctttctttattccttaattggttggtggaaagaagagatgcttgggaaccttgggttcttaggtttggattctttaataatatctaaaaagctaaattttaaataccagctttacataaatgattgttgactctggtctgtttctgacacctttccagaaaaaagtcaattgttcaggtacaccaaagaggaagaagagctgtggaggccaccctctacaaagctttatagaacttctggatctaactcacaaacaagcttccagaagagactagagaccttaggccaggagatgaaggagttcagtagcaaagtcacacctgtccaattccctgagctttgctcactcagctaatgggatggcaaaggtggtggtgctttcatcttcaggcagaagcctctgcccatccccctcaagggctgcaggcccagttctcatgctgcccttgggtgggcatctgttaacagaggagaacgtctgggtggcggcagcagctttgctctgagtgcctacaaagctaatgcttggtgctagaaacatcatcattattaaacttcagaaaagcagcagccatgttcagtcaggctcatgctgcctcactgcttaagtgcctgcaggagccgcctgccaagctccccttcctacacctggcacactggggtctgcacaaggctttgtcaaccaaagacagcttcccccttttgattgcctgtagactttggagccaagaaacactctgtgtgactctacacacacttcaggtggtttgtgcttcaaagtcattgatgcaacttgaaaggaaacagtttaatggtggaaatgaactaccatttataacttctgtttttttattgagaaaatgattcacgaattccaaatcagattgccaggaagaaataggacgtgacggtactgggccctgtgattctcccagcccttgcagtccgctaggtgagaggaaaagctctttacttccgcccctggcagggacttctgggttatgggagaaaccagagatgggaatgaggaaaatatgaactacagcagaagcccctgggcagctgtgatggagcccctgacattactcttcttgcatctgtcctgccttctttccctctgcgaggcagtggggtgggattcagagtgcttagtctgctcactgggagaagaagagttcctgcgcatgcaagccctgctgtgtggctgtcgtttacatttgggaggtgtcctgtatgtctgtacgttggggactgcctgtatttggaagatttaaaaacctagcatcctgttctcaccctctaagctgcattgagaaatgactcgtctctgtatttgtattaagccttaacacttttcttaagtgcattcggtgccaacattttttagagctgtaccaaaacaaaaagcctgtactcacatcacaatgtcattttgataggagcgttttgttatttttacaaggcagaatggggtgtaacagttgaattaaactagcaatcacgtgctcagagcttt

SEQ ID NO: 17528 - protein, 190 aa, Homo sapiens
MFQVPDSEGGRAGSRAMKPPGGESSNLFGSPEEATPSSRPNRMASNIFGPTEEPQNIPKRTNPPGGKGSGIFDESTPVQTRQHLNPPGGKTSDIFGSPVTATSRLAHPNKPKDHVFLCEGEEPKSDLKAARSIPAGAEPGEKGSARKAGPAKEQEPMPTVDSHEPRLGPRPRSHNKVLNPPGGKSSISFY

SEQ ID NO: 17529 - DNA, 3397 bp, Homo sapiens
  CDS (1837)..(3075)
atcaggggatccccaaagaaagcaaggggaccaaggccgggactgctggggtgaaggtccgggaggctgagtaaggggacggaagggcacaggccatggaaaggaatgacatcatcaacttcaaggctttggagaaagagctgcaggctgcactcactgctgatgagaagtacaaacgggagaatgctgccaagttacgggcagtggaacagagggtggcttcctatgaggagttcaggggtattgtccttgcatcacatctgaagccactggagcggaaggataagatgggaggaaagagaactgtgccctggaactgtcacactattcagggaaggaccttccaggatgtggccactgaaatctccccggagaaagcccccctccagcccgagacgtctgctgacttctatcgtgattggcgacgacacttgccaagtgggccagagcgctaccaggctctactgcagcttgggggtccaaggctcggctgcctcttccagacagatgtgggatttggacttcttggggagctgctggtggcactggctgatcacgtggggccggctgaccgggcagcggtgctggggatcctatgcagcctggcgagcactgggcgcttcaccctgaacctaagcctgctgagccgggcagagagagagagctgcaagggcttgtttcagaagctgcaagccatgggcaaccccagatccgtgaaggaggggctcagctgggaggagcagggtctggaggagcagtctggtgggctccaggaggaggagaggctcctgcaggagctgctggagctgtaccaggttgactgatgcggcaagctaccctcagaggtcccagtggtcactggaggcagttttttggttgttgtcttgggggttctgcaggaccataataagaaacccacacctggttcccttctcaacttggaattttcagagcaaaaacaggaatcaagtcttccccacttctccagtccctcagtgtctcgctgttttgaactgtgtgtatccatggacagtcaagagctcaggaagttgagagcggttttgtttcccacccttagagtctgccaagcctctagcccactggccttgagagatgagtgtgtgcccaaccaaatgctggctataccagttacagcctccactcataaaagggaaaaagcaaaatctttatggtaaacaaacactgatctccacagctcttaacaagaatgtttatagccccaaaccaatgaatggacatgtaatcaacaaatgatcaaatactacatcatttgaggtgttgaattttcccctagagactcagttcttgtgcaggttgggcctgggaaagtcccaagccatcagctcaggtccagccagcctcccggatggccagatatgcaggagggtgggtttccttcatcccccaggttgatgaaagacttttccaccaggctggcagggcagggcctggagcactgaggcagagatctccctgcccgagcacctcggcccgcccttctcattccggtttcctttgacccattcttgggtgagcgccagtgttctagaaaggggagtaaaggccaggttctagaatggctttccccccccaccctgagatcaggtctggaatgttagaagggcatcttgtacatccactgggaataaattgccttgcacttggcggcttcctctgcagattgttgctgcttttcctggctgcataatcctttcctcatctagaggcttccgcttagcagagctttctaggagccctatgagcctttaatgccctggttttgccctgcccctctgacccctgcctccttcaggtatgcacctggccctcaccactgtgctcctgtgggcatgggggctccaggcctttgaaattgtggagaaggaaaacatttttcagaggaccccctgccctgctttcctgatgtttgaaaatgcagcctacctggccgacatgagctttgagcttccctgtcactgcaaacccgaagaggtgccagctgtagtctggttctaccaaaagcacctaggtagcagccacaccaaagtgctgacggactttgatgggcgggtgctgacggaggcagcccaggtacgtgtgggcagcgacatgctgacccgcttcagcatccgcatgttcagcttgttggttttcagggctcagtctgaggactcaggcctgtacttctgcggcacccgcaagggggactacttttacgcctacgatgtggacatccagaacagtgagggaatggtggccactttccaggacaagggccaggagccctttgcagatgaatactatgggcacctccatgtcttcaccaccttctgggaatggaccccctgtgaccgctgcggagtgcgtggggagcagtggcgcatcggcctctgctacctgcagagcccagacctctccccacgctacctcaaggccgtgcccgatgtggtgtcttgtggctcaagggctgtgccaaggaagctgcggaccaaggccagggaccacacgcctgaggtgctggttcggagctgcttagtaccctgtgagaagacaaagaccatccgggagggcgtgctggccatcattaactatgtgtccaaagtgggcagccggccctgggtgccccaggtgcccattcagttccaccagcagagactgggccatggactcatcatctcctgtcctggggcccggccagagcatgcagtggcctgggacaaagaccgccagcacctctaccgcacacagtacctgaagggtgtcaacaggtccatgagggtgttcattgaccacggcaaccagctccacatccgcttcacccagctggatgaccggggcatctactattgctggaggcggggtgtgctagttgctggcttccggctgggtgtgacatctcatgggcactacccagcctcgttctcagatcctgagactcgctcggctgtggagctcaccctgataggctacctgctcatcacagcagtctttgtcaccattcacttctgtcgttgctgctgctacttatttcactgttgtcccagcttctccccctaggagctctcttcagctctgaagaccagttgtccttcaatgtgtttgttaaatgataccagatgtctctgggtgggtaccctgggttgggacaggtggtaggaacatgtggacaaatctgttacagcctgctccccattttcatgggcaggtctgggacctgatctgagaagtggaggggcctgaggctggtgggagattggggactgagctcaggatggaagtagggcacatgtgtttcctgacttcacatttaggtcagagaaggaaagtgtgaactcagatttatccagtggtaaacactgatcagtgttgaatcatg

SEQ ID NO: 17530 - protein, 413 aa, Homo sapiens
MHLALTTVLLWAWGLQAFEIVEKENIFQRTPCPAFLMFENAAYLADMSFELPCHCKPEEVPAVVWFYQKHLGSSHTKVLTDFDGRVLTEAAQVRVGSDMLTRFSIRMFSLLVFRAQSEDSGLYFCGTRKGDYFYAYDVDIQNSEGMVATFQDKGQEPFADEYYGHLHVFTTFWEWTPCDRCGVRGEQWRIGLCYLQSPDLSPRYLKAVPDVVSCGSRAVPRKLRTKARDHTPEVLVRSCLVPCEKTKTIREGVLAIINYVSKVGSRPWVPQVPIQFHQQRLGHGLIISCPGARPEHAVAWDKDRQHLYRTQYLKGVNRSMRVFIDHGNQLHIRFTQLDDRGIYYCWRRGVLVAGFRLGVTSHGHYPASFSDPETRSAVELTLIGYLLITAVFVTIHFCRCCCYLFHCCPSFSP

SEQ ID NO: 17531 - DNA, 2861 bp, Homo sapiens
tatgcctgtttttatgtttacctataattttcatatagccgtataaggattgatttaccattttttgcccaacatgacaattctggctatgaaaattatgtttaaactgtgtatgatctattttatgtgctctatgttcccatttgtttgtttggtctggacagtggttctggaatgaattctatctagtaaattagtaaatgtgctgttttgtataaagcatgataattactttttaacagaagttcatttttaaagattactcccttttctttctctctttttttttgagacaatttctctcttgttgcctaggcagtgcagtggcgcgatctcagctccctgcaacttctgcctcccaggttcaagcgattctcctgccttagcctcctgagtagctgggtcagccaccatggctgactcattttttgtatttttagtagagaaggggttttaccgtgttggccgggctggtcttgaactcctgaccttgggtgatccacctgcctcagcctcccaaagtgctgggattacaggcgtgagctatcccgcccggtccccttttctttattatcgaagatattgtttaaaagaaagaaaaagtaggtcccaataatatatgtgctattcaaaaaatgtgatcatttaggacattatcacaagttgctatggaaataactgaagacttcctcaggagaaggaaagaaaatgaggaacataatgatagagtcggggaactcccactagctcacctgaggggggctcgatgcagctgaaatactgaatactgaaatactagaaaccaacaaaactggtttctagaattctccagggatttgggcttgggaaacttggtaagaatagtttttatttttgaacattcaactttggttcttcaaagtaatctttaaacatgggaatatgttttcaagacaatttataggacatacttatgtagttggtgaggtcttctcaaaagtatctacctttgttagataataacaagtgattaagaaaggggagatatggttttatactcataacaatttcttgtgcattctctgtacacagaggtgattcatttactctcccattagtagaacttgcactttgggctgtctgttctagtatttgggaagtgtttatgcttccttccagggaccatcttatgatcagaggcaggatgtctgtgagatggttagctagagttagcagtgtccggggagagtggctttagaccagtcagtaccttgctctttgtgcatggtgcatgtcaagtcaggaagccaagaaaccgttggcattaaaatctagatgcatagagatccttgctatgagttgtggataggagtggctccatctatccttgtggtgaaagagtccaggagctcctttagagattgtcaagtcctgagcgatgagctgcccttaatcctcagaagccttacaaaaattgagatgtaccatttctaccctttgagaaaaaagaaatagaaacttacttgatgcagaatggatatttatatttctgcttgcaccatttccatagcagctgacaaaggcaaaatcatgaaatagaatcatttctataaattgcttctttaagttttctctaaattttgcctctaggaaaaaattaaaactattcaatgacagctagctgtcactggtgctaccccaaagctttccaatcttttatgtattttttgtcaatgaaactgttgctgtaggaaagtcaaggttcatgtaagagtatcgtggtgtaaatataatggtttcacagctgtttgaatttttcttttcctgtgccagatatagaatgcagtcaaccctttttcagtaacttatgttcaccagtctgtgcttttcttctcccagaaggcttttcttagtggttgtaaatgcaagaatcctgagccctgtgttgcaaaggtgggtggtctgtcagcactttctggcaaattgagttgatggatttaagataagcctttggggttcctgtcagttttctgggccctgaggaagggttgggcctcctttactctcagtattttgagtgtttttcaaatgtttgtacgttatcttgcactgctctaataaaaatgaaagctctctgacaagaaatagttctggatggtttgaagatctgcggggaaaaataagtgtgcacctgagaccttcagttagtcatttatttatttagaataaaaaatagtttgataacctaccagagttagtgcttctttaaaaacactccttggaaagatggggactgtcccttaggaaagccataaaagtgattcccaatactttgcaattgcttttgatttttagtcctttggaacaaatgtgtgatgttatgtctgatgttgtgtttttagagctgtgaaaagtctgaaaaatttcaaggggtattatttaaatgatgattatctggctgaattatgtgtgagctagaatctagggtagctgtccacttctttttctgttgtcctgacagtaaagcaaatagtaagccatgtcttgaaagtgatttgcttgtttcatactgacatctaaagacatcagccttctctttggcaaccctggggatactcctctgcaccataacttattaatgtttttttagacaaggctaaacctgaatgactctacgtatctatagtttcactgctcatataccagctgctacaagaaaaaccatgacttgtaagtttgtctttactcctaattgctaaattaactgaaacccttcctgtctagggagaattgctgctagtaaggtcagtttgcaatgttcagctttagatatgtgtcgtaatgggagtctgaaaactgtaataaactgtattcatatcctg

SEQ ID NO: 17532 - DNA, 2788 bp, Homo sapiens
cagcgcgggcccggagcagggggaagggaagtgcggctcggtcggcgcgggtggagggggcgtgaggccgccctacggtggccgtcgagggacggcgctacggctcccacgctaggccaaacgcctccggcggccgcgcccgagagccccttcacctgcagggcgaccccagccggcgacgcgtgaaccacgccctcagccgccttgccagcgcccccagccgcgcgccccagcaccatgcggccgccctgcgcacggagccccgagggacaggggcacccgcaggcccggcccctagcaccgccggccggccccgaggtccgggacgccggcgccgccgcggagagggcaccgggccgacgcctccccccagggtcagctgcgggctcccaggcctaggcgcccatgacccctacgccaaccgccgcctggacaccgccgccgccactgcgacctagcgccgccgccggggcccaatgccggtcatgcccattccgcggcgggtgcgctccttccacggcccgcacaccacctgcctgcatgcggcctgcgggcccgtgcgcgcctcccacctggcccgcaccaagtacaacaacttcgacgtgtacatcaagacgcgctggctgtacggcttcatccgcttcctactctactttagctgcagcctgttcactgcggcgctctggggtgcgctggccgccctcttctgcctacagtacctgggcgttcgcgtcctgctgcgcttccagcgcaagctgtcggtgccgctgctgctgctgggccgccggcgcgtggacttccgcctggtgaacgagctgctcgtctatggcatccacgtcaccatgctgctggtcgggggcctgggctggtgcttcatggtcttcgtggacatgtgagggccgtgggtgcgagcttgatgtatcgtcccggcctgtggctgtgttctctccatgggtggggtcggccagcgccttcccttcgcccatcccccaggcagtcgctgctgcccggcgcccacggagagaaaagaaagggctgagacttctgtgatgggggcgcggacaccacccctaggctggcttcctggacccaccctccccgtatgcactctcaggggcagcgcccacctgccggtggctcctgctcacatgtcttcgggtcgtactgcggggtgggccctccgttccgcctctctgtgggcctctctccaggaccacagctgccagggactttagacatcaccctgggaggcccctggacacagagggctgtgtgcccaggagcaattccggaggggggccctcctggctgcacagccccttctgcgtgccctggccccagccccagccaacgggacacggaaggctcccctcgctgacacaccacactgccacaaagctgcttactctgccctgggccgcctgaggcctggcactgcccgcggaccaccctgtgtgtgtcatcctgaggggctgtgtgggtcctgagtccccagccagccttcagggtccccttggattgtgtagatgcagtctagcggggggccggagaagggctcaggtgggaggggcctcagcaggctcccagctcaggggctggcctggggggaaccctgggagccaggggctgactccagcaacactggcctgtctgcctgttctgggagggctgtgaggatgtcttgcagatgctctggatttctgcggaggcacctccattcctttctggctttttttgcgggggagggctttgggcctctttctttgagggaacaccgtcaaagaaagcctgggagatcgaggcttcagtgagccaggatggaaacgcgtgtcccaagtgtccggagcaggcggcagaggcctcagtgcggcaaacacagccccagagcctgtgtggcaccagcagcatcttagagccccaggtatatgctgagatcttatctcacgctgtcctccagtgtctggggggcccaaatgatggcacaggggcaggtgggctggaggggcgcagatgcctgtgttcagggagggtggccaccatgggccgaggtctcacccaggaccccttgctctgctcctcagccttgcagtcacggcagcactatggtggactgcccatggccgtgtgactttgggggcaagtgggagggcgccctgaataatgattgcaaggacaacaggcagaggctaccctagagcaggacacagggtgtggtactgacaaccctagtgtcacctcaaatccatgtccccacactctgggcatgggtgggacttgtgactctaccctgtcaggcggaccagtggcccaggagccatgaggacagttgtgtgccactggaagagaaactttttgaaaaaccctaaatcaggtagagaaagcaaaaaatctctggccgtaaaccgtgctctctaatttatcggcagcttctgtggatgacctctgatgagcccgggctgcgtccacgccctgggcaggtaggcgggagcttccctgcgtgggcctcatttcttgctgcagagaatcttttgcactaagtcatgctgtttcctcaaagaagctttgttttttgttaacgtattactcagagtcacccaagcctcttggctgagggtgaaggtgggacgggaggcgggagggggctggtggtgccgctcgtgcggtgtcaacgctgcagggagttgtggcaccttggtgccctctgagcacctggccgcctgctgtccccggtgcctgtgaaattcgtcatgccatgacccacctgcattaaacctatttttttaatgtg

SEQ ID NO: 17533 - DNA, 3250 bp, Homo sapiens
  CDS (81)..(1082)
gatcgcgcccagcggagctaatcagattacctggctagtgtttgcttgttctggagtgatcttctgactggaaaagaactatgtcatggatcaaggaaggagagctgtcactttgggagcggttctgtgccaacatcataaaggcaggcccaatgccgaaacacattgcattcataatggacgggaaccgtcgctatgccaagaagtgccaggtggagcggcaggaaggccactcacagggcttcaacaagctagctgagactctgcggtggtgtttgaacctgggcatcctagaggtgacagtctacgcattcagcattgagaacttcaaacgctccaagagtgaggtagacgggcttatggatctggcccggcagaagttcagccgcttgatggaagaaaaggagaaactgcagaagcatggggtgtgtatccgggtcctgggcgatctgcacttgttgcccttggatctccaggagctgattgcacaagctgtacaggccacgaagaactacaacaagtgtttcctgtatgtctgttttgcatacacatcccgtcatgagatcagcaatgctgtgagagagatggcctggggggtggagcaaggcctgttggatcccagtgatatctctgagtctctgcttgataagtgcctctataccaaccgctctcctcatcctgacatcttgatacggacttctggagaagtgcggctgagtgacttcttactatggcagacctctcactcctgcctggtgttccaacccgttctgtggccagagtatacattttggaacctcttcgaggccatcctgcagttccagatgaaccatagcatgcttcagcagaaggcccgagacatgtatgcagaggagcggaagaggcagcagctggagagggaccaggctacagtgacagagcagctgctgcgagaggggctccaagccagtggggacgcccagctccgaaggacacgcttgcacaaactctcggccagacgggaagagcgagtccaaggcttcctgcaggccttggaactcaagcgagctgactggctggcccgtctgggcactgcatcagcctgaatgaggctggccacctgccactttgccctgccctctgcctccagggctccactccccttccttttcttggtgaaaggcacctcctttcctgataatgaatggtgttccctttgcttggctggggagccccccaggccaggtttgctggccatagatacctttgggctgcctgggacaggctcctgaggaggattgagggtgaaagtctcccacgagtacactaaacctaggtctggtcaccaatagggtttggagagcaaagggccacaactcatcagctgcctgtctcttagatgcactttctttttccaccagcacatccttcaacacacagaatttcagggaagagttctccccaaaaccctagctctttacccttccattttagccttccacccagcttccacaaaagatttggctctaccttggatctgctagtaaataactaataggcaggcagttatttgggtaaggaaaaaaggggtgggagagacagaaaatttgcccatctgctgctcctcccccttggctctccacctgggatttgctattgaatctctaccctctcccaccacacagtactgattgctcactgaaagactcagcacccccaatggtgcgcggaagccaggcgggcgattacaatccaattacctattgtcgactcagcccacacaagcttttctcctcctcttgcagggcatggggccaggctccactcccaaatgagactggccccctccatggttcagggtaacagaagggcctgtaggccctggtgaactgaatccagcacaggcctcccctgtaacacaacaggactgagcagaaccaaacacttcttccaactgactctgctccctgccctcaccatctcaaactctgattcccactccactcttcgaggtttctctcagctttttgacctggctccctaagtaggccctagatgatttattcttggcatggcaaagcttgttctaggtcctctgcttgtgagggtcaaagctgtgtcctttcccttacctccctctgccaggacttgctgcagagctgctgagaggattagtgcccttgaagagctgtctgcctgagcaactctatttcaggtgccccacaccggcaagtaccagccagcaacaccaaccaaatgctactctctttaaagtccattttccttcttctttttttttttttttttttggagacagcatctcaccctgtcctggctggtctcgaactcctgacctcaggtgattcgccggcctcaccctcccaaagtgctgggattacaggcatgagccaccatgccagacttcccattttactttctgcaagctgtttccctagcagctccctctaggggagaggtgaaatcttgcaagttgtagcaagagcacacaggaaacccctaactttcctataccccacccgcctcttcccctttctgtcccgggatacctggcggcaagagacttcttggctattgtccatgctcccagaatcaagcataaatgccagacacggcgattgagaagccaatcagtgaaccctttggcaaagcccccatccacacctggcactcccctctaccaatccctggcacagggttcctggagagcaggtgctgtacattttacagctttacaatggggctgttgacagccataattagggaggcatgaattatgcggctataatgcagagccctacaattaaggcgggaatgaggggctggaggcagcaaacggaatctgccctatgagcgtggctgttgagtcctgtctcctgggtctgactttccgtaatatgattggggtacagtagaggtgattaatggggctggcatctctctttggcctgaggttctgtattctgggaaaggtatacagggtggagtagggagaagctgccccaggaggcgatgtagtggtggaaagaagaggcagagaggtcgtcgtcgtcgcccagcagcaagggctgcaaaatagtagaactcgtggttgctttggacaggtgtgatttgtgcaagccaggttcaacccttgcctcaagaaatcagatgggaccaatttagtgtccttccacctgtgagccaagcccccatttgaggacatctatcgtattcttgtgtgctgggtctcaaatagaatttttaaagattc

SEQ ID NO: 17534 - protein, 334 aa, Homo sapiens
MSWIKEGELSLWERFCANIIKAGPMPKHIAFIMDGNRRYAKKCQVERQEGHSQGFNKLAETLRWCLNLGILEVTVYAFSIENFKRSKSEVDGLMDLARQKFSRLMEEKEKLQKHGVCIRVLGDLHLLPLDLQELIAQAVQATKNYNKCFLYVCFAYTSRHEISNAVREMAWGVEQGLLDPSDISESLLDKCLYTNRSPHPDILIRTSGEVRLSDFLLWQTSHSCLVFQPVLWPEYTFWNLFEAILQFQMNHSMLQQKARDMYAEERKRQQLERDQATVTEQLLREGLQASGDAQLRRTRLHKLSARREERVQGFLQALELKRADWLARLGTASA

SEQ ID NO: 17535 - DNA, 2566 bp, Homo sapiens
  CDS (287)..(694)
accctcgggctcgagacagcggcgacgtttaaagctgagcgacccagtgccactggagacggtcagcttctccactcaggctcctccagcccgagccagaagaccccctcccccagaattctgggggccgatggaagggagccgagtcagatcgcgaggtacccagagccgacagaccggagcgacagggagttgccagaagccccgcccctaggagtgatcggaaagcctcacccatccgggtgaggaacccggagggaccgcctccgggcggagcccgccgaccatggctacgcccctggtggcgggtcccgcagctctacgcttcgccgccgcggctagctggcaggttgtgcgcggacgctgcgtggaacattttccgcgagtactggagtttctgcgatctctgcgcgctattgcccctggcttggttcgctaccggcaccacgaacgcctttgtatgggcctaaaggccaaggtggtggagctgatcctgcagggccggccttgggcccaagtcctgaaagccctgaatcaccactttccagaatctggacctatagtgcgggatcccaaggctacaaagcaggatctgaggaagattttggaggcacaggaaactttttaccagcaggtgaagcagctgtcagaggctcctgtggatttggcctcgaagctgcaggtgagactggtttgaaggctattatgtggctattttctctaacccatttttttttttttttgaggaatcttgctctgtcgcccaggctggagtgcagtggcacaatctcggctcactgcaacctctgcctcccgggttcaagcgattctcctgcctcagcctcccgagtagctgggattacaaatgcccagctaatttttgtattttagtagagatggggtttcaccatgttggccaggctggtctcgaactcctgacctcaagtgatccgcccacctcggcctcccaaatggccaggattacaggcgtgagccaccgtgcctggccactaacccacttttgacctaatctcccctgctgtaggaacttgaacaagagtatggggaaccctttctggctgccatggaaaagctgctttttgagtacttgtgtcagctggagaaagcactgcctacaccgcaggcacagcaggtttcgctggggcaaaacatgtaagggcagagtgtggggtggctgtttcaaggattgtggtcttcatacctctgtccctgcccacagcttcaggatgtgctgagttggatgcagcctggagtctctatcacctcttctcttgcctggagacaatatggtgtggacatggggtggctgcttccagagtgctctgttactgactcagtgaacctggctgagcccatggaacagaatcctcctcagcaacaaagactagcactccacaatcccctgccaaaagccaagcctggcacacatcttcctcagggaccatcttcaaggacgcacccagaacctctagctggccgacacttcaatctggcccctctaggccgacgaagagttcagtcccaatgggcctccactaggggaggccataaggagcgccccacagtcatgctgtttccctttaggaatctcggctcaccaacccaggtcatatctaagcctgagagcaaggaagaacatgcgatatacacagcagacctagccatgggcacaagagcagcctccactgggaagtctaagagtccatgccagaccctggggggaagggctctgaaggagaacccagttgacttgcctgccacagagcaaaaggagtgagtggaacagagttgcttcttactaggagcacattctttgcctgccttcccttcatcctatcctctttgcttgctctcacctcaggaattgcttggattgctacatggaccccctgagactatcattattacctcctagggccaggaagccaggtaggtagtctgagtcaggattggatcaacagcctcctctcttggggactctcaagagcctgtgttcatctagaagtagtagtttgattctggtttccctcctacagtgtgtcctccgtctctgtgcagctccgtcattaccataggggacttggttttagactctgatggggaagaaaatggccagggggaaggaaaggtgagtggaaaggagcagaaagctgggaaaggggatgggtagaacaagactgagaaatccacatgcttcagaattcagagggttcagggaatggtttcggatagtaggctctccctgctcccttctctacaggaatctctggaaaactatcagaagacaaagtttgacaccttgatacccactctctgtgaatacctacccccttctggccacggtgccatacctgtttcttcctgtgactgtagagacagttctagacctttgtgataaaactaaaatgctctctgtactctagtctcctgcctcctcagctctgcaagtagtttagtaggaatgaagtggaagtccaggcttggattgcctaactacactgctaaaaatatttgtaatccttaataattaaactttggatttgtt

SEQ ID NO: 17536 - protein, 136 aa, Homo sapiens [sequence omitted]

SEQ ID NO: 17537 - DNA, 2138 bp, Homo sapiens
  CDS (143)..(850)
agggacttttgctcccacaagtcctgcctcggaggcgggggagctggaccagcagccgcctggagcgtccgagtcaccgtcgccggggctcccgcgctccccagaacggtgggacgcggggctcggcagccgccagcggaacatggcgccctggacgctgtggcgctgctgccagcgcgtcgtgggctgggtgccggtgctcttcatcaccttcgtggtcgtctggtcctactacgcgtacgtggtggagctctgcgtgtaccacgttgatgagcgaacaatatgcaatggaattgccccagaaaaagatgtagatggatttcatattatcaatattggaagattgtgccttgatcagcattctctcatacctgccactgccagtgctgtttgggaaataataaaaagaacaggaattcaaacatttggaaaaaatgtggttgtggctggaagatccaagaacgtagggatgcctattgccatgcttttacacactgatggagagcatgaacggccaggaggtgatgcaactgtgacaatagctcacagatacacccccaaagagcaactgaagattcatacgcagctggcagatattatcatagttgctgcaggtattccaaagttgattacgtctgatatggttaaagaaggtgctgctgtaattgatgtgggtatcaactatgtccacgatccagtgacaggaaagacaaaattagttggagatgtggacttcgaagctgttaaaaagaaagctggctttatcactccagttccaggaggtgtgggacccatgacagtggcaatgcttctgaagaacacccttctggcagctaaaaaaatcatttactagatcacatgaaaggataaagcaaactgaagtcatgctatttgtttatttgacaaagggtaaaacctttatattttactacaaagctatttatttctacatggtatttattttttcatgggtgaaatcattgtgaatcaattgattcacatagttttatgcatttcctgctaatttattttgagttttaagaaaacaaccaaaacaattccaatgaaaattttagtaacaattgtttattttgagggtatttgttcataacattaaaacaataaagggctcataataaataaatatatttttgacacaattaaatattacatagagtatgtttacaacaaatatcctgtcagccaaatggttacccatataaaatgtaatttaggttttgctacttgcatgctaacatttttaatgtattttatgatctatgtcatatattaaaaaagagcttgcttactacaagaaaaatattgaaatattgaaaatattgaaaatattattattgaaaataaaatcttgatctcaactatcccccaaatgcatcctataagtccatcctaatgagaaatgatgttctatttaaggaaaggaaaatattccgggaaggcaaaaaatgcagtgctgtttggaagtgtaatgattttatcacatggtgaatgactactaagagtaatgattatatcacattgtgaatgactacttgccacagtaaaaatacatgaagaatgtgttaggtttaaacgtcgtttctttcttctaaaaaatatttggttagtaccttcactgagcaatagtggaaaaataaaaaaataagtaaacagaaaaaactaaagttgtattttcccacaaatatagtatgaatgaggtcatattaaagaacagcaactgttaatgtttgttcacaaattcagaaatctaataggaaaaatgatactttcaatgtgccaaaactaaaccttagtatacaactaaaaatctcctgccttcttgcctacctgtcttccctcttctgttacagaatttgttcctcaaagtagatgcaatgtttctaacacaatttaaattaggaaatatatatgaatgtcgttgaagtctattttgagactgctaaagctattaattgatactgtgtttttatgcccaaatcccagtatgtttatgtaccaataatgactcttacccagcgcatgtctttatcagtgtgtactcgtgacgatttgtgtgaaaatagacttgatgtttataattaataccattacaactgtataataaaagcaatttgaag

SEQ ID NO: 17538 - protein, 236 aa, Homo sapiens
MAPWTLWRCCQRVVGWVPVLFITFVVVWSYYAYVVELCVYHVDERTICNGIAPEKDVDGFHIINIGRLCLDQHSLIPATASAVWEIIKRTGIQTFGKNVVVAGRSKNVGMPIAMLLHTDGEHERPGGDATVTIAHRYTPKEQLKIHTQLADIIIVAAGIPKLITSDMVKEGAAVIDVGINYVHDPVTGKTKLVGDVDFEAVKKKAGFITPVPGGVGPMTVAMLLKNTLLAAKKIIY

SEQ ID NO: 17539 - DNA, 2284 bp, Homo sapiens
  CDS (128)..(1936)
tgcaagggtgtacaactatgagcctttgacacagctcaagaatgtcagagcaaattactatggaaaatacattgctctaagagggacagtggttcgtgtcagtaatataaagcctctttgcaccaagatggcttttctttgtgctgcatgtggagaaattcagagctttcctcttccagatggaaaatacagtcttcccacaaagtgtcctgtgcctgtgtgtcgaggcaggtcatttactgctctccgcagctctcctctcacagttacgatggactggcagtcaatcaaaatccaggaattgatgtctgatgatcagagagaagcaggtcggattccacgaacaatagaatgtgagcttgttcatgatcttgtggatagctgtgtcccgggagacacagtgactattactggaattgtcaaagtctcaaatgcggaagaaggttctcgaaataagaatgacaagtgtatgttccttttgtatattgaagcaaattctattagtaatagcaaaggacagaaaacaaagagttctgaggatgggtgtaagcatggaatgttgatggagttctcacttaaagacctttatgccatccaagagattcaagctgaagaaaacctgtttaaactcattgtcaactcgctttgccctgtcatttttggtcacgaacttgttaaagcaggtttggcattagcactctttggaggaagccagaaatacgcagatgacaaaaacagaattccaattcggggagacccccacatccttgttgttggagatccaggcctaggaaaaagtcaaatgctacaggcagcgtgcaatgttgccccacgtggcgtgtatgtttgtggtaacaccacgaccacctctggtctgacggtaactctttcaaaagatagttcctctggagattttgctttggaagctggtgccctggtacttggtgatcaaggtatttgtggaatcgatgaatttgataagatggggaatcaacatcaagccttgttggaagccatggagcagcaaagtattagtcttgctaaggctggtgtggtttgtagccttcctgcaagaacttccattattgctgctgcaaatccagttggaggacattacaataaagccaaaacagtttctgagaatttaaaaatggggagtgcactactatccagatttgatttggtctttatcctgttagatactccaaatgagcatcatgatcacttactctctgaacatgtgattgcaataagagctggaaagcagagaaccattagcagtgccacagtagctcgtatgaatagtcaagattcaaatacttccgtacttgaagtagtttctgagaagccattatcagaaagactaaaggtggttcctggagaaacaatagatcccattccccaccagctattgagaaagtacattggctatgctcggcagtatgtgtacccaaggctatccacagaagctgctcgagttcttcaagatttttaccttgagctccggaaacagagccagaggttaaatagctcaccaatcactaccaggcagctggaatctttgattcgtctgacagaggcacgagcaaggttggaattgagagaggaagcaaccaaagaagacgctgaggatatagtggaaattatgaaatatagcatgctaggaacttactctgatgaatttgggaacctagattttgagcgatcccagcatggttctggaatgagcaacaggtcaacagcgaaaagatttatttctgctctcaacaacgttgctgaaagaacttataataatatatttcaatttcatcaacttcggcagattgccaaagaactaaacattcaggttgctgattttgaaaattttattggatcactaaatgaccagggttacctcttgaaaaaaggcccaaaagtttaccagcttcaaactatgtaaaaggacttcaccaagttagggcctcctgggtttattgcagattaaagccatctcagtgaagatatgcgtgcacgcacagacagacagacacacacacacacacacacacacacacacacacacacacacacacagtcaaatactgttctctgaaaaatgatgtcccaaaagtattataataggaaaaaagcattaaatataataaactaatttaagaagtgataaagtctccagatgcagtagctcacactgtaatcacagtgactcaggaggctgaggtgagaggattccttgaggccagggttcgagaccaaccttgggcaacatagcaagaccccatttctt

SEQ ID NO: 17540 - protein, 603 aa, Homo sapiens
MAFLCAACGEIQSFPLPDGKYSLPTKCPVPVCRGRSFTALRSSPLTVTMDWQSIKIQELMSDDQREAGRIPRTIECELVHDLVDSCVPGDTVTITGIVKVSNAEEGSRNKNDKCMFLLYIEANSISNSKGQKTKSSEDGCKHGMLMEFSLKDLYAIQEIQAEENLFKLIVNSLCPVIFGHELVKAGLALALFGGSQKYADDKNRIPIRGDPHILVVGDPGLGKSQMLQAACNVAPRGVYVCGNTTTTSGLTVTLSKDSSSGDFALEAGALVLGDQGICGIDEFDKMGNQHQALLEAMEQQSISLAKAGVVCSLPARTSIIAAANPVGGHYNKAKTVSENLKMGSALLSRFDLVFILLDTPNEHHDHLLSEHVIAIRAGKQRTISSATVARMNSQDSNTSVLEVVSEKPLSERLKVVPGETIDPIPHQLLRKYIGYARQYVYPRLSTEAARVLQDFYLELRKQSQRLNSSPITTRQLESLIRLTEARARLELREEATKEDAEDIVEIMKYSMLGTYSDEFGNLDFERSQHGSGMSNRSTAKRFISALNNVAERTYNNIFQFHQLRQIAKELNIQVADFENFIGSLNDQGYLLKKGPKVYQLQTM

SEQ ID NO: 17541 - DNA, 3985 bp, Homo sapiens
  CDS (553)..(3222)
gcacattctacctgaagcaatggtttgttacttagaaaattatgaacctgaaaagttttctgagatttttctaggagaatttgatactccagaagcaatctggagcagtgaagtgaggcgcctgatgatagagaagattgctgcccatctcgcggatttcacacctcgtcttcagagtaacacaagagcactttatcagtattgccccattcctataatcaactatccacaactcgaaaatgaactattttgtaatatttattacctcaaacaactgtgtgatacactccggtttccagattggccaattaaagacccggttaagcttctaaaagatacccttgatgcctggaagaaagaagtagaaaagaagccacctatgatgtcaatagatgatgcttatgaagtgcttaatctgcctcaaggacagggaccgcatgatgagagcaagattaggaaagcttacttcagacttgcacaaaagtaccaccctgataagaatccagaagggagggacatgtttgaaaaagtaaataaagcatatgaatttttatgtaccaaatcagcaaaaatagtggatgggccagatccagagaatataattttaatctaaaaacacagagcatcctcttcaaccgtcataaagaagatttacagccttataaatatgcaggataccccatgcttattcggactataacaatggaaacttcagatgacctccttttctcaaaagaatcaccattgttgcctgcggctacagagctagctttccatactgtcaactgttcagccctcaatgctgaagagctcagaagagagaatggactagaggtgttacaagaggcatttagtcgctgtgtggctgtcttgactcgttctagtaaaccaagtgacatgtcagtacaggtgtgtggatacataagtaaatgctacagtgtggctgctcagtttgaggaatgccgagagaagatcacggaaatgcctagcatcatcaaggatctctgtcgggtactatattttggcaagagtattccccgcgtagctgctcttggggtagaatgtgtcagttcttttgctgtggatttctggctacagacacacctatttcaggctggaattttgtggcatctccttggttttctgtttaattatgactacacactagaagagagtggcattcagaaaagtgaagaaacaaaccagcaggaggtagcaaacagccttgccaaactgagtgtccatgctctgagtcgccttggagggtatttggctgaagaacaagcaactccagaaaatccaaccataaggaaaagcttagctggcatgctgacaccctatgttgctagaaaacttgctgtggctagtgtgactgagattttgaagatgcttaacagcaacacagaaagtccatatttgatatggaacaattctacaagagcagaattacttgaatttcttgaatcccaacaagaaaacatgattaaaaaaggtgattgtgacaaaacttatggatcagaatttgtctacagtgatcatgccaaagaacttattgtaggggagatttttgttagggtgtataatgaagttcctactttccaactggaggttccaaaagcatttgctgcaagtctcttggattatataggctcgcaggcccaatacttgcacacattcatggccatcacacacgcggcaaaagtggagtcagagcaacatggagatcgcttaccgagagtagaaatggctttggaggctctgagaaatgtcataaaatacaatccaggttctgagagtgaatgcattgggcactttaagttgatattttctcttctccgagttcatggagctggtcaagtgcagcagttggctttagaggttgtgaatatagtgacatctaaccaagactgtgtcaacaatattgctgaatcaatggttttgtccagtttattggctcttctacattcattgccatcaagtcgtcagcttgttctggaaactctttatgctttgacatcgagtacaaaaataatcaaagaagcaatggcaaagggtgctttgatctatttactggatatgttctgcaattcaacacatccacaggttcgagcccaaacagcagaactttttgccaaaatgacagcagataaactgataggtccaaaggttcgaattacgttaatgaaatttctaccaagcgttttcatggatgctatgagagacaatcctgaagctgctgtacatatttttgaaggaactcatgaaaatcctgagttaatttggaatgataattccagagataaagtgtccacaacagttagggaaatgatgctagagcactttaaaaatcagcaggacaaccctgaggcaaactggaagttgcctgaagattttgctgtggtgtttggagaagcagagggtgaacttgctgttggaggagtcttcttgaggatctttattgcacaaccagcctgggttctaagaaagcctagagaatttcttattgccctgttagaaaaattaactgagctcctagagaagaacaatcctcatggagaaactctggaaaccttgacaatggcaacagtgtgtctcttcagcgcacaacctcagctggcagatcaggtcccgccattgggccatcttcccaaagttatccaggcaatgaatcataggaacaatgccattcctaagagtgccattcgggttatccatgccttgtctgaaaatgagctgtgtgttcgagccatggcatctttagagaccattggcccactgatgaatggaatgaaaaagcgagcagatactgttggtctagcctgtgaagcaattaatcgaatgtttcagaaggagcagagtgaattagtagcacaagccctgaaagcagatttggttccatacctcttaaaattactcgaaggcattggccttgaaaacctggacagcccagcagccactaaggctcagattgttaaagctctcaaggcaatgactcgaagtttgcagtatggagaacaggtgaatgaaatcctgtgccgttcttcagtctggagtgccttcaaagatcagaaacatgatttgttcatttctgagtcacaaacagcaggatacctcacaggacctggagttgctggctaccttaccgcaggtacatctacatcagtcatgtctaacctgccacctcctgtagaccatgaggcaggcgaccttggctatcagacttgaaatattcacgagagacaataaacgctgaaaggccagtgccaagtccacattcctccagctgatacgttgaagcaaactcttactgcctttctcctggtttcatgacagtgttattcctttttctataaatatatttttaggaaaaaaagtcagtgatcctaattgtatcacattataagaaagcactctgtggatcaacataagtgggtacacaagaattttttttttcttggtgtatgtaagcacatttgttcctttatatctgtttacaaaactgtgaatcaaaaagacaaaactttcttcctagtttttgtaattttttttttgaactagcatgactgtagggttgagctacagtcaacaaaaattgggctaagtcacttttccccaggaaagaatatttccctctcctgcatcaagtctgcgtggccatcctccccccaccatccaagactattaggttttgtccctgcacccttcactggcatcctcaatcattaaccttctgaaagctcacagtacacattagtatgtataactggctttaccaaattgaatgaaaaggagcttgtgcaaaaaaatttaaaaatggatgtcaagatgttatgtaaaagatgagtgtaattgtgaaatgttctatacactatcaaatatataaagctttctatattgaatgtacattatacagatcattcatatgtgtacataaaattttaaaaataaagggaattgactgctttgttaatgagaaaaaaaaaag

SEQ ID NO: 17542 - protein, 890 aa, Homo sapiens [sequence omitted]

SEQ ID NO: 17543 - DNA, 2578 bp, Homo sapiens
  CDS (6)..(1937)
acctgatgcagctgtttatagctcagaggccagatatgagagaagaagaattagaagatattaaacagttcaagaaaacaaccataagttgttacttacgttgcttagatggccgctcctgctggactactttaataagtgccttcagaatactattagaatctgatgaagacagacttcttgttgtatttaatcgaggattgattctaatgacagagtctttcaacactttgcacatgatgtatcacgaagctacagcttgccatgtgactggagatttagtagaacttctgtcaatatttctttcggttttgaagtctacacgcccttatcttcagagaaaagatgtgaaacaagcattaatccagtggcaggagcgaattgaatttgcccataaactgttaactcttcttaattcctatagtcctccagaacttagaaatgcctgtatagatgtcctcaaggaacttgtacttttgagtccccatgattttcttcatactctggttccctttctacaacacaaccattgtacttaccatcacagtaatataccaatgtctcttggaccttatttcccttgtcgagaaaatatcaagctaataggaggggaaagcaatattcggcctccgcgccctgaactcaatatgtgcctcttgcccacaatggtggaaaccagtaagggcaaagatgacgtttatgatcgtatgctgctagactacttcttttcttatcatcagttcatccatctattatgccgagttgcaatcaactgtgaaaaatttactgaaacattagttaagctgagtgtcctagttgcctatgaaggtttgccacttcatcttgcactgttccccaaactctggactgagctatgccagactcagtctgctatgtcaaaaaactgcatcaagcttttgtgtgaagatcctgttttcgcagaatatattaaatgtatcctaatggatgaaagaacttttttaaacaacaacattgtctacacgttcatgacacatttccttctaaaggttcaaagtcaagtgttttctgaagcaaactgtgccaatttgatcagcactcttattacaaacttgataagccagtatcagaacctacagtctgatttctctaaccgagttgaaatttccaaagcaagtgcttctttaaatggggacctgagggcactcgctttgctcctgtcagtacacactcccaaacagttaaacccagctctaattccaactctgcaagagcttttaagcaaatgcaggacttgtccgcaacagagaaactcactccaagagcaagaagccaaagaaagaaaaactaaagatgatgaaggagcaactcccattaaaaggcggcgtgttagcagtgatgaggagcacactgtagacagctgcatcagtgacatgaaaacagaaaccagggaggtcctgaccccaacgagcacttctgacaatgagaccagagactcctcaattattgatccaggaactgagcaagatcttccttcccctgaaaatagttctgttaaagaataccgaatggaagttccatcttcgttttcagaagacatgtcaaatatcaggtcacagcatgcagaagaacagtccaacaatggtagatatgacgattgtaaagaatttaaagacctccactgttccaaggattctaccctagctgaggaagaatctgagttcccttctacttctatctctgcagttctgtctgacttagctgacttgagaagctgtgatggccaagctttgccctcccaggaccctgaggttgctttatctctcagttgtggccattccagaggactctttagtcatatgcagcaacatgacattttagataccctgtgtaggaccattgaatctacaatccatgtcgtcacaaggatatctggcaaaggataccaagctgcttcttgacattaggtgtagcatgtctacttttaagtccctcacccccaacccccatgctgtttgtataagttttgcttatttgtttttgtgcttcagtttgtccagtgctctctgcttgaatggcaagatagatttataggcttaattcttggtcaggcagaactccagatgaaaaaaacttgcatcttcagtatacttcctaaagggcaatcagataatggatatgttttatgtaattaagagttcactttagtggctttcatttaatatggctgtctgggaagaacagggttgcctagccctgtacaatgtaatttaaacttacagcatttttactgtgtatgatatggtgtcctctgtgccagttttgtaccttatagaggcagattgcctccgatcgctgtggttcttattatcaaaattaagtttacttgtatacggaacaaccacaagaaatttgattctgtaaagaatcctctttagctgtggcctggcagtatataaatggtgctttatttaacagaatacctgtggaggaaataaagcacacttgatgtaaaaataattgttttatttttattgacatgactgattgattgattgctattctgtgcacttaattaaactgattgtgatgacttttc

SEQ ID NO: 17544 - protein, 644 aa, Homo sapiens
MQLFIAQRPDMREEELEDIKQFKKTTISCYLRCLDGRSCWTTLISAFRILLESDEDRLLVVFNRGLILMTESFNTLHMMYHEATACHVTGDLVELLSIFLSVLKSTRPYLQRKDVKQALIQWQERIEFAHKLLTLLNSYSPPELRNACIDVLKELVLLSPHDFLHTLVPFLQHNHCTYHHSNIPMSLGPYFPCRENIKLIGGESNIRPPRPELNMCLLPTMVETSKGKDDVYDRMLLDYFFSYHQFIHLLCRVAINCEKFTETLVKLSVLVAYEGLPLHLALFPKLWTELCQTQSAMSKNCIKLLCEDPVFAEYIKCILMDERTFLNNNIVYTFMTHFLLKVQSQVFSEANCANLISTLITNLISQYQNLQSDFSNRVEISKASASLNGDLRALALLLSVHTPKQLNPALIPTLQELLSKCRTCPQQRNSLQEQEAKERKTKDDEGATPIKRRRVSSDEEHTVDSCISDMKTETREVLTPTSTSDNETRDSSIIDPGTEQDLPSPENSSVKEYRMEVPSSFSEDMSNIRSQHAEEQSNNGRYDDCKEFKDLHCSKDSTLAEEESEFPSTSISAVLSDLADLRSCDGQALPSQDPEVALSLSCGHSRGLFSHMQQHDILDTLCRTIESTIHVVTRISGKGYQAAS

SEQ ID NO: 17545 - DNA, 3856 bp, Homo sapiens
  CDS (145)..(747)
aacgccgggcagggcggcgggcgcgctcagtctggcggcggctgccgtgagctgactgacgttccgggaacgccgcagcagcccgcgccgcccgcagcctagccgagccgcgccgcccgggcctcgcccgcccgcctgcccgccatggtgtcatggatcatctccaggctggtggtgcttatatttggcaccctttaccctgcgtattattcctacaaggctgtgaaatcaaaggacattaaggaatatgtcaaatggatgatgtactggattatatttgcacttttcaccacagcagagacattcacagacatcttcctttgttggtttccattctattatgaactaaaaatagcatttgtagcctggctgctgtctccctacacaaaaggctccagcctcctgtacaggaagtttgtacatcccacactatcttcaaaagaaaaggaaatcgatgattgtctggtccaagcaaaagaccgaagttacgatgcccttgtgcacttcgggaagcggggcttgaacgtggccgccacagcggctgtgatggctgcttccaagggacagggtgccttatcggagagactgcggagcttcagcatgcaggacctcaccaccatcaggggagacggcgcccctgctccctcgggccccccaccaccggggtctgggcgggccagcggcaaacacggccagcctaagatgtccaggagtgcttctgagagcgctagcagctcaggcaccgcctagaatccttcgatctcgcttcaggaagaaaagtacctcatcctcggccaccgaaaccacgtgagtgagatgagccaacagcaccggatccacagaatgtttcttctctgccttaaagagctattcactaataacatagaaatccgcaagctgggtgtgctttgagtgtgcagcctcacaaacatggccttttctctctccccttccacttttaaggatttatttttttcccccttttctttattttgctggggagaggctaaagggaaaggtagtaggggcgggggtggtgacctttaagtcttctgaggttggtaattttccacaattggattgtcattatagacagcagtgtgttttttagaaagataagagaatcacccctatgctgctgagatgtacatttgtaatttatctgttgcatacttagtttttagtcctgtaaatgcaaacacagcattttttacaactttctttgttcttggtacttatactttgaactatgatgtacatatttatggcttttggcttttaatataatggacttgcaagggctgccagaggttctgatatgtaagaaaactgcaaaaacaaatatagacaaatattttgattctagagaacgtctcagatgtgcttataaagcttccaaatacaactccagtaagacatccctttccctgcaggagtgtggtctatattctttagatagttgtttagtcaaaagaccagacaagttacaaactaagagaaacaatatttcacaacacagtaaagtgtgatgagaggtcaggggaacatcccagtaaaagagaagagtcacaggaagctcatctcctccctggattctggattaggagcttctgaatcttttccagggataggcaggtagctcactcttggtgcaatttcttgaggatgggaacatgtagagctgctggaaggagtaattctgtgcttgacaaaggacgatttctcctttatcgtgaccagtgctgccgatttcctgacagaggagcttacactctgagcaccttgttttagcgaactctagcaaaacttgtttagcttagcaaaaacaaacacacaaaaaactgagaactctgctgtttcagatatgccataacatacatctgaaacacatgtgtaacaatcaaaatggtgggctctagaatggttttggagctcgagatcttcatgggttagacttgctggtcagacccaggagcacctgtggctcacaccttctgttcccctcctggcctgtgcagaatgtaaacagcagactcatactcaatgggcactacaggccttatcagacgttttatacaagcctggattgcttagtaggggaataaggcattctctgagggggctttccacttagattgagaattttatttgaaaagaatctggtttaaatggcattgtggtccgaggtagctgctctccccactgagagctgagccgaaatataagaataatatatttgtgcttcgagttggtgtttctttcagtgtaatgcatgcagtggtcacaacccagttactcataatatttggattgtatttgttcgtagatatgcccagaagactagagaattagtgttatataccatatagaacttactgtcagtcaactataaacaggcccaattaaaaactgttccattactacgcaaacacatattagaggcctttgctgatgacacattagctggatcttagccaccccagaaagggtttgatttgaagctgattgttgccagatatgcatattggaatcccatctacccatagttcctctgaaggtgattttgtaatttgcaaaagggtataggaaaatatacctaaaagcgaatttgtggctgagaggataaacagaagctgtttgctcatgttctgtgccccacacccaccaatacctaaatctgttaaggaagacagaaaatgttttctttgtgctcattgagtagttccagacagaagaagaatatactctttaaaatgtatttacctgttagttggaagtacccagaattatcagaaacgaatgcaaaaaaaaaaaaaaaaaaaaaaagcttacacagcttcttagcaattttttttttttttgccgaaacaataaattgcctttagcagcagtttaaaatcctatcgtgaacaacctatattttcgccattttacaatggagagttgtgacaagtacaggttatcaagtttgcacttaactatgccaaaaaaagtttgaagcgctctattctcagacatgctgtattattacttctcattcaagattgaaaaatataaaggtatccaaactctgtcttaatgtaaatgtaactatttttccttcaagtgttgactagggagtcggtttctctcttaaagacactcactgtacaactgaaagcagctgtcatatttctggcaaaatgtgtttacgtatctgacaagttgtacatttgtgtatgaactgacataaaatgtgaaagcctgtaagtgtacatgtagtggtgtggtgttctgtctagaggatacaactgaatgtttttaatttgctgacttacagacacaggctgtttacaaaatgctagctggaaagtctgtaatgttcatgtcataacttttagttaattgccattgagcacctgttctgaggaggtgagatgtggacttgtgcttataaactggagagtttagtcataatccctcctggctttgtgtgaatagcttgctcactttgctggcctttgaaatgtgttctccgtgataagctatccatgtgtttgtgataagagtgcttgtcaaccatgaccatctttgagccttcctagtcctccacctggcacagtatttgaaatggcaaaggatgtgcttcatcctctaacaaacagtgtacactcccagagctgatattctggattgtgactgtgcacatttcctctagttcatgtctgtagtccctatagaatgatctgtaataaaatagtatactggactgtgcatcaaagggatgtaaaattacagtattccaaaggttgaagttctgctgttttgttataatgcctgatacacatcttgaataaagtcttaacatttttctttt

SEQ ID NO: 17546 - protein, 201 aa, Homo sapiens
MVSWIISRLVVLIFGTLYPAYYSYKAVKSKDIKEYVKWMMYWIIFALFTTAETFTDIFLCWFPFYYELKIAFVAWLLSPYTKGSSLLYRKFVHPTLSSKEKEIDDCLVQAKDRSYDALVHFGKRGLNVAATAAVMAASKGQGALSERLRSFSMQDLTTIRGDGAPAPSGPPPPGSGRASGKHGQPKMSRSASESASSSGTA

SEQ ID NO: 17547 - DNA, 3047 bp, Homo sapiens
  CDS (63)..(2936)
gggccgggccttcgggcccgaggcggcggcggcggtataaagccggcgactgggagcatgtaatgtcggaatgcggaggccgcggcggcggcagcagcagcagcgaggacgccgaggacgagggagggggcggcggcggccccgcgggctcagactgcctcagctcgagcccgaccctggccacagcgtcctcggcgggccggctccgtcgcgggctgcgtggcgccttcctcatggcgcgccagcggcccgagctgctctgcggggccgtggcgctcggctgcgcgctgctcctcgccctcaagttcacctgcagtcgagcaaaagatgtgataataccagcaaagccacctgtcagctttttctccttgaggtctccagtccttgacctcttccaggggcagctggattatgcagagtacgttcgacgggattcagaggtggtactgctcttcttctatgccccttggtgtggacagtccatcgctgccagggcagaaattgagcaagcagcaagtcggctttcagatcaggtgttgtttgtggcaattaactgttggtggaaccaggggaaatgcagaaaacagaaacacttcttttattttcctgtaatatatctgtatcatcggagttttggaccaatcgaatacaaaggccccatgagtgctgtttacattgagaagtttgtccgccgggtgatgaaaccacttctctacatcccatctcaatcagaattactagattttctctcaaactacgagcctggagtactcgggtactttgagttcagtggctcaccccagcctcctggttatttgaccttcttcacctcagcattacattcattaaagaaagattacctaggaacagtacgatttggggttatcacaaataaacatcttgcgaaactggtatccttagtacactctggaagtgtgtatttacatagacatttcaacacatcacttgtcttccccagggaggtcctgaactacacagctgagaacatctgtaagtgggccttagaaaaccaggagacgctctttcggtggctgcggccacacggaggcaagagtctcctgctgaataacgagctgaagaaaggaccagcgctgtttctgttcataccttttaatcccctggccgaaagtcatcctttaatagacgagatcaccgaagtggccttggagtacaacaactgtcatggggaccaggtggtggagcgtctccttcagcacctgcggcgggtggatgctccagtgctggagtccctggccctggaagtgccggcacagctgccagacccgccaacgatcacagcgtccccctgctgcaacactgtggtgctgccccagtggcactccttctccaggacccacaacgtctgtgaactctgtgtcaaccagacctccgggggcatgaagccgagctcggtcagcgtgccacagtgcagcttttttgaaatggcagcagctctggattctttctacctcaaggagcagaccttttatcatgtggcatcagacagcatagaatgcagcaattttttaacttcctatagccccttcagctactacactgcatgttgcaggaccataagcaggggtgtgtcaggcttcatcgactctgaacaaggtgtctttgaagcccctactgttgcattttcttcccttgagaagaaatgtgaggttgatgccccaagctccgttcctcacattgaggagaacaggtatctctttccagaagtggacatgactagcacaaacttcacaggcctgagctgcagaaccaacaagactctcaacatctaccttttggattcaaatttgttttggttatatgcagagagactgggtgctccgagctccactcaggtgaaagaatttgcggcaattgttgacgtgaaagaagaatctcattacatcttggatccaaagcaagcactgatgaagctcaccctagagtcttttattcaaaacttcagcgttctctatagtcccttgaaaaggcatctcattggaagtggctctgcccagttcccgtctcagcatttaatcactgaagtgacaactgataccttttgggaagtagtccttcaaaaacaggacgttctcctgctctattacgctccgtggtgcggcttctgtccatccctcaatcacatcttcatccagctagctcggaacctgcccatggacacattcactgtggcaaggattgacgtgtctcagaatgaccttccttgggaatttatggtcgatcgtcttcctactgtcttgttttttccctgcaacagaaaggacctaagtgtgaaataccccgaagacgtccccatcacccttccaaacctgttgaggttcattttgcatcactcagaccctgcttccagcccccagaatgtggctaactctcctaccaaggagtgtcttcagagcgaggcagtcttacagcgggggcacatctcccacttggagagagagatccagaaactgagagcagaaataagcagcctccagcgagcacaagtgcaggtggagtcccagctctccagtgcccgcagagatgagcaccggctgcggcagcagcagcgggccctggaagagcagcacagcctgctccacgcacacagtgagcagctgcaggccctctatgagcagaagacacgtgagctgcaggagctggcccgcaagctgcaggagctggccgatgcctcagaaaacctccttaccgagaacacgtggctcaagatcctggtggcgaccatggagaggaaactggagggcagggatggagctgaaagcctggcggcccagagagaggtccaccccaagcagcctgagccctcagccaccccccagctccctggcagctcccctccacctgccaatgtcagcgccacactggtgtctgaaaggaataaggagaacaggacagactaactttttaaatgatatgaagaaatcagaggtgaaaattgtacattgggaatatatttatgcaaattttattgaaatttattgtaaataaagattttctcagtggtctag

SEQ ID NO: 17548 - protein, 958 aa, Homo sapiens
MSECGGRGGGSSSSEDAEDEGGGGGGPAGSDCLSSSPTLATASSAGRLRRGLRGAFLMARQRPELLCGAVALGCALLLALKFTCSRAKDVIIPAKPPVSFFSLRSPVLDLFQGQLDYAEYVRRDSEVVLLFFYAPWCGQSIAARAEIEQAASRLSDQVLFVAINCWWNQGKCRKQKHFFYFPVIYLYHRSFGPIEYKGPMSAVYIEKFVRRVMKPLLYIPSQSELLDFLSNYEPGVLGYFEFSGSPQPPGYLTFFTSALHSLKKDYLGTVRFGVITNKHLAKLVSLVHSGSVYLHRHFNTSLVFPREVLNYTAENICKWALENQETLFRWLRPHGGKSLLLNNELKKGPALFLFIPFNPLAESHPLIDEITEVALEYNNCHGDQVVERLLQHLRRVDAPVLESLALEVPAQLPDPPTITASPCCNTVVLPQWHSFSRTHNVCELCVNQTSGGMKPSSVSVPQCSFFEMAAALDSFYLKEQTFYHVASDSIECSNFLTSYSPFSYYTACCRTISRGVSGFIDSEQGVFEAPTVAFSSLEKKCEVDAPSSVPHIEENRYLFPEVDMTSTNFTGLSCRTNKTLNIYLLDSNLFWLYAERLGAPSSTQVKEFAAIVDVKEESHYILDPKQALMKLTLESFIQNFSVLYSPLKRHLIGSGSAQFPSQHLITEVTTDTFWEVVLQKQDVLLLYYAPWCGFCPSLNHIFIQLARNLPMDTFTVARIDVSQNDLPWEFMVDRLPTVLFFPCNRKDLSVKYPEDVPITLPNLLRFILHHSDPASSPQNVANSPTKECLQSEAVLQRGHISHLEREIQKLRAEISSLQRAQVQVESQLSSARRDEHRLRQQQRALEEQHSLLHAHSEQLQALYEQKTRELQELARKLQELADASENLLTENTWLKILVATMERKLEGRDGAESLAAQREVHPKQPEPSATPQLPGSSPPPANVSATLVSERNKENRTD

SEQ ID NO: 17549 - DNA, 2730 bp, Homo sapiens
  CDS (4)..(798)
agaatgcctatgagacacaggaagaaggcagcagacaagaatcttccctgccgtcctttagtatgtgcagtactggacctgatggtagagtttattgtaacacacatgatgaaggagtttcctatggatctctatatacgctgcatccaggtagtacacaaactgctctgctaccagaagaagtgtcgggtacgcctgcattacacctggcgggagctctggtcagccttgataaatttgctgaagttccttatgtcaaatgagactgtacttttggccaaacacaacatttttacattagcccttatgattgtgaacctatttaatatgtttatcacatatggcgacacatttctgccaacccccagcagctatgatgaactttactatgagattatccgcatgcaccagagctttgacaacctctactccatggtcctgaggctttctaccaatgcaggccagtggaaggaagcagctagcaaggtgacccatgcattggttaatatcagagccatcatcaaccactttaaccccaaaattgagtcctacgctgctgtgaatcacatatcccaactgtcagaggagcaggtgctggaggtggtgagagccaactatgacacgctcacgctgaagctgcaggatggcctggaccagtatgagcgctactcagagcagcacaaggaagctgccttcttcaaagagctggttcgatccattagcaccaacgtccggagaaacctggtcttccacacactcagccaagaagtcctgctcaaggagttctccactatctcctgaggccacgcctacctgagcagcctctgactgcccttacccatgaggatcatgggctggagggggagcgaggggagagggggctgcccccgaggttggagagaaacacagataccaagttctcttggtgaagaccgcacttcaatggagcttgggcagcaggggcaggagggtcaagccagggataatcttatttggggaggaatgggtgggcacagtggggagaggcctccaggaatgtggggacttccagagtgggctccctaaacagcccctcacatttccaatcttgaggttacaagctgtagctactgactaattttcgggagctggtgaggcaagcctcagggtaatgccagcaccctgaaagtcagtggctctgctcggcttctgaaaacagatcaactctcagatatagctggagctacatcctgcttcctttgggcctggggctgtgcttggcttgaaatctgtgtcccctgcctgcactggcactttgtccagtcatcgggacctttggctcagatttagggtaagataggaatagggtacctttttccttttttttctgagacggagtctcactctgtcgcccaggctggaatgcagtggcgtgatctcggctttactgcagcctccgcttcctgggttcaagcgattctcctgcctcagcctcccgagtagctgggactacaggagcgtgtgccacgcccggctaattttttgtatttttagtagagatggagtttcaccatgttacccaggatggtctcaatatcctgagttcatgatccacccaccttggcctcccaaagtgctgggattacaggcgtgagccaccacacccagccagttttcctattttctgaattcagaattgacttctctgggaaaactggagatgagaatctgcccagtgctctgctgtccagtcaccgccttttgaattttagttttggcaccaggagtaccgttagctttccccttcttctggcccatttgactcatcagcacaatagggtcaccaccttaacttttaatttctaatctgctttactgtctttagggtgtgtatgaaataaacattgacaggctttctggagccctcaaggtgcctactttgctggttccctttccagcagctcccccacctcccttagccccccctcctctggcagcctctcctgcctctgctgagctcccctccacgtgttccacccccttaccctgctgttgtttacatccaacctgcctgagaatttcctctggggaggaatctattcctgtcatggtctagtgcctgggagggagagaacttcctgggggtagggtgccctccatctgaaacaggccaggtgagcatcatgcataaggcctccattctgtccgctcagattctgggtggggccacaggcaaatctcctgacttatggggagttggcttgtggttcctcccttggatagcctccatggaaccactataggctttcccaacagctgcctctgaaatagctgctgcttcgagatcctccctttttaaagcactttctaaagccctcaggatggcgggagcaaacagcactggtatattctaggagtaagtgcaggaattcagcagtgagagcatgtctgggaccacctggactgccatccatttaacctcaaatctctttgggatactcgccctccctgggaaccagagttctggctctaacattgagcagctatgcactagttccagagaagccactaacaggctgccatgtgtagatgtaggttcttaagagatcacaggctgggtcatctgatcactggatggatagctcagcctggggcatttagtgttttccctggtgataaatccccaaggcagctggatttggagctggtggcaagttgaaattattaaaaattgatttgtgtgggactgtc

SEQ ID NO: 17550 - protein, 265 aa, Homo sapiens
MPMRHRKKAADKNLPCRPLVCAVLDLMVEFIVTHMMKEFPMDLYIRCIQVVHKLLCYQKKCRVRLHYTWRELWSALINLLKFLMSNETVLLAKHNIFTLALMIVNLFNMFITYGDTFLPTPSSYDELYYEIIRMHQSFDNLYSMVLRLSTNAGQWKEAASKVTHALVNIRAIINHFNPKIESYAAVNHISQLSEEQVLEVVRANYDTLTLKLQDGLDQYERYSEQHKEAAFFKELVRSISTNVRRNLVFHTLSQEVLLKEFSTIS

SEQ ID NO: 17551 - DNA, 4193 bp, Homo sapiens
  CDS (416)..(2794)
agaccggcgcgtgaggaacctaccggtaccggccgcgcgctggtagtcgccggtgtggctgcacctcaccaatcccgtgcgccgcggctgggccgtcggagagtgcgtgtgcttctctcctgcacgcggtgcttgggctcggccaggcggggtccgccgccagggtttgaggatgggggagtagctacaggaagcgaccccgcgatggcaaggtatatttttgtggaatgaaaaggaagtattagaaatgagctgaagaccattcacagattaatatttttggggacagatttgtgatgcttgattcacccttgaagtaatgtagacagaagttctcaaatttgcatattacatcaactggaaccagcagtgaatcttaatgttcacttaaatcagaacttgcataagaaagagaatgggagtctggttaaataaagatgactatatcagagacttgaaaaggatcattctctgttttctgatagtgtatatggccattttagtgggcacagatcaggatttttacagtttacttggagtgtccaaaactgcaagcagtagagaaataagacaagctttcaagaaattggcattgaagttacatcctgataaaaacccgaataacccaaatgcacatggcgattttttaaaaataaatagagcatatgaagtactcaaagatgaagatctacggaaaaagtatgacaaatatggagaaaagggacttgaggataatcaaggtggccagtatgaaagctggaactattatcgttatgattttggtatttatgatgatgatcctgaaatcataacattggaaagaagagaatttgatgctgctgttaattctggagaactgtggtttgtaaatttttactccccaggctgttcacactgccatgatttagctcccacatggagagactttgctaaagaagtggatgggttacttcgaattggagctgttaactgtggtgatgatagaatgctttgccgaatgaaaggagtcaacagctatcccagcctcttcatttttcggtctggaatggccccagtgaaatatcatggagacagatcaaaggagagtttagtgagttttgcaatgcagcatgttagaagtacagtgacagaactttggacaggaaattttgtcaactccatacaaactgcctttgctgctggtattggctggctgatcactttttgttcaaaaggaggagattgtttgacttcacagacacgactcaggcttagtggcatgttggatggtcttgttaatgtaggatggatggactgtgccacccaggataacctttgtaaaagcttagatattacaacaagtactactgcttattttcctcctggagccactttaaataacaaagagaaaaacagtattttgtttctcaactcattggatgctaaagaaatatatttggaagtaatacataatcttccagattttgaactactttcggcaaacacactagaggatcgtttggctcatcatcggtggctgttattttttcattttggaaaaaatgaaaattcaaatgatcctgagctgaaaaaactaaaaactctacttaaaaatgatcatattcaagttggcaggtttgactgttcctctgcaccagacatctgtagtaatctgtatgtttttcagccgtctctagcagtatttaaaggacaaggaaccaaagaatatgaaattcatcatggaaagaagattctatatgatatacttgcctttgccaaagaaagtgtgaattctcatgttaccacgcttggacctcaaaattttcctgccaatgacaaagaaccatggcttgttgatttctttgccccctggtgtccaccatgtcgagctttactaccagagttacgaagagcatcaaatcttctttatggtcagcttaagtttggtacactagattgtacagttcatgagggactctgtaacatgtataacattcaggcttatccaacgacagtggtattcaaccagtccaacattcatgagtatgaaggacatcactctgctgaacaaatcttggagttcatagaggatcttatgaatccttcagtggtctcccttacacccaccaccttcaacgaactagttacacaaagaaaacacaacgaagtctggatggttgatttctattctccgtggtgtcatccttgccaagtcttaatgccagaatggaaaagaatggcccggacattaactggactgatcaacgtgggcagtatagattgccaacagtatcattctttttgtgcccaggaaaacgttcaaagataccctgagataagattttttcccccaaaatcaaataaagcttatcattatcacagttacaatggttggaatagggatgcttattccctgagaatctggggtctaggatttttacctcaagtatccacagatctaacacctcagactttcagtgaaaaagttctacaagggaaaaatcattgggtgattgatttctatgctccttggtgtggaccttgccagaattttgctccagaatttgagctcttggctaggatgattaaaggaaaagtgaaagctggaaaagtagactgtcaggcttatgctcagacatgccagaaagctgggatcagggcctatccaactgttaaattttatttctacgaaagagcaaagagaaattttcaagaagagcagataaataccagagatgcaaaagcaatcgctgccttaataagtgaaaaattggaaactctccgaaatcaaggcaagaggaataaggatgaactttgataatgttgaagatgaagaaaaagtttaaaagaaattctgacagatgacatcagaagacacctatttagaatgttacatttatgatgggaatgaatgaacattatcttagacttgcagttgtactgccagaattatctacagcactggtgtaaaagaagggtctgcaaactttttctgtaaagggccggtttataaatattttagactttgcaggctataatatatggttcacacatgagaacaagaatagagtcatcatgtattctttgttatttgcttttaacaacctttaaaaaatattaaaacgattcttagctcagagccatacaaaagtaggctggattcagtccatggaccatagattgctgtccccctcgacggacttataatgtttcaggtggctggcttgaacatgagtctgctgtgctatctacataaatgtctaagttgtataaagtccactttcccttcacgttttttggctgacctgaaaagaggtaacttagtttttggtcacttgttctcctaaaaatgctatccctaaccatatatttatatttcgttttaaaaacacccatgatgtggcacagtaaacaaaccctgttatgctgtattattatgaggagattcttcattgttttctttccttctcaaaggttgaaaaaatgcttttaatttttcacagccgagaaacagtgcagcagtatatgtgcacacagtaagtacacaaatttgagcaacagtaagtgcacaaattctgtagtttgccgtatcatccaggaaaacctgagggaaaaaaattatagcaattaactgggcattgtagagtatcctaaatatgttatcaagtatttagagttctatattttaaagatatatgtgttcatgtattttctgaaattgctttcatagaaattttcccactgatagttgatttttgaggcatctaatatttacatatttgccttctgaactttgttttgacctgtatcctttatttacattgggtttttctttcgtagttttggtttttcactcctgtccagtctatttattattcaaataggaaaaattactttacaggttgttttactgtagcttataatgatactgtagttattccagttactagtttactgtcagagggctgcctttttcagataaatattgacataataactgaagttatttttataagaaaatcaagtatataaatctaggaaagggatcttctagtttctgtgttgtttagactcaaagaatcacaaatttgtcagtaacatgtagttgtttagttataattcagagtgtacagaatggtaaaaattccaatcagtcaaaagaggtcaatgaattaaaaggcttgcaactttttcaaaaacctgttagaatatgc

SEQ ID NO: 17552 - protein, 793 aa, Homo sapiens
MGVWLNKDDYIRDLKRIILCFLIVYMAILVGTDQDFYSLLGVSKTASSREIRQAFKKLALKLHPDKNPNNPNAHGDFLKINRAYEVLKDEDLRKKYDKYGEKGLEDNQGGQYESWNYYRYDFGIYDDDPEIITLERREFDAAVNSGELWFVNFYSPGCSHCHDLAPTWRDFAKEVDGLLRIGAVNCGDDRMLCRMKGVNSYPSLFIFRSGMAPVKYHGDRSKESLVSFAMQHVRSTVTELWTGNFVNSIQTAFAAGIGWLITFCSKGGDCLTSQTRLRLSGMLDGLVNVGWMDCATQDNLCKSLDITTSTTAYFPPGATLNNKEKNSILFLNSLDAKEIYLEVIHNLPDFELLSANTLEDRLAHHRWLLFFHFGKNENSNDPELKKLKTLLKNDHIQVGRFDCSSAPDICSNLYVFQPSLAVFKGQGTKEYEIHHGKKILYDILAFAKESVNSHVTTLGPQNFPANDKEPWLVDFFAPWCPPCRALLPELRRASNLLYGQLKFGTLDCTVHEGLCNMYNIQAYPTTVVFNQSNIHEYEGHHSAEQILEFIEDLMNPSVVSLTPTTFNELVTQRKHNEVWMVDFYSPWCHPCQVLMPEWKRMARTLTGLINVGSIDCQQYHSFCAQENVQRYPEIRFFPPKSNKAYHYHSYNGWNRDAYSLRIWGLGFLPQVSTDLTPQTFSEKVLQGKNHWVIDFYAPWCGPCQNFAPEFELLARMIKGKVKAGKVDCQAYAQTCQKAGIRAYPTVKFYFYERAKRNFQEEQINTRDAKAIAALISEKLETLRNQGKRNKDEL

SEQ ID NO: 17553 - DNA, 2553 bp, Homo sapiens
  CDS (651)..(956)
tcgcgcgcgccgccgccccgcgctgctgaagctggcgtcgctgccgccctcgtgccacgcaccgccgcacgcgctggagcaggaggagacgccgctgtgacgccgccggcgggaagggtccgcgcgccatggctggccgctcgcgccctttcccaccgctgccgggaaaccgaggctcgccccaaacggatttgcgtgaaaccagcccaaggttccgggcccccccaaccgagccccgcgcccggggactgactcggggaccgactcagggacctcccgagcgccaggactcagggcccgacctgcagcggctgcaggcccagcgcccgcaagcggcctgggccgagcgccgtttccaggccctcgccaggtctttgaactgcaggtaaagtggcaggaacgtcttccgtctgctcagcgtttggggatttagactcctaaagccagtacctgccccgtttcccccccaggttccgtcctgcccgcgcccggtctcagggtggcggccccggacacggcccgtccccacagacgaggtctccggcctgagctgtcgcacctggcgcggaggtcgcccggggtgccctggctgggtgagaggtggcctggcgggcggagcttgccaagaatcacggccagtccttaagtggatggtggggcccagcagctgctctgtcccccttaacaaaccagggggcatggaggggcccagggcaccgcccccctaccaggctcaggccctccaaggagaacctgctgagacccctgagcctgtcctagaccccggacccctgacccttcccaccccttccagcgtcccagggcgaggccttggacagagctcctggtcctctgcagggagaccatccagcccaagctctgggaggcacagtccattgagtgggcggaggccgcgggtgctgagccggggagggtgctcggagtccatccatccctgagacggcaagtcccacagggtccaacccacctgaaacctgcctgcacggtggaagtggtggaggtggacactcctaggggcttttctaaagctagactcgcagctccttgctcaggaaaattaaactattcacgtttcagatcaagtgttgacagtcaccagtcaggaggagttcttaaagagttttatgttgactgaatattgcacattgagtccccattgagtccctggtgggaaaagtccacaatttcccattgatagctttttactgttgtgaaaaagggaagcgtcagccacacaaaagcctgcatgaccgctgcttcggagaagctctcgaccctaactgcagtcactgttacttggatcagatcaagcgcagtgactttttgggattcagtggttattctccacacttcgtagccatttcaaccaactctgagcacaaaatgcagccatcctctatgcagcaagccctgcccagtcagtgaccctactggacagatccaaggccagccctggttccctgctgcagccaccgtcctgacgttcatcggagcaggccggggcctggccttcccggcacaagtggctgttctgacaggcccccagtttgtcccatctgaactgctgggaggtttccgggtggccagaggagcaaagctgccttccaagtgcctgtctgtgcctgggagaacagagcaggagcgtcgtgcggtccaccgcgcagtgcatggcgattccaggcgctgaacaactcccctggacccttgggcctgcatctgactcccagctgcagagtcagaagctgagtccaggcaactgcttggccactcccgatcgctcctccctggacacccggttaccaaagtcagcaaagaagatgcggtaatcgccgcctgatctccacatggtgaacacaacactcccaccaacacctccttgactggtcggtcttcagcaccgggggtgggcaggcaggtgttctgtgttgacgagaattgcacaggctaaacacaaacacggaaccagagtgagaacacctcactcacggcagcccaggctgctccctaccaggtgacggagcgcgccggggctgtgggtgccaggggctgagtgctagggactcgtcatgagtggggatccccacgttcctgtcactgctgtcaaacagaaggtaaacagtcttatgaatgtatttccttaggaaaacttgtaaaaacttttattaggatatctatttaatactgaactttggcctactttgtgatagactataaacaaattgaggaaatcactatttctcacttctgtattttctcaaaaataattttgttacagagttcaatatactgtgtaccattgatcttctattgtgaaagcaaagaatttcatcaaaatattttaaattatgagtgaaaattgtgtatgttaattttgcagctataatattaatcaaattttgtgtaattctaatcacaaaatgacgtgccttaagtgcccctccagctgtgggttggcagtgtccggacagggagggcccatcaccgaaatcctgaatgattactagaccaattctattaaaaacatttcaaggc

SEQ ID NO: 17554 - protein, 102 aa, Homo sapiens
MVGPSSCSVPLNKPGGMEGPRAPPPYQAQALQGEPAETPEPVLDPGPLTLPTPSSVPGRGLGQSSWSSAGRPSSPSSGRHSPLSGRRPRVLSRGGCSESIHP

SEQ ID NO: 17555 - DNA, 2706 bp, Homo sapiens
  CDS (106)..(1533)
aagataaatgcggtacgtgcaatagttcctaataagagcaacaatgaaattatcctggttttgcagcactttgataactgtgtggacaaaacagtacaagcattcatggaaggtagtgccagtgaagtactcaaagaatggacagtaacaggcaagaaaaagaacaaaaagaagaaaaacaaaccgaaacctgccgcagaaccaagtaacggcatcccagattccagtaaatcagtttccattcaagaggaacagtctgcgccttcctcagagaaaggtggtatgaatggctaccatgtcaatggtgccatcaatgacactgagtctgtggactcactcagtgaaggtttggagacactttcaatagatgccagagaattggaggatcccgagtctgccatgctagatacgctggatagaacaggatccatgctgcagaatggtgtctctgattttgagaccaagtctttgactatgcactctattcacaattctcaacaacccaggaatgctgccaaatctctctcaagacctaccacagaaactcagttttcaaatatggggatggaagatgttcccctcgccaccagtaaaaagctaagttccaatattgaaaaatctgtaaaagacctccagcgctgcacagtgtctcttgcacggtatcgagttgtagttaaagaagagatggatgcctccattaagaaaatgaaacaagcctttgctgaattggagagctgtttaatggatcgagaagtggcgttgcttgctgaaatggacaaagtgaaagctgaagcaatggaaattttgctcagccgacaaaagaaggctgaacttctaaagaagatgactcatgtggctgttcaaatgtcagagcagcaattggttgagctcagagctgatatcaagcactttgttagtgaacgtaaatatgatgaggatctgggacgagtagcccggttcacctgtgatgtagagaccctaaagaagagcattgattcatttggacaagtgtctcatccaaagaacagctattcgaccagatcccgatgtagctcagttacatctgtgtccttgagtagcccaagtgatgcctctgctgcttcctcttccacctgtgcctctcctcccagccttacaagtgctaacaagaaaaactttgcaccgggagagactcctgcagccatagcaaactccagtggccagccctaccagccacttcgggaggtattgccagggaacagacgaggaggacagggctataggccacaaggccaaaagtccaatgaccccatgaaccaagggcggcatgacagtatgggtcgttacagaaacagctcgtggtattcatctggttccaggtatcagagtgctccatctcaggcaccaggaaacaccattgaaagaggccagactcactctgcagggaccaatggaactggagtcagcatggagcccagccctcccacgccttcattcaaaaaggggctcccccagcgcaaacccaggacctctcagactgaagccgtgaactcttgagagaaaatccagttggcctctctcctctatccacacaattcaacttgataactggactttaggaaacttacagttagatgtaataacaaaaagaagtttatgcgtatcactttttgtgccattctaagtatttttggtttcttgtctccttatttcctctttaccatttttggaggggaagctattttttttccttgatctttcccagtgatatggattgaatctggttggtcatttccaccaggaatcagaggcagctgttaccaggtttcggccttccagttgatccctccactgtccaggctgtctcaggaggaggtgaatcagagctagtctgtcacctttccaatctaagccgaagccacaggtgcctgacaggttcccttctaacaactatttgaccaagagaggcaatcagggggttgtatactgcactggattcgccagagaagggaaaatttaattagtgaaaaggaaagaacactaggaaacatttgagaacctgcctctatcccagaatgtgctggagatttgacactcaaatcagtgtttagtcttctgcttggcaccatagcttaacctgcagtttcttcaaaatgcccaatgccttgtttcctattaccttagattgcaaaccagtctagggaagtctatgagaaagtagcatttaattaaagtttaaaaaaaaaaggttgggcgttgtggctcatgcctgtaatcccagcactttgggaggctgaggcgggtggatcactaggtcaggagttcaagaccagcctggccaacatggtgaaaccctgtctgtactaaaaatacaaaagttagctgagcatggtggcgtgtgcctgtaatctcagctactcaggaggctgaggcaggagaatcgcttgaacccaggaggcggaggctgcagtgagctgagattgtgccactgcactccagcctgggagacagagcaagactcagtctcaaaaaaaaaaaaaaaaaagcatttttctgttttaatgtttggagacttttttttttgttctctccctttcctgaaccctattctgatcctgaaccaaatttatagcaatataattagtgttaatctaaggcattactcatcaaaaaaattgctgcagtctttacagttggataaataaaaacaactgcataaatatgccc

SEQ ID NO: 17556 - protein, 476 aa, Homo sapiens
MEGSASEVLKEWTVTGKKKNKKKKNKPKPAAEPSNGIPDSSKSVSIQEEQSAPSSEKGGMNGYHVNGAINDTESVDSLSEGLETLSIDARELEDPESAMLDTLDRTGSMLQNGVSDFETKSLTMHSIHNSQQPRNAAKSLSRPTTETQFSNMGMEDVPLATSKKLSSNIEKSVKDLQRCTVSLARYRVVVKEEMDASIKKMKQAFAELESCLMDREVALLAEMDKVKAEAMEILLSRQKKAELLKKMTHVAVQMSEQQLVELRADIKHFVSERKYDEDLGRVARFTCDVETLKKSIDSFGQVSHPKNSYSTRSRCSSVTSVSLSSPSDASAASSSTCASPPSLTSANKKNFAPGETPAAIANSSGQPYQPLREVLPGNRRGGQGYRPQGQKSNDPMNQGRHDSMGRYRNSSWYSSGSRYQSAPSQAPGNTIERGQTHSAGTNGTGVSMEPSPPTPSFKKGLPQRKPRTSQTEAVNS

SEQ ID NO: 17557 - DNA, 4188 bp, Homo sapiens
  CDS (177)..(959)
tgttcattgaagaacaggcggctggaattgggaagagtgccaaaatagtggttcatcttcacccagctcctcctaacaaagaacctggcccattccagagtagtaagaactcctacatcaaactctccttcaaagaacatggccagattgagttttacaggcgtttatcagaggaaatgacacaaagaagatgggagaatatgccagtttcccagtcattacaaacaaatagaggaccccagccaggaagaataagggctgtaggaattgtaggtattgaaaggaaactggaagaaaaaagaaaagaaactgacaaaaacatttctgaggcctttgaagacctcagcaaactaatgatcaaggctaaggaaatggtggaattatcaaaatcaattgctaataaaattaaagacaaacaaggtgacatcacagaagatgagaccatcaggtttaaatcctacttgctgagcatgggaatagctaacccagttaccagagaaacctacggctcaggcacacagtaccacatgcagctggccaaacaactggctggaatattgcaggtgcctttagaggaacgagggggaataatgtcactcacggaggtgtactgcttagtaaaccgagctcgaggaatggaattgctctcaccagaagatttagtgaatgcgtgcaagatgctggaagcactgaaattacctctcaggctccgtgtgtttgacagtggcgtcatggtaattgagcttcagtctcacaaggaagaggaaatggtggcctcggccctggagacagtttcagaaaagggatccctaacatcagaagagtttgctaagcttgtgggaatgtctgtcctcctagccaaagaaaggttgctgcttgcagagaagatgggccatctttgccgtgatgactcagtggaaggcctgcgtttttacccaaatttatttatgacacagagctaagggttttgtatttaaaatcctttttgtccatatgcttgcgtcatgtagaggttgtatgacattgagctaagagataaaccccgatcaattgagaatttattagaacttcacagtgcaatgtaaatctcttttaatttctcactaaatatggtccaggaaatttatttagtatacgcataggaaaattcagaaaagtgaatgccaatatgaatttaaaatcatgctatagtgcagaaccctcagagtttaacttggaatatagtggattttaacttgatcctcaaatctaatcattttataaagaagggaatttagttttgcagagaataaaaagagaagttgcatgttcagacaggttagattattattttggtgtaactgaaattcactgattgcacatgacaatgttgggacaaaatatactgcagcatgctatatgaggctcctccccagggcttttagaagcagtcatagacatgtcttcaacataccaaataaaatacctttaaaaatgaaataattttatttgacacatatatttatatatattctatctagtttctctttgtttttttaagtgatgatttcatgactggcatttaaagaatgcaactgtgtcattttgtttccaaatgctgtggattttgaaactgaactagagagctgtatagacatgcccagagttatgattacaaatttaggaggtagacggctcaggaattccctgggattgttgtgctggtggaatggcagagggaacttcacaggaaccttagtgttcttttacctcaaagccacagacaggaaatagaaagtggaaaagtaatatctccttttcttttccataaggagtttcaacactgaactttaaaaagtctatcatattccagcaatattttttctttgtcctttatgttgtaagttgtgtggaaaaactacttcggtaagaaatgttactgagataacaacaactggctaatactgcatgtagattgcttaggttttaaagtgactgcctgacttcacatgttattgctacagcctccagtatgttcgcattatctcaaactcagggaccccacaggacaggagacaccctttctgaaaccgagttggaagtgaaagggtggtgatggttttggccaagcctgcgggagggaaagtattgtattgggagcacccttgggaccaggaagagggatgcccaggttcacactctgggacccctaagacattgtcagtgggtaaggtggagggccactgccagaggctgctgcagtgccctctgggaagtgccagggaccctcagctgcagacccaggggatcccaatcccttatctctgcctgaaaagtggctattgctgcttcgtatcctccagtgtcacaggaatgctgtgcctgagacatcccactttagtttttgttttccaaacctgtcactgactcttcattgtggtgacagatcctctggttcccccattgctcagcctcaggtttattttgagggtaactcagtgtctgactgcccaagtcttttaggggttagttggaccattgtgtaagcttgtttgtatgtctcacctctttctggttggtacttactgtctcacactgctctggcaaacttgtacacacacacacactctctctctctctcacctggctaaggcttttaaaattatgaagataaataatctgtttcaccagctggagtgagttgcaaggaagattgctggagctactcaatctagcgctaatggtttggattcattactgcaaacctacataatttaacatatttgtttactttagtgtgacaactgatgaaaaaaaaaatggagcaatctgaattgtataaaataacttaagaaggaagaaaagtgatatataaatatattttgcaaatgtcacattaatttaaaaatgagtatgattgattttatttttaaagtgggcattcttcactgtttcgagacctttgtatgtatttgtgtatttttatctttttttttcaggccattattataaggtgttattttggccctctaatgtagaagttatgtttaaatacaaccaatcaggccctaagtgcaaaaaagttctgtcttggtgcttatcactggtataattattatttttttgttttcctaactttgctcttaggagcatgagcctctttgtagctttatggtaatgcaatatttctggtcatttactgtcaaaaaatttttttacattgtgttagtgaagactgtgttttcagggttaaatgattggtatcaatgtatatagagtaaaattattgcaaaatttaaaaatgatttttcttggcattctttttaaatactctgaaacatatatgcaaatgagaaacctttaatcatactaaagccagttatgttaagaatttttcctttggattttataattaagagttgcttataaatacttatgacattgagctcttactgttttagttgtcttaaaagaatgggacatgtcatgaactggtttcttttttttaaaaaattcttgatgtgaattccactgttacctgaccatgtatattcagatgaatgtactctttcttgttccttgttaccagattaatctgagagaatgtggattcatcctgtcatctttctcatactcaaatacttaaaatggttcttttgcccaaaagtctcagagtcttcattttggtacagtggagtcacaacttgtaaggtggttaggttttaaagaccgtgcctaaggacaaaattgagcatgctcagaatggtccttgaaaatctcctagattaccaataaatttctctttgtagtcttaaagtttaaatccctgtggagtgatatgtaggtatgaatatattatgcttatattaagtacaaaaatacaaactgcatatcaagagattcttatagcattaataatttccatgcatgtgtctttttccagtaggtatggttgaatttatgtaaatttattgctaatcccatcccttacgatctagagtataagctgcgcaagggcagaagtttttatctggtttgttcatggatgtattctaagagctgagaacagggcctggacacaataagcattcaataaatatttactgaatgaatgaactcctacctatattcctatttataatttggctccactttatcctactttagctcccattcaattcaataaaaaaaacatttttttgaacacat

SEQ ID NO: 17558 - protein, 261 aa, Homo sapiens
MTQRRWENMPVSQSLQTNRGPQPGRIRAVGIVGIERKLEEKRKETDKNISEAFEDLSKLMIKAKEMVELSKSIANKIKDKQGDITEDETIRFKSYLLSMGIANPVTRETYGSGTQYHMQLAKQLAGILQVPLEERGGIMSLTEVYCLVNRARGMELLSPEDLVNACKMLEALKLPLRLRVFDSGVMVIELQSHKEEEMVASALETVSEKGSLTSEEFAKLVGMSVLLAKERLLLAEKMGHLCRDDSVEGLRFYPNLFMTQS

SEQ ID NO: 17559 - DNA, 3459 bp, Homo sapiens
  CDS (392)..(2149)
atgtgaccacactgaatttaatgcatttcttgatttgaagaactccctaaatgaagtaaaaaacctactgagtgataagaaactggatgagtggcatgagcacactgctttcactaataaagcagggaaaatcatttctcatgttagaaaatctgtgaatgctgaactttgtactcaagcatggtgtaagttccatgagattttgtgcagctttccacttattccacaggaagcttttcagaatggaaaactgaattctctacacctttgtgaagctccaggagcttttatagctagtctcaaccactacttaaaatcccatcggtttccttgtcattggagttgggtagcgaatactctgaatccataccatgaagcaaatgacgacctcatgatgattatggatgaccggcttattgcaaataccttgcactggtggtactttggtccagataacactggtgatatcatgaccctgaaattcttgactggacttcagaatttcataagcagcatggctactgttcacttggtcactgcagatgggagttttgattgccaaggaaacccaggtgaacaagaagctttagtttcttctttgcattactgtgaagttgtcactgctctgaccactcttggaaacggtggctcttttgttctaaagatgtttactatgtttgaacattgttccataaacttgatgtacctgctaaactgttgttttgaccaagtccatgttttcaaacctgctactagcaaggcaggaaactccgaagtctatgtggtttgcctccactataaggggagagaggccatccatcctctgttatctaagatgaccttgaattttgggactgaaatgaaaaggaaagccctttttccccatcatgtgattcctgattcttttcttaagagacatgaagaatgttgtgtgttctttcataaatatcagctagagactatttctgaaaacattcgtctatttgagtgcatgggaaaggcggaacaagaaaagctgaataatttaagggattgtgctatacaatattttatgcaaaaatttcaactgaaacatctttccagaagtaattggctagtaaaaaaatctagtattggttgtagtacaaatacaaaatggtttgggcagaggaacaaatattttaaaacttataatgaaaggaagatgctagaagccctttcatggaaagataaagtagccaaaggatactttaatagttgggctgaagaacatggtgtatatcatcctgggcagagttctattttagaaggaacagcttccaatcttgagtgtcacttatggcatattttggagggaaagaaactgccaaaggtaaaatgttctcctttttgcaatggtgaaattttaaaaactcttaatgaagcaattgaaaagtcattaggaggagcttttaatttggattccaagtttaggccaaaacagcagtattcttgttcttgtcatgttttttctgaagaactgatattttccgagttgtgtagccttactgagtgccttcaggatgagcaggttgtagtacccagcaatcaaataaagtgcctgctggtgggcttttcgactctccgtaatatcaaaatgcatataccgttggaagttcgactcctagaatcagctgaactcacaacttttagctgttcattgcttcatgatggagatccaacttaccagcgtttatttttggactgccttctacattcattgcgggagcttcatacaggagatgttatgattttgcctgtactttcttgcttcacaagatttatggctggtttgatctttgtactccacagttgttttagattcatcacttttgtttgtcccacatcctctgatcccctgaggacctgcgcagtcctgctatgtgttggttatcaggaccttccaaatccagttttccgatatttgcagagtgtgaatgaattgttgagcactttgctcaactctgactcaccccagcaggttttacagtttgtgccaatggaggtactccttaagggggccctgcttgattttttgtgggatttgaatgctgccattgctaaaaggcatttgcatttcattattcaaagagagagagaagaaattatcaacagccttcagttacaaaactgaacatatgctttctgagattcaactttatgatttcttataatttgcccagtatttgcatcctgttgctctattaatttaaaaaccttttattttggggaaaggccaacatttgcatcattcaaagtctcattaattctggaaaaccatccattctgatctctagggtatatacacccacaggcatagagctcttccacgtggtggaatctatgcaatgatagatattcacactctaaatatgaggtgtgtgtatgtgtatgggtggccacagccatgcttacctatgccatttagttggtcttacttaatctgcttaagatttgcatctgtgtacctttgttcagattagttttttttttccagccgatttcctcttagtggctaatgctgttagtgaattttccaactaatttcctctcattggttaatgttgttaatgaattgagagaggtaattgaggaaaggaaatgagtaaatcactgttcagcaacactgatttccgttaacacatcagttatgaatttcagggaattcatctcgccagattcttgataacatgccattcattgcccttaggtgattgaccctattttcttacatggctcaaataaaactagtatgctgttgtatgaatcttttactgaccacaccatccaactataaaaatataacgggacagctttaaaccaaagatcatgtttagaacaatgaaaaattatttgttgtatctaatacacgcctgtattgtgaaaagcttcatttagcaatgatgtaataatttttaacttccaggaaataatctgtgaatggaaagattttttaagattttgagatagtgtttagtctcatgttgggaacacatgaatgtgatgaacatagtgaatactaaagaaaacgcttcagactttcagaatgatggttcagaatttaaaatttttaatcttttctaatttctttttttcagtgtgaaaatagcactttaccaaaagattagccatgaaatggttattttgccagttacatttgatttcttttgtatctgcaatgtaatgagttattttatttcttctgtatttgcagtgtaatgagtttttgtggcaaagtgtattaagcaatttttcattatcttgaagttccacaaagtggagaatatttatattctcacatgcattttaggcacttttgatatgtgaaaatagatgtattttctgatgcatttggttaataaatattaatctgaacattttcatgttctttgctattttgaattccattatagattcatgaataaagtcattactagagag

SEQ ID NO: 17560 - protein, 586 aa, Homo sapiens [sequence omitted]

SEQ ID NO: 17561 - DNA, 2521 bp, Homo sapiens
  CDS (22)..(408)
tttccatggggctctcaaggaatgagaagtcaagatcacatccaagttagcaagcagcacattaataatcagcaacagccacctcaactacgttggagaagcaattctctcaataatggccagccgaaaagtacgcgctgccaggcatctgcctccgcggagtcattaaactcccacagtggtcaccccactgctgatgtacagactttccaggcaaagcgccatattcatcaacaccgtcagtcttactgtaattataacactggaggtcagttagagggcaatgcagccacttcctatcagaagcagactgacaaacccagccactgtagccagtttgtgacacctccgcggatgaggagacagttctcagcacccaatctcaaagctggtcgagaaaccacagtataaatcagttactggacaaacttgaaatcatggtggaagaaacagacagtgttagctcatgatttgatttggttctacctttggccttgagttcttattatttacattataaatattaactggttttatattgttaagacaaaacactggtaaaagtttcaacacctcccttttgcttgtataccataaatgggcagtttctgaaattttggataaagcatcaagaactcctttttctgaaacgttcctccttttttagtgcctaattaatatacttacttacacagacttgtcccatcttgatgtaagtttgttatgtttttataatgcctataaattaatctgacatccagaaagacctgcctcttagtttatgcagacattcaaaaggagaatttgataagcagaattaaatgtctgttattcataaatgttagaaattggtttaaaaataataacatgcaactgggtgggcacagctttggatttctcatccacgtctgttcccttctttaaatatgattagaattttcgtaagccaaaactaaaggtcttcaaacatatcttgcaatacatagctttgcatcttccacacaacttccacgtcttcttttattctgtattttacaaaaaactcatataatggttttttcttttgaatgtatcagaatatgtatgaaatttgtcatatcagaatctataaattggcactgtgtctgggattctgtttgtggtttgcattttgaagttcaatgtatcatttgacacacatgcacacaaagtgaactattcaccaaaatcatgccaacagaaataccaacaaaaaacttgtgtagcttgtaaggaggttatttggcttgagagggaagaggtgggacagacatgggggacaaagctacagcatatggctctgtggtgctgcttttttccaatagttgatgaaatagtgaaataaaagttaactttggttgggcttggaataaaggagatgatacataataaactattctttggttagcattagtaatgcttgtagacactcaaacaaggaaggcgaagtcctgatgatgatttattgtatcaatacctcattttatttggttgtggtctcagtttgcctcactggagaatccactaagaaagatggattttaatgggaagaaaagaattattttctacatcgttcctcatctcttgagtttgtcaaaaagttttctaagaggcagtgtgaagagccagagatgtccgaaattgcctgacttcatgttttggaagattcctaagtcacatgaaatcatctatcaaacacttgtcttccaaacggtgtgaaaaactacagccaagatagcagttagcattcaaggaagccttaaagattgtgattatgtttttttttcctttgcgtgtgggcactatgctttattagaacacattatttttaatcatagtattttttctttgcctctaagaaaatactttcttaatgctcagaaagttgcttccaattaatgtttttttccccttaaaaagagaagctttgagagatatttttgctttcatagctagaacagttgaagtcttcaactgaggttttatagcagattagacatgggtaaatgatgtctgtaatgggttgagttactgagatgacaatctcctgtgccatttggtttgaatgtacttgataggctgcttcaaatcagtcacttcaatgcattttgtgtaaacccagttgtccttttttattcctctttagacataaatgtgctaactattcctttctatacacaatttattttctaagattaaaaataataattgctaggtttggtggcacatgcgtacagccccagctacttaggaggctgaagcaggaggatccctagagcccaggagttctgggctgtggtacactatgccagttgggtgtaagtttggcatcaatatggtgatgtccctgaagcaggaaaccacaaacttgcatcaggacgggtgaacccagcccaggttggaaatggagcaggccaaaactcccaggctgatcagtaatgggatcttgcctatgaatagccagtgcactgcagccaggacaacagagtgagaacctgtcttt

SEQ ID NO: 17562 - protein, 129 aa, Homo sapiens
MRSQDHIQVSKQHINNQQQPPQLRWRSNSLNNGQPKSTRCQASASAESLNSHSGHPTADVQTFQAKRHIHQHRQSYCNYNTGGQLEGNAATSYQKQTDKPSHCSQFVTPPRMRRQFSAPNLKAGRETTV

SEQ ID NO: 17563 - DNA, 3125 bp, Homo sapiens
  CDS (170)..(2395)
attttacccagcccctgttcaagatggagttgctgtggttcacacatctctgacaaaaatacagggctattcggagtcaccagacctggagtttgagtatgctgacacagacaagtgggctgcagagctctcggagctttacagctacacggaagggccagaattcctgatgaatcgaaaatgctttgaggaggacttccggatccatgtgacagacaagaagtggactgagctggataccaaccagcaccggacccatgccatgaggctcctggatggcttggaagtcactgccagggagaagagactcaaggtggctcgagcaattctctatgttgctcaaggcacgtttggggagtgcagctcggaggcagaggtgcagtcctggatgcgctacaacatctttctcctcctggaggtgggcacgttcaatgctttggtggagcttctgaacatggaaatagacaacagtgccgcctgcagcagtgctgtgaggaagcctgccatctccctggctgacagcacagacctcagggtcctgctcaacatcatgtacctgatagtggagaccgttcatcaggagtgtgagggtgacaaggctgagtggaggaccatgcggcagaccttcagagccgagctgggctccccgctgtacaacaatgagccatttgccatcatgctgtttgggatggtgaccaaattttgcagtggtcacgcccctcactttcccatgaagaaagttctcttgctgctctggaagacagtattgtgcacgctaggcggctttgaggagctgcagagcatgaaggctgagaagcgcagcatcctgggcctccccccgcttcctgaggacagcatcaaagtgattcgcaacatgagagcagcctctccaccagcatctgcttcagacttgattgagcagcagcagaaacggggccgccgagagcacaaggctctgataaagcaggacaacctagatgccttcaacgagcgggatccctacaaggctgatgactctcgagaagaggaagaggagaatgatgatgacaacagtctggagggggagacgtttcccctggaacgggatgaagtgatgcctcccccgctacagcacccacagactgacaggctgacttgccccaaagggctcccgtgggctcccaaggtcagagagaaagacattgagatgttccttgagtccagccgcagcaaatttataggttacactctaggcagtgacacgaacacagtggtggggctgcccaggccaatccacgaaagcatcaagactctgaaacagcacaagtacacgtcgattgcagaggtccaggcacagatggaggaggaatacctccgctcccctctctcagggggagaagaagaagttgagcaagtccctgcagaaaccctctaccaaggcttgctccccagcctgcctcagtatatgattgccctcctgaagatcctgttggctgcagcacccacctcaaaagccaaaacagactcaatcaacatcctagcggacgtcttgcctgaggagatgcccaccacagtgttgcagagcatgaagctgggggtggatgtaaaccgccacaaagaggtcattgttaaggccatttctgctgtcctgctgctgctgctcaagcactttaagttgaaccatgtctaccagtttgaatacatggcccagcacctggtgtttgccaactgcattcctttgatcctaaagttcttcaatcaaaacatcatgtcctacatcactgccaagaacagcatttctgtcctggattaccctcactgcgtggtgcatgagctgccagagctgacggcggagagtttggaagcaggtgacagtaaccaattttgctggaggaacctcttttcttgtatcaatctgcttcggatcttgaacaagctgacaaagtggaagcattcaaggacaatgatgctggtggtgttcaagtcagcccccatcttgaagcgggccctaaaggtgaaacaagccatgatgcagctctatgtgctgaagctgctcaaggtacagaccaaatacttggggcggcagtggcgaaagagcaacatgaagaccatgtctgccatctaccagaaggtgcagcatcggctgaacgacgactgggcatacggcaatgatcttgatgcccggccttgggacttccaggcagaggagtgtgcccttcgtgccaacattgaacgcttcaacgcccggcgctatgaccgggcccacagcaaccctgacttcctgccagtggacaactgcctgcagagtgtcctgggccaacgggtggacctccctgaggactttcagatgaactatgacctctggttagaaagggaggtcttctccaagcccatttcctgggaagagctgctgcagtgaggctgttggttaggggactgaaatggagagaaaagatgatctgaaggtacctgtgggactgtcctagttcattgctgcagtgctcccatcccccaccaggtggcagcacagccccactgtgtcttccgcagtctgtcctgggcttgggtgagcccagcttgacctccccttggttcccagggtcctgctccgaagcagtcatctctgcctgagatccattcttcctttacttcccccaccctcctctcttggatatggttggttttggctcatttcacaatcagcccaaggctgggaaagctggaatgggatgggaacccctccgccgtgcatctgaatttcaggggtcatgctgatgcctctcgagacatacaaatccttgctttgtcagcttgcaaaggaggagagtttaggattagggccagggccagaaagtcggtatcttggttgtgctctggggtgggggtggggtgtttctgatgttattccagcctcctgctacattatatccagaagtaattgcggaggctccttcagctgcctcagcactttgattttggacagggacaaggtaggaagagaagcttcccttaaccagaggggccatttttccttttggctttcgagggcctgtaaatatctatatataattctgtgtgtattctgtgtcatgttggggtttttaatgtgattgtgtattctgtttacattaaaaagaagcaaaaat

SEQ ID NO: 17564 - protein, 742 aa, Homo sapiens [sequence omitted]

SEQ ID NO: 17565 - DNA, 3685 bp, Homo sapiens
  CDS (46)..(678)
atttctacgacttttctctcagctgaggcttttcctccgaccctgatgctcttcaattcggtgctccgccagccccagcttggcgtcctgagaaatgctcccaatatggaacatgtactagcagttgccaatgaagaaggctttgttcgattgtataacacagaatcacaaagtttcagaaagaagtgcttcaaagaatggatggctcactggaatgccgtctttgacctggcctgggttcctggtgaacttaaacttgttacagcagcaggtgatcaaacagccaaattttgggacgtaaaagctggtgagctgattggaacatgcaaaggtcatcaatgcagcctcaagtcagttgccttctctaagtttgagaaagctgtattctgtacgggtggaagagatggcaacattatggtctgggataccaggtgcaacaaaaaagatgggttttataggcaagtgaatcaaatcagtggagctcacaatacctcagacaagcaaaccccttcaaaacccaagaagaaacagaattcaaaaggacttgctccttctgtggatttccagcaaagtgttactgtggtcctctttcaagacgagaataccttagtctcagcaggagctgtggatgggatattcaagtctgattttggattccactggctctactttatttgctaattgcacagacgataacatctacatgtttaatatgactgggttgaagacttctccagtggctattttcaatggacaccagaactctaccttttatgtaaaatccagccttagtccagatgaccagtttttagtcagtggctcaagtgatgaagctgcctacatatggaaggtctccacaccctggcaacctcctactgtgctcctgggtcattctcaagaggtcacgtctgtgtgctggtgtccatctgacttcacaaagattgctacctgttctgatgacaatacactaaaaatctggcgcttgaatagaggcttagaggagaaaccaggaggtgataaactttccacggtgggttgggcctctcagaagaaaaaagagtcaagacctggcctagtaacagtaacgagtagccagagtactcctgccaaagcccccagggtaaagtgcaatccatccaattcttccccgtcatccgcagcttgtgccccaagctgtgctggagacctccctcttccttcaaatactcctacgttctctattaaaacctctcctgccaaggcccggtctcccatcaacagaagaggctctgtctcctccgtctctcccaagccaccttcatctttcaagatgtcgattagaaactgggtgacccgaacaccttcctcatcaccacccatcactccacctgcttcggagaccaagatcatgtctccgagaaaagcccttattcctgtgagccagaagtcaccccaagcagaggcttgctctgagtctagaaatagagtaaagaggaggctagactcaagctgtctggagagtgtgaaacaaaagtgtgtgaagagttgtaactgtgtgactgagcttgatggccaagttgaaaatcttcatttggatctgtgctgccttgctggtaaccaggaagaccttagtaaggactctctaggtcctaccaaatcaagcaaaattgaaggagctggtaccagtatctcagagcctccgtctcctatcagtccgtatgcttcagaaagctgtggaacgctacctcttcctttgagaccttgtggagaagggtctgaaatggtaggcaaagagaatagttccccagagaataaaaactggttgttggccatggcagccaaacggaaggctgagaatccatctccacgaagtccgtcatcccagacacccaattccaggagacagagcggaaagacattgccaagcccggtcaccatcacgcccagctccatgagggaaatctgcacatacttccatagaaagtcccaggaggacttctgtggtcctgaacactcaacagaattatagattctaatctgagtgagttactgagctttggtccactaaaacaagctgagctttggtccactaaaacaagatgaaaaatacaagagtgactctataactctggtctttaagaaagctgccttttcatttttagacaaaatcttttcaacgctgaaatgtacctaatctggttctactaccataatgtatatgcagcttcccgaggatgaatgctgtgtttaaatttcataaagtaaatttgtcactctagcattttgaatgaatagtcttcactttttaaattattcatcttctctataataatgacatcccagttcatggaggcaaaaaacaagtttcttgttatcctgaaactttctatgctcagtggaaagtatctgccagccacagcatgaggcctgtgaaggctgactgagaaatcctctgctgaggacccctggttctgttctgcctccaacatgtataattttatttgaaatacataatcttttcactatgcttttgtggggttttttttaagtatgtgtaaaaatgtgatgctcagataagtacatttatatcagttcagtgttaaaatgcagtctcttgagttaaagtcatctttattttaaatgcagtgataaatgtcaactcttcggagaaactaggagaacaacaacagaaagctgtgttcgtcttttttctctcaaatatatctcccgtatgagatttcaggtccccatgttttcaccaagcaatctgctatgtcagccaacccaacatcactttctacaggaggttatgatttttgccatttactagaggaagatgttttatgaaatcaatttggggtttgaattcaggtgcagtcatcagttctttaggggctgcaatgttttaaaaaaaaataagtcatcagattttaagaaaaaagtgatgatttcttattgatatttttgtaacagaatatagctcttaactgaaaatccagaaccagaaacataaatcttgagtttcttttcatgtacataaaaagcaatagccttttagtatagatagccctgagccaaaaagtaatagaattttctctagatatttaatacagagagtgtatagactgactctaagttaataatgtgcaaaatatcttaaacatccctccccttattcaacaattatgtatcagtgatcttgaaccattgttttatatttttcacctttgtaacctcatggaaagaggctttacatactttctatgtactatttacttagaagggagcccccttccagtcatgaaacttcatttgttttatccatatccctgaggactgtgtagactttatgtcagttctgtgtagactttatgtcagtttttgtcattatttgaaaatctattctgacaactttttaattcctttgatcttataagttaaagctgtaacaactgaaattgcatggatcaagtaagcatagttttatccagggagaaaaataaaaggaagccatagaattgctctggtcaaaaccaagcacaccatagccttaactgagtatttaggaaatctgcctaatctgcttatatttggtgtttgttttttgactgttgggctttgggaagatgttatttatgaccaatatctgccagtaacgctgtttatctcacttgctttgaaagccaatgggggaaaaaaatccatg

SEQ ID NO: 17566 - protein, 211 aa, Homo sapiens
MLFNSVLRQPQLGVLRNAPNMEHVLAVANEEGFVRLYNTESQSFRKKCFKEWMAHWNAVFDLAWVPGELKLVTAAGDQTAKFWDVKAGELIGTCKGHQCSLKSVAFSKFEKAVFCTGGRDGNIMVWDTRCNKKDGFYRQVNQISGAHNTSDKQTPSKPKKKQNSKGLAPSVDFQQSVTVVLFQDENTLVSAGAVDGIFKSDFGFHWLYFIC

SEQ ID NO: 17567 - DNA, 2306 bp, Homo sapiens
  CDS (109)..(1830)
actaagcccaggccaggttgctgtgctggctcatcctccttagaaagatatgcaacctccaatgagttccctgatgatgccctgaacttcatcaagacgcacccgctcatggatgaggcagtgccctccatcttcaacaggccatggttcctgagaacaatggtcagatgcagctatgatggagtcgaagacaaaaggatcatgggcatgcagctggacagagcaagcagctctctgtatgttgcgttctctacctgtgtgataaaggttccccttggccggtgtgaacgacatgggaagtgtaaaaaaacctgtattgcctccagagacccatattgtggatggataaaggaaggtggtgcctgcagccatttatcacccaacagcagactgacttttgagcaggacatagagcgtggcaatacagatggtctgggggactgtcacaattcctttgtggcactgaatgggcattccagttccctcttgcccagcacaaccacatcagattcgacggctcaagaggggtatgagtctaggggaggaatgctggactggaagcatctgcttgactcacctgacagcacagaccctttgggggcagtgtcttcccataatcaccaagacaagaagggagtgattcgggaaagttacctcaaaggccacgaccagctggttcccgtcaccctcttggccattgcagtcatcctggctttcgtcatgggggccgtcttctcgggcatcaccgtctactgcgtctgtgatcatcggcgcaaagacgtggctgtggtgcagcgcaaggagaaggagctcacccactcgcgccggggctccatgagcagcgtcaccaagctcagcggcctctttggggacactcaatccaaagacccaaagccggaggccatcctcacgccactcatgcacaacggcaagctcgccactcccggcaacacggccaagatgctcattaaagcagaccagcaccacctggacctgacggccctccccaccccagagtcaaccccaacgctgcagcagaagcggaagcccagccgcggcagccgcgagtgggagaggaaccagaacctcatcaatgcctgcacaaaggacatgccccccatgggctcccctgtgattcccacggacctgcccctgcgggcctcccccagccacatccccagcgtggtggtcctgcccatcacgcagcagggctaccagcatgagtacgtggaccagcccaaaatgagcgaggtggcccagatggcgctggaggaccaggccgccacactggagtataagaccatcaaggaacatctcagcagcaagagtcccaaccatggggtgaaccttgtggagaacctggacagcctgccccccaaagttccacagcgggaggcctccctgggtcccccgggagcctccctgtctcagaccggtctaagcaagcggctggaaatgcaccactcctcttcctacggggttgactataagaggagctaccccacgaactcgctcacgagaagccaccaggccaccactctcaaaagaaacaacactaactcctccaattcctctcacctctccagaaaccagagctttggcaggggagacaacccgccgcccgccccgcagagggtggactccatccaggtgcacagctcccagccatctggccaggccgtgactgtctcgaggcagcccagcctcaacgcctacaactcactgacaaggtcggggctgaagcgtacgccctcgctaaagccggacgtaccccccaaaccatcctttgctcccctttccacatccatgaagcccaatgatgcgtgtacataatcccagggggagggggtcaggtgtcgaaccagcaggcaaggcgaggtgcccgctcagctcagcaaggttctcaactgcctcgagtacccaccagaccaagaaggcctgcggcagagccgaggacgctgggtcctcctctctgggacacaggggtactcacgaaaactgggccgcgtggtttggtgaaggtttgcaacggcggggactcaccttcattctcttccttcactttcccccacaccctacaacaggtcggacccacaaaagacttcagttatcatcacaaacatgagccaaaagcacatacctaccccatcccccacccccccacacacacacacatgcacacaacacatacacacacacgcacagaggtgaacagaaactgaaacattttgtccacaacttcacgggacgtggccagactgggtttgcgttccaacctgcaaaacacaaatacattttttaaaatc

SEQ ID NO: 17568 - protein, 574 aa, Homo sapiens
MDEAVPSIFNRPWFLRTMVRCSYDGVEDKRIMGMQLDRASSSLYVAFSTCVIKVPLGRCERHGKCKKTCIASRDPYCGWIKEGGACSHLSPNSRLTFEQDIERGNTDGLGDCHNSFVALNGHSSSLLPSTTTSDSTAQEGYESRGGMLDWKHLLDSPDSTDPLGAVSSHNHQDKKGVIRESYLKGHDQLVPVTLLAIAVILAFVMGAVFSGITVYCVCDHRRKDVAVVQRKEKELTHSRRGSMSSVTKLSGLFGDTQSKDPKPEAILTPLMHNGKLATPGNTAKMLIKADQHHLDLTALPTPESTPTLQQKRKPSRGSREWERNQNLINACTKDMPPMGSPVIPTDLPLRASPSHIPSVVVLPITQQGYQHEYVDQPKMSEVAQMALEDQAATLEYKTIKEHLSSKSPNHGVNLVENLDSLPPKVPQREASLGPPGASLSQTGLSKRLEMHHSSSYGVDYKRSYPTNSLTRSHQATTLKRNNTNSSNSSHLSRNQSFGRGDNPPPAPQRVDSIQVHSSQPSGQAVTVSRQPSLNAYNSLTRSGLKRTPSLKPDVPPKPSFAPLSTSMKPNDACT

SEQ ID NO: 17569 - DNA, 2701 bp, Homo sapiens
  CDS (434)..(2272)
atccttatggcagcatgaggaaagctccagggagtgatcccttcatgtcctcagggcagggccccaacggcgggatgggtgacccctacagtcgtgctgccggccctgggctaggaaatgtggcgatgggaccacgacagcactatccctatggaggtccttatgacagagtgaggacggagcctggaatagggcctgagggaaacatgagcactggggccccacagccgaatctcatgccttccaacccagactcggggatgtattctcctagccgctaccccccgcagcagcagcagcagcagcagcaacgacatgattcctatggcaatcagttctccacccaaggcaccccttctggcagccccttccccagccagcagactacaatgtatcaacagcaacagcaggaaccccggaggcatggcgggtaatgatgtccctcaagtctggtctcctggcagagagcacatgggcattagataccatcaacatcctgctgtatgatgacaacagcatcatgaccttcaacctcagtcagctcccagggttgctagagctccttgtagaatatttccgacgatgcctgattgagatctttggcattttaaaggagtatgaggtgggtgacccaggacagagaacgctactggatcctgggaggttcagcaaggtgtctagtccagctcccatggagggtggggaagaagaagaagaacttctaggtcctaaactagaagaggaagaagaagaggaagtagttgaaaatgatgaggagatagccttttcaggcaaggacaagccagcttcagagaatagtgaggagaagctgatcagtaagtttgacaagcttccagtaaagatcgtacagaagaatgatccatttgtggtggactgctcagataagcttgggcgtgtgcaggagtttgacagtggcctgctgcactggcggattggtgggggggacaccactgagcatatccagacccacttcgagagcaagacagagctgctgccttcccggcctcacgcaccctgcccaccagcccctcggaagcatgtgacaacagcagagggtacaccagggacaacagaccaggaggggcccccacctgatggacctccagaaaaacggatcacagccactatggatgacatgttgtctactcggtctagcaccttgaccgaggatggagctaagagttcagaggccatcaaggagagcagcaagtttccatttggcattagcccagcacagagccaccggaacatcaagatcctagaggacgaaccccacagtaaggatgagaccccactgtgtacccttctggactggcaggattctcttgccaagcgctgcgtctgtgtgtccaataccattcgaagcctgtcatttgtgccaggcaatgactttgagatgtccaaacacccagggctgctgctcatcctgggcaagctgatcctgctgcaccacaagcacccagaacggaagcaggcaccactaacttatgaaaaggaggaggaacaggaccaaggggtgagctgcaacaaagtggagtggtggtgggactgcttggagatgctccgggaaaacaccttggttacactcgccaacatctcggggcagttggacctatctccataccccgagagcatttgcctgcctgtcctggacggactcctacactgggcagtttgcccttcagctgaagcccaggaccccttttccaccctgggccccaatgccgtcctttccccgcagagactggtcttggaaaccctcagcaaactcagcatccaggacaacaatgtggacctgattctggccacaccccccttcagccgcctggagaagttgtatagcactatggtgcgcttcctcagtgaccgaaagaacccggtgtgccgggagatggctgtggtactgctggccaacctggctcagggggacagcctggcagctcgtgccattgcagtgcagaagggcagtatcggcaacctcctgggcttcctagaggacagccttgccgccacacagttccagcagagccaggccagcctcctccacatgcagaacccaccctttgagccaactagtgtggacatgatgcggcgggctgcccgcgcgctgcttgccttggccaaggtggacgagaaccactcagagtttactctgtacgaatcacggctgttggacatctcggtatcaccgttgatgaactcattggtttcacaagtcatttgtgatgtactgtttttgattggccagtcatgacagccgtgggacacctcccccccccgtgtgtgtgtgcgtgtgtggagaacttagaaactgactgttgccctttatttatgcaaaaccacctcagaatccagtttaccctgtgctgtccagcttctcccttgggaaaaagtctctcctgtttctctctcctccttccacctcccctccctccatcacctcacgcctttctgttccttgtcctcaccttactcccctcagggccctaccccaccctctttgaaaagacaaagctctgcctacatagaagactttttttattttaaccaaagttactgttgtttacagtgagtttggggaaaaaaaataaaataaaaatggctttcccagtccttgcatcaacgggatgccacatttcataactgtttttaatggtaaaaaaaaaaaaaaaaaaaatac

SEQ ID NO: 17570 - protein, 613 aa, Homo sapiens
MMSLKSGLLAESTWALDTINILLYDDNSIMTFNLSQLPGLLELLVEYFRRCLIEIFGILKEYEVGDPGQRTLLDPGRFSKVSSPAPMEGGEEEEELLGPKLEEEEEEEVVENDEEIAFSGKDKPASENSEEKLISKFDKLPVKIVQKNDPFVVDCSDKLGRVQEFDSGLLHWRIGGGDTTEHIQTHFESKTELLPSRPHAPCPPAPRKHVTTAEGTPGTTDQEGPPPDGPPEKRITATMDDMLSTRSSTLTEDGAKSSEAIKESSKFPFGISPAQSHRNIKILEDEPHSKDETPLCTLLDWQDSLAKRCVCVSNTIRSLSFVPGNDFEMSKHPGLLLILGKLILLHHKHPERKQAPLTYEKEEEQDQGVSCNKVEWWWDCLEMLRENTLVTLANISGQLDLSPYPESICLPVLDGLLHWAVCPSAEAQDPFSTLGPNAVLSPQRLVLETLSKLSIQDNNVDLILATPPFSRLEKLYSTMVRFLSDRKNPVCREMAVVLLANLAQGDSLAARAIAVQKGSIGNLLGFLEDSLAATQFQQSQASLLHMQNPPFEPTSVDMMRRAARALLALAKVDENHSEFTLYESRLLDISVSPLMNSLVSQVICDVLFLIGQS

SEQ ID NO: 17571 - DNA, 3124 bp, Homo sapiens
tatttccatgcaagtggaagacggtaccgtctccccacatttgagaagactgttttgcatcactctttgctattgaaggaagcagtgatggtgaatttccttctgtttgggttccttgtgtctataacttcctttgtggtaaagccatcaggaagaatagtgggagtggggtatatggtcagggtgctcatatcctgctttagcctagctgcttcttacggagtgcaagggagaactctgagaagcagtatgtaaataccagggagctgattgctgaatattgtggtctcatctgaatattgtggtctcatctaaatattgacaccaggcaatgaagcagaaatagagtatgtgtccctttatgcgtgggtaacttaagcttctgtcatgtgggaagggggaccgaatcttccctgggaggaaggctccaaattctcactacttctgtgttacttgaagggggaagcataaggaacccagtttgaaggcaacattgtgtgccatgaatctgcttattaatcaacatgccttgttaatgtcctctgccctgaacagcccttactcagttctcatttggaaagttattttttggggttacatcctgtttgtttcagaatttaaaaccctccatggtgggtcacttgaggtcaggagttcaagattagcctggccaacttagtgaaactccggctctgctgaagatgcaaaaattagccaggtgtggcacacgcctgtaatcccagttacttgggaggccgaggcaggagaatcgcttgaacctgggaggcagaggtcgtagcgagccaagatcacaccattgcactccagcctgggcaacagagtgagactctgtcaaaatcaaaaaaaccaaaatacaaaaaactccattgttctgagagtttcccctaaattatcggaagacactcacattgaattggtaggacctatagtatagaggagaatggtatgtatgtcagcagtagagttccaatccaaattgcgctatcgcattagaaatacattaccctcccactccccaagttcagcaaattagaagagaatctgaagtttgtaggaagggaataaagctgctataaacatttatgtgcaggtttttgtgtagactcgttttcagctcctttgggtaaataccaaggaaccaggttgctggattgtaagttaagagtatgtttagttttggaagaaactgccaaactgttccaacatgactattttgaattcccatcgacaatgaataagagttcctgtagctcctcaccctcattagtatttggtgatgtcactcttgcattttagctaatgggtgaatagtggtctcatcgttttaattcccaatcccatagtgatgtggagcaccttttcatatacttaatctgccatccttatatcatcattggtgaggtgtctggattttctgtccagaattttagttctagtggttttcttatttttagaaaggaagtataggaaggaaggtttaatctgtcttaagcctgattatatgaaaatcaagaataggctaggtgtggtggctgacatctgtaatccccgcactttgtgaggctgaagtgggaggactgcttgagcctgggaagtcaagcctgcagtgagccatgactgttgctgcactccagcctgagtgacagagtgagaccctgtctcagaaaaaaaaaaagcaggctcattttaaagttgtttatattttattttttgaaggaaataaagttgaagagatacaaagggtagtgaagattctccttcccctcctgtaattcagctgtttagtttctattctcgcacagccctgttatcagtttctagtgtaagcttgcagtgacttttactttatttataagcaagtgttagtgggtgttgtcatttcttttaaaaatataaattatactgtacatgctattttgtattttggcttttctcccacctaaacaccctaaagatcattttctgtcagtatataaaatcttggtgatgccaatacccatcccttagattgtacaagcagcattttgccatgctttatcccatagcctgcctcctgcagtctcatctttttttctatatgcgtgtccaagtaagttgtagacatttttcacttttaatcctttcagcatacatgtcatgggaatttgtttttgtttttgttttttgtgtttgagacagtcgctctgtcacccaggctggagttacagtgacgtgatcccagctcattacggcctccacctcccagtttcaagcaattctcatgcctcggattcccgagtagctgggattacagatgtgcaccaccacgcctgactaatttttgtatttttagtagagatggggtttcatcatgttggccaggctggtctggaactcctggcctccagtcatttgcctgcctcggcctcccaaagtgctgggattacaggcatcagccaccacacccagccgtcattggagtttttttgagggagatttgcagtaaggtgaataaatgttaagtgtatcatttgatgaggttttttctttttttttttttttttgagatggagtcttgtatcgcccaggctagagtgcagtggcctggtcttggctcactgcaacctccacctcctgggttcaagggagtctcctgcctcagcctcccgagtagctgggattacaggtgtgagccaccatacccagactcatttgatgagttttgatgtaaaagcatgtaactcaaacccctatgtctggaacatctgtattacatctgaattttttcacctagtcaattcctgcacctctctctcctgtcccttcttccctcccctggcagtcagctactgttaggattttgttcactgtagattaattttgcctattctagaacttcatataacggactcacttatgcagtatgtattctgtaagttccttttactcagcatgtttgtatgttcatcagtgtgtttaagctttgttcctttttatggctgagcagtgttctatgtatgaatgccacattttaacgtttcacctgttaggtgaacaactaactggtgaacaatgggctgtttctagtttggggctatcatgaataaagttggtatgaacatgt

SEQ ID NO: 17572 - DNA, 3473 bp, Homo sapiens
  CDS (710)..(1903)
tgtggggccttatatccaggttcccagtgccggaagctttcctgtgctgggggaccctataaagccccagtctctcagtattgcctcaaatgctgctcatggaagatccaaatccgctaatgatggaaactggccaacattaaaacagaattctagctcttccgtgaaaccagtgcaggtggccggtgcagactggaaggatccgagcgtggaggggtctgtcaagcagggcactgtctccagccagcctgtgcccttctcagcactgggacccacggagaagccgggcatcgagattggtaaagtgccacctcccatcccgggtgtaggcaagcagctgcctccaagctatgggacatacccaagtcctacgcctctgggtcctgggtcggcaagctccctggaaaggaggaaggaaggcagcttgcccaggcccagtgcaggcctgccaagtcgacagaggcccaccctgctgcccgccacaggcagcaccccccagccaggctcctcacaacagattcagcagaggatttccgtaccgccaagtcccacgtacccgccagcgggaccacctgcatttccagctggggacagcaagcctgaactcccactgacagtggccattaggcctttcctggctgataaagggtcaaggccacagtctcccaggaaaggaccccagacagtgaattcaagttccatatactccatgtacctccagcaagccacaccacctaagaattaccagccggcagcacacagcgccttaaataagtcagttaaagcagtgtatggtaagcccgttttaccttcgggttcaacctctccatcgccgctgccgtttcttcacgggtcactgtccacgggcacaccacagcctcagccaccttcagaaagtactgagaaagagcctgagcaggatggccccgccgcccccgcagatggcagcaccgtggagagcctgccacggccactcagccccaccaagctcacgcccatcgtgcattcgccactgcgctaccagagtgatgcagacctggaggccctccgcaggaagctggccaacgcgccccggcccctgaaaaagcgcagctccatcacagagcccgagggccccggcgggcccaacatccagaagctgctgtaccagcgcttcaacaccctggccggtggcatggagggcacccctttctaccagcccagcccctcccaggacttcatgggcaccttggccgatgtggacaatggaaacaccaatgccaatggaaacctggaagagctcccccctgcccagcccacagccccactccccgctgagcctgccccgtcatcagatgccaatgataatgagttaccttcccccgaaccagaggagctcatctgtccccaaaccacccaccaaactgccgagccggcagaggacaataacaacaacgtggccacggtccccaccacggagcagatcccgagtcctgtggctgaggccccatctccaggggaagagcaggtccctccagcacctcttccccctgccagccaccctcctgccacctccacgaacaagcggaccaacttgaagaagcccaactcggagcggacggggcacgggctgagagtccggtttaaccccctggcactgctcctagacgcgtctctggaaggagagttcgatctggtgcagaggatcatctatgaggtggaagatcccagcaagcccaacgacgaagggatcaccccactgcacaacgccgtctgcgccggccaccatcacatcgtgaagttcctgctggattttggtgtcaacgtgaatgctgctgatagtgatggatggggtgcaggaaaagctgggtgtgatgaacaaaggtgtggcgtatgctctgtgggactacgaggcccagaacagtgacgagctgtccttccacgaaggggacgccctcaccatcctgaggcgcaaggacgaaagcgagactgagtggtggtgggctcgccttggagaccgggagggctatgtgcccaaaaacctgctggggctgtatccacggatcaaaccccgacagcgaacactcgcctgaacttccttttggagcaccgcatggtcttgccagctaccaggagccacttaagagattattgtgctgttttccaggaaagctgcagctagaaaatggtcttaatggtgctcactttagcagacagcgtccacaatgtgaatcctacagtttccaggtgaggccctttctccagtttgcccattaactgggagaggtactttcgcctccaaggactgaattttgccaattactataaatccaaataaatacccactttcaaaacacccacccctcttgccattaagaagtcccataacccccggttggttgccagtgaagacagaagctcttactgacttggccccgaggccatcaccccctccagcagtgaacactgtccgccgctgtgaggcctgctcccctgcgaccgccctgccccccgtcaccgaatcggacactcatcctttctcacacttcccacacatgatccttcttcccttcatcaccaaaggagcctctgtatggaaacatgtccagtgttgctgcccagtgtgtatgcctcccagtacccactctgctcggccgccttgggggttccgcttcctgttccagttcacctaaaggctgattgtgcaggcccagcactgtggctggactgccgcgccacgggcaccaggacccctaagaccaagtgacaactgggagagcctcagcatatactcttctcctccgatctcacagcctgtcatgctgctcagtgtggttctcacccctgcaagctcaaattcagttccctgaatggagtcaggtgctggaggccgtggcagcggagggtggttggggttggggctgggggtggactggtgtgagggcagaccagggccaggtagacggggctgtttggtgcctgaaggatggcagacgcctggtgtcaggaggggccgccaccaaggagcagcagctggggcagaggagctggggtcaggggccacccctctctgccgatctccctgcctgggctggctgtgaggccacctttgtcccaggcccagcctcaaggcaaggagggcgcttcactgaggtgtgaattgtacgtacaggctttttatataccaaaagtattttttgactagaccattcaaagctacccgaactatgttggaaattttttttttctcattaaaatacaggcccttaggctctatttttcatgtatgagtcgtgtgtaatttatgtaaaaatgtgtgtacagactcactgatgcagcactgtagcccatcaccttggagcactgactgtacatagtgtggtgaagaaaagtgaacgcccttgtagagcagcccgaccacaggagcatggccgctgccagcccagacgctgctgacgctgtgtaaatgtgcacaataaacccgtctcaccccg

SEQ ID NO: 17573 - protein, 398 aa, Homo sapiens
MYLQQATPPKNYQPAAHSALNKSVKAVYGKPVLPSGSTSPSPLPFLHGSLSTGTPQPQPPSESTEKEPEQDGPAAPADGSTVESLPRPLSPTKLTPIVHSPLRYQSDADLEALRRKLANAPRPLKKRSSITEPEGPGGPNIQKLLYQRFNTLAGGMEGTPFYQPSPSQDFMGTLADVDNGNTNANGNLEELPPAQPTAPLPAEPAPSSDANDNELPSPEPEELICPQTTHQTAEPAEDNNNNVATVPTTEQIPSPVAEAPSPGEEQVPPAPLPPASHPPATSTNKRTNLKKPNSERTGHGLRVRFNPLALLLDASLEGEFDLVQRIIYEVEDPSKPNDEGITPLHNAVCAGHHHIVKFLLDFGVNVNAADSDGWGAGKAGCDEQRCGVCSVGLRGPEQ

SEQ ID NO: 17574 - DNA, 2722 bp, Homo sapiens
  CDS (30)..(2156)
ataaccacgtgtcttcaaaaccatctaccatgaagctaaaacataccatcaaccctattcttttatattttatacattttctaatatcactttatactattttaacatacattccgttttattttttctccgagtcaagacaagaaaaatcaaaccgaattaaagcaaagcctgtaaattcaaaacctgattctgcatacagatctgttaatagtttggatggtttggcttcagtattataccctggatgtgatactttagataaagtttttacatatgcaaaaaacaaatttaagaacaaaagactcttgggaacacgtgaagttttaaatgaggaagatgaagtacaaccaaatggaaaaatttttaaaaaggttattcttggacagtataattggctttcctatgaagatgtctttgttcgagcctttaattttggaaatggattacagatgttgggtcagaaaccaaagaccaacatcgccatcttctgtgagaccagggccgagtggatgatagctgcacaggcgtgttttatgtataattttcagcttgttacattatatgccactctaggaggtccagccattgttcatgcattaaatgaaacagaggtgaccaacatcattactagtaaagaactcttacaaacaaagttgaaggatatagtttctttggtcccacgcctgcggcacatcatcactgttgatggaaagccaccgacctggtccgagttccccaagggcatcattgtgcataccatggctgcagtggaggccctgggagccaaggccagcatggaaaaccaacctcatagcaaaccattgccctcagatattgcagtaatcatgtacacaagtggatccacaggacttccaaagggagtcatgatctcacatagtaacattattgctggtataactgggatggcagaaaggattccagaactaggagaggaagatgtctacattggatatttgcctctggcccatgttctagaattaagtgctgagcttgtctgtctttctcacggatgccgcattggttactcttcaccacagactttagcagatcagtcttcaaaaattaaaaaaggaagcaaaggggatacatccatgttgaaaccaacactgatggcagcagttccggaaatcatggatcggatctacaaaaatgtcatgaataaagtcagtgaaatgagtagttttcaacgtaatctgtttattctggcctataattacaaaatggaacagatttcaaaaggacgtaatactccactgtgcgacagctttgttttccggaaagttcgaagcttgctagggggaaatattcgtctcctgttgtgtggtggcgctccactttctgcaaccacgcagcgattcatgaacatctgtttctgctgtcctgttggtcagggatacgggctcactgaatctgctggggctggaacaatttccgaagtgtgggactacaatactggcagagtgggagcaccattagtttgctgtgaaatcaaattaaaaaactgggaggaaggtggatactttaatactgataagccacaccccaggggtgaaattcttattgggggccaaagtgtgacaatggggtactacaaaaatgaagcaaaaacaaaagctgatttctttgaagatgaaaatggacaaaggtggctctgtactggggatattggagagtttgaacccgatggatgcttaaagattgttgatcgtaaaaaggaccttgtaaaactacaggcaggggaatatgtttctcttgggaaagtagaggcagctttgaagaatcttccactagtagataacatttgtgcatatgcaaacagttatcattcttatgtcattggatttgttgtgccaaatcaaaaggaactaactgaactagctcgaaagaaaggacttaaagggacttgggaggagctgtgtaacagttgtgaaatggaaaatgaggtacttaaagtgctttccgaagctgctatttcagcaagtctggaaaagtttgaaattccagtaaaaattcgtttgagtcctgaaccgtggacccctgaaactggtctggtgacagatgccttcaagctgaaacgcaaagagcttaaaacacattaccaggcggacattgagcgaatgtatggaagaaaataattattctcttctggcatcagtttgctacagtgagctcagatcaaataggaaaatacttgaaatgcatgtctcaagctgcaaggcaaactccattcctcatattaaactattacttctcatgacgtcaccatttttaactgacaggattagtaaaacattaagacagcaaacttgtgtctgtctcttctttcattttccccgccaccaacttactttaccacctatgactgtacttgtcagtatgagaatttttctgaatcatattggggaagcagtgattttaaaacctcaagtttttaaacatgatttatatgttctgtataatgttcagtttgtaactttttaaaagtttggatgtatagagggataaataggaaatataagaattggttatttgggggcttttttacttactgtatttaaaaatacaagggtattgatatgaaattatgtaaatttcaaatgcttatgaatcaaatcattgttgaacaaaagatttgttgctgtgtaattattgtcttgtatgcatttgagagaaataaatatacccatacttatgtttt

SEQ ID NO: 17575 - protein, 709 aa, Homo sapiens [sequence omitted]

SEQ ID NO: 17576 - DNA, 2666 bp, Homo sapiens
  CDS (223)..(1821)
acatcagcatcagcaggacaggctcctgaggacccctcaggccctggcacaggcccctctgggacttgtgaggctccggtagctgtcgtgaccgtgaccccagctccggagcctgctgaaaactctcaagacctgggctccacgtccagcctgggacctggcatctctgggcctcgagggcaggccccggacacgctgagttacttggactccgtgagcctcatgtctgggaccttggagtccttggcggatgatgtgagctccatgggctcagattcagagataaacgggctggccctgcgcaagacggacaagtatggcttccttgggggcagccagtactcgggcagcctagagagctccattcccgtggacgtggctcggcagcgggagctcaaatggctggacatgttcagtaactgggataagtggctgtcacggcgattccagaaggtgaagctgcgctgccggaaggggatcccctcctctctcagagccaaagcctggcagtacctgtctaatagcaaggaacttctggagcagaacccaggaaagtttgaggagctggaacgggctcctggggaccccaagtggctggatgtgattgagaaggacctgcaccgccagttccctttccacgagatgtttgctgctcgaggggggcatgggcaacaggacctgtaccgaatcctgaaggcctacaccatctaccggcctgacgagggttactgccaggcccaggcccccgtggctgcggtcctgctcatgcacatgcctgcggagcaagccttttggtgcctggtgcagatctgcgacaagtacctcccaggttactacagtgcagggctggaggccattcagctggacggggagatcttttttgcactcctgcgccgggcctccccgctggcgcatcgccacctgcggcggcagcgcattgaccctgtgctctacatgacggagtggttcatgtgcatcttcgcccgcaccctgccctgggcgtcggtgctgcgtgtctgggacatgtttttctgtgaaggcgttaagatcatcttccgggtggccctggtcctgctgcgccacacgctgggctcagtggagaagctgcgctcctgccaaggcatgtatgagaccatggagcagctgcgtaacctgccccagcagtgcatgcaggaagacttcctggtgcatgaggtgaccaatctgccggtgacagaagcactgattgagcgggagaatgcagcccagctcaagaagtggcgggaaacgcggggggagctgcagtatcggccctcacggcgactgcatgggtcccgggccatccacgaggagcgccggcggcaacagccacccctgggcccctcctccagcctcctcagcctccctggcctcaagagccgaggctcccgggcagctggaggggccccgtccccgccgccccccgtccgcagagccagtgctgggcctgccccagggcctgtggtcactgctgagggactgcatccatcccttccctcacccactggcaatagcacccccttgggttccagcaaggagacccggaagcaggagaaggagcggcagaaacaggagaaggagcggcagaaacaggagaaggagcgggagaaggagcggcagaagcaggagaaagagcgagagaagcaggagaaggagcgagagaagcaggagaaggagcggcagaagcaggagaagaaggctcaaggccggaagctttcgctgcgtcgaaaggcagatgggcccccaggcccccatgatggtggggacaggccctcagccgaggcccggcaggacgcttacttctgacctctgccctggggctggactgcatggcccccctctttccctcagccaagaacaggcctggcccaaggtgccaccccctagcaccttgtcaggctgtcccttgctggggaaagtggcttggttccccatctcctcgccagctgctgatccctacacgggcaggacagatgggcagctgcaaatgagtctggagcctctcatctcccatgaggctcagctggggtctctgtcgctcctgccccagttccctctgggtcccctcctaggtgctgtcctgaatggcccgttgtcatcccaggggtgactcctggtgatgggagtcagcagtttcagattcttacactccatagctccccttaccatgaggtggagctggcttccttttccctgtcttcagccctccctgtctcccccacttcctggccagggctctcattctggacctgtgttgtaattgtgtacagaggatggcgttggcctggggtgggggtgctcgctttgtcttctgtcctttggttctccttccataatgctcctgtacccagtttatttaaggggacatgcactggaataggaaatgtcccccatctcccttcctgcaccctgctgtgctccctccaaacccaccttgctctgtgttctcaggcccccctgcttttgtctcaccaggacccatacctttcaccttgttcccttccacccctccagttagtccctatctgggtaagggtcttcccttgagctccagggggtggaacccaatgtttacattctcttctgtctctgcccccaccccatgcagcgctttgaggaattggaaaagaacctgctgttgtacctgg

SEQ ID NO: 17577 - protein, 533 aa, Homo sapiens
MSGTLESLADDVSSMGSDSEINGLALRKTDKYGFLGGSQYSGSLESSIPVDVARQRELKWLDMFSNWDKWLSRRFQKVKLRCRKGIPSSLRAKAWQYLSNSKELLEQNPGKFEELERAPGDPKWLDVIEKDLHRQFPFHEMFAARGGHGQQDLYRILKAYTIYRPDEGYCQAQAPVAAVLLMHMPAEQAFWCLVQICDKYLPGYYSAGLEAIQLDGEIFFALLRRASPLAHRHLRRQRIDPVLYMTEWFMCIFARTLPWASVLRVWDMFFCEGVKIIFRVALVLLRHTLGSVEKLRSCQGMYETMEQLRNLPQQCMQEDFLVHEVTNLPVTEALIERENAAQLKKWRETRGELQYRPSRRLHGSRAIHEERRRQQPPLGPSSSLLSLPGLKSRGSRAAGGAPSPPPPVRRASAGPAPGPVVTAEGLHPSLPSPTGNSTPLGSSKETRKQEKERQKQEKERQKQEKEREKERQKQEKEREKQEKEREKQEKERQKQEKKAQGRKLSLRRKADGPPGPHDGGDRPSAEARQDAYF

SEQ ID NO: 17578 - DNA, 2665 bp, Homo sapiens
tcatttgtaatgtaaagatcagttatatatatatatttgtaatgagagcaagtatatactcattatagaatcaatttaagaagtttaaaataacccagagtagaatttctatatctagtcttggtttttttcatgaatatttgcaagtaattaccattaaattcacacatgaaagattaatctgaaagatcagagaccatgttattcctgaccacgatagaactgctcctgtggtttgggacaagtaataaaacaactgcttgagttttgtttgtaaaatacataattaatatttgacctacctcaaaatgtattgaggatctgtgaaatgctaagtgcccaaaataaaatattgctgattgtctttttattaaaagtaaatttcctcattaagccaacctgccttctgtaagtcacagtgcttaaatctcaggatttttcattaggagagacctgtcgttaaggatttgtaggtataattgcttagcctccattattggtgcttgggatagagaggttttagatttttgtttttttttttgttctgcctcaaagctcagtttattgaagacatttgtaagctattggatcatcacttgaatcaagattttgactagtgagcttaattgtccatttcttacaatttcaaagttacagtctcagaaatggttaattttaataactgtcctatcataaattaatgttggaataaattgaagttgttgataaatacttcatgaaaactaaagtctgaaataaattacttgttttatgtccaatagctactacatttgatagaacagttttgaggaacatttcattcttgaacgcagcatctgacatggttctcagcaagttggaatagtaaggattattggcttgtttcgatgagtggaagcggcatgtttgtagcatacaagttattcaataatcttgtgctgatgacctaaaaatatgtcttaactattcatcaaggaaagcctggtgaagcctttacttgttactacttcaacagttggaattagttgctctttttacttgatgaaacaaaactatacctctgaatatttatggatactttttactaaatcaggcttgtgttcttaatccaaattagtaaagttttatggaagctgaaatgtaatacagtagtctccccttatctgtaagagatacattccaagacccctagtggatgcctgaaacctcagatagtactgaaccctttatcaactatgttttttcagtctgacaaccaaggcggctactaagtgactaaggggcaggtagtatacagtgtggataagcaggacaaaggggtgattcacatcccaggcaggacagagcaggagatcatgagatttcatcactcaggatggcttgtgatttattttattttattcttttttttttttgagatggagtctcactcttgcccaggctggagtgcagtggtgcgatcttggctcactgcaacctctgcctcctgggttcaagcagttctcctgcctcagcctcccaagtagctgggattacaggcgtccgccaccatgcccagccaatttttgtacttttagtagagatggggtttcaccatgttggccaggctggtcttgaactcctgacctcaggtgatccactcgcctcggcctcccaaagtgctgggattataggcatgcgccaccatgcccggccggcttatgatttaaaacatgaattgtttatttctggaattttccacataatatttttggaccaaggttgcctcaggtaacaaactacagaaagtgaaattgcagataaaggggattactgctcctctgctctaaaattggtgtttgggtgatcagaagcaggtagccaatgggaagagcacttctgagtgataactaaagcagtttggtggccttttcacattctccaatgttcaaacatattttccactttccattttctctttcacctcattttgcctctctatcccccatccctgcttatttcttaagcccattgatggcactcattaaattgtatttagggctaatgagtcattgttccttaatatcgttttcaatatgccacaatttaggacacatttaaaattttctaaaacaatatcctaatcaatattgactaatttgagccacattcccaactctaactcagcacacactgccagtcttccccaatatctgtctcctctcaattccccaccacaccttataaaattgtaatcaaagatatctcactctgtcattgttaatctaagaataaaaacactgactttaatacggttttactaagtttcaaccttctaattaggtaggcctctaggtattctgcagatcactgctggtcttgatagccattaatatatgtttgtattatgttatttttcaactaaatcgcagttggaaaaaaacatatttaatattatgcccttggatctgttactgcatcactagcacttgtgatgcaatagaacacttcgcctgtactgaaagggccaagagtaaatgccttgttttgtttttttgttttgttttgttttgctttttgttaaaacatgtctatagagttggcagttaatgctgaatttgtcaaataccccttccaaaattatacttgtatttaaaaaataaatggatctacctaatttctattg

SEQ ID NO: 17579 - DNA, 2764 bp, Homo sapiens
  CDS (28)..(861)
gtcgccgcgcggccgccggtgagccgcatggagccccgggcggcggacggctgcttcctgggcgacgtgggtttctgggtggagcggacccctgtgcacgaggcagcccagcggggtgagagcctgcagctgcaacagctgatcgagagcggcgcctgcgtgaaccaggtcaccgtggactccatcacgcccctgcacgcagccagtctgcagggccaggcgcggtgtgtgcagctgctgctggcggctggggcccaggtggatgctcgcaacatcgacggcagcaccccgctctgcgatgcctgcgcctcgggcagcatcgagtgtgtgaagctctcgctgtcctacggggccaaggtcaaccctcccctgtacacagcgtcccccctgcacgaggcctgcatgagcgggagttccgaatgtgtgaggcttcttattgacgtcggggccaatctggaagcgcacgattgccattttgggacccctctgcacgttgcctgtgcccgggagcatctggactgtgtcaaagtgctgctcaatgcaggggccaacgtgaatgcggcaaagcttcatgagactgcccttcaccacgcggccaaggtcaagaatgttgacctcatcgagatgcttatcgagtttggcggcaacatctacgcccgggacaaccgcgggaagaagccgtctgactacacgtggagcagcagcgctcccgccaagtgcttcgagtactacgaaaagacacctctgactctgtcacagctctgcagggtgaacttgaggaaggccactggcgtccgagggctggagaagattgccaagttaaacatcccgccccggctcattgattacctctcctacaactgaattgcaggtggggtccggaccgtgactgcccccgttgtgcccagcattgcccgggtgagggctctgcctgttcctctgaagcagcgtgattgctgtagatagaacaacgctccttcgagtcccttcctgcgatcctgtttaggcttctctcctggatcctggataatgtttccagggtgttgggaaggcctgcgtctcaggtcacagttgtgggtgtggccctgcgctgttctacagaacctaccctctcaatgggcatgggcccaaccatccagttttcctcttttacggaccatcctcaaaggcactctcaggacagacggcgtggggagcacagaggaggctggcagagctggggactgagggcattgttgctgattctcactcaccggggcagcctgccgcagatgcacaggccccaggtgcaggccaccacctccgggtcggcaccaggactgccctcggtgctcatagggaatggctgggcccacggaaggtcggcctgggatgtggcctgggactgctgctctgctggctgctgtgtggatgcttttcctggagcactttccaaggcatcccccagccccaagcctgcacgcatctgtcactcagggactttctatgggtctttgtgggggaaggccctggctttgtattccccacaagtagcactgagtttcttaggaaatttgtcttcagtattaggtctccaactcttgtaaaaagtttatatgtaggataaaaaccttttagaggacacgtaggcggtaccactaaggttttggtaatgagccattcaaaccgacagcagtgtgaaggtgtgtcaaggtgtatattctcgtggctcggcattctcagtgcaaaggcctgtttggagactctgtgggaattgtttttcatctgtttctatggttgtcaaatgaattcttcacccaccctacagtttgctaactccttgaagctatcaaattagtaagagaggctgcccgcacccagggggcaccatcgcccacttattatttagttttgcggatactcatggaccatctatcacatccagcattgtcccagtgctttgagttggacgggaatgggactctgcagccaaggcaggataagaaaatcttgcaatcccgtcctgcagtgatagaaacaggtcgttctgcattataagccataggtggagcattcggtagcgtattcagactgcatgggccggcctaggagtctttgccttcataaattttaagaaccccgcccacaacagggagttaaactggaggactttgcatgattagttcagggatgagtggtttctggggcatctgaggtcaggagttcgaaaccagcctggccaacttgatgaaaccccatctctacccgttctggagaacaggtcacgcctgtcctggagacagtgtgccgggaaaagggaacgtggtactcactggatgcacccaggccggcccgagcctcccaccgcagacagtgtggaacagagtgagcctgagctgcccaaggcgatgccctttgtgctgtatgactggaggcctctccgcgtgggtacttgggggtggggccacaaatctggcgaaaaactacatgctggccgccgtgaggttttactccagcgttcccgccattgtcatggcgggtcttcgtcctaaactgagaagaaaagcattcctgtttgatcaccgccttagttaccagttctggatcagtcagtgtttctgcatggaataacaaccattaaaaaaagcactgggttctgccctttcatctttgtaagagattcttgcctctagcaatgacaacctgtgatgtctcacagtagagcacttagtgcagaatcaggtccccacggctgttgctcaataaaagtggcggaataaagtgc

SEQ ID NO: 17580 - protein, 278 aa, Homo sapiens
MEPRAADGCFLGDVGFWVERTPVHEAAQRGESLQLQQLIESGACVNQVTVDSITPLHAASLQGQARCVQLLLAAGAQVDARNIDGSTPLCDACASGSIECVKLSLSYGAKVNPPLYTASPLHEACMSGSSECVRLLIDVGANLEAHDCHFGTPLHVACAREHLDCVKVLLNAGANVNAAKLHETALHHAAKVKNVDLIEMLIEFGGNIYARDNRGKKPSDYTWSSSAPAKCFEYYEKTPLTLSQLCRVNLRKATGVRGLEKIAKLNIPPRLIDYLSYN

SEQ ID NO: 17581 - DNA, 2422 bp, Homo sapiens
  CDS (206)..(1444)
atcttgtcttgttcccgaagaagtagaagcatcgaaagcgttggagaggtgttaccggaacggcggcgacaagggtgttcccgaactagagtggggcatacataatcttgctgctatgcttcgaagctgtagtctgaatcaacctaagttttaaacagaaggtgaacctctgagatagaaaatcaagtatattttaaaagaagggatgtgggatcaaggaggacagccttggcagcagtggcccttgaaccagcaacaatggatgcagtcattccagcaccaacaggatccaagccagattgattgggctgcattggcccaagcttggattgcccaaagagaagcttcaggacagcaaagcatggtagaacaaccaccaggaatgatgccaaatggacaagatatgtctacaatggaatctggtccaaacaatcatgggaatttccaaggggattcaaacttcaacagaatgtggcaaccagaatggggaatgcatcagcaacccccacacccccctccagatcagccatggatgccaccaacaccaggcccaatggacattgttcctccttctgaagacagcaacagtcaggacagtggggaatttgcccctgacaacaggcatatatttaaccagaacaatcacaactttggtggaccacccgataattttgcagtggggccagtgaaccagtttgactatcagcatggggctgcttttggtccaccgcaaggtggatttcatcctccttattggcaaccaggacctccaggacctccagcacctccccagaatcgaagagaaaggccatcatcattcagggatcgtcagcgttcacctattgcacttcctgtgaagcaggagcctccacaaattgacgcagtaaaacgcaggactcttcccgcttggattcgcgaaggtcttgaaaaaatggaacgtgaaaagcagaagaaattggagaaagaaagaatggaacaacaacgttcacaattgtccaaaaaagaaaaaaaggccacagaagatgctgaaggaggggatggccctcgtttacctcagagaagtaaatttgatagtgatgaggaagaagaagacactgaaaatgttgaggctgcaagtagtgggaaagtcaccagaagtccatccccagttcctcaagaagagcacagtgaccctgagatgactggagaggagaaagagtatcaaatgatgttgctgacaaaaatgcttctaacagaaattctgctggatgtcacagatgaagaaatttattacgtagccaaagatgcacaccgcaaagcaacgaaaggtatattttggtgtttctggttttgcttttcctggggtattttggttctgatgactattttggcctttttttgttgtccttgttggatttctaccagatatttgaatattctcttgcatgttttaactcttaaagattagattcgtagacaccatattaaagctatacaaatatttttgttttatctgacctacatgagtacaaattagcaatcatgctgttttcctctaaaatgtattgtggaaaattccaggtgttcagtttatttcacctgattttttttaatagataacatggcattgttgtgtgacttctgatacagtttattttgactaatgaattttgaattatctacctacaatttttagtttaccacttatctcttacagaagcaagtgatttcctacccctagatttttagtaacaccttaaaaatgtattgaaaacaaaaattaagttacatgtcataatctcagaagtagacatacagatatacctgtcgacattttttctcattataaaccaatttcagctcacatcagagttataatttcaaagccagacatgatactggtttaaaatgaatgttatgtttttaatgtttcttctctccccaaaaagcagcaatagtagtagatttaacaataccatagactcatgactatgaaatcgtggctatttgtgttaacatgttgttcctgttgttgatgtgatacaaagctcctgcaaaacagctggcacagtccagtgcactggcttccctcactggactcggtggactgggtggttatggatcaggagacagtgaagatgagaggagtgacagaggatctgagtcatctgacactgatgatgaagaattacggcatcgaatccggcaaaaacaggaagctttttggagaaaagaaaaagaacagcagctattacatgataaacagatggaagaagaaaagcagcaaacagaaagggttacaaaagagatgaatgaatttatccataaagagcaaaatagtttatcactactagaagcaagagaagcggacggtgatgtggttaatgaaaagaagagaactccaaatgaaaccacatcagttttagaaccaaaaaaagagcat

SEQ ID NO: 17582 - protein, 413 aa, Homo sapiens [sequence omitted]

SEQ ID NO: 17583 - DNA, 3546 bp, Homo sapiens
  CDS (210)..(2507)
acacttcagccacagaagggaggggttttccggcatcagggttggcaactgagtcagatggagggaatggctccagccaaaacaactcgggcagcattcgccatgagcttcagtgtgacctgagacgcttctttctggagtatgaccggcttcaggagctggatcagagcctgagtggggaagctccccagacccaacaggcccaggaaatgctcaacaataacattgaatctgagaggccaggcccttcccaccagcccaccccacacagcagtgagaacaactccaacctgtcccgtggccacctgaatcgctgtcgtgcttgccacaatctcctgaccttcaacaacgataccctgcgctgggaaagaaccacacctaactactcctctggcgaggctagttcctcttggcaggtccccagctcctttgagagtgtgccatcaagtggcagccagttgccacctctcgagcggactgagggccaaacgcccagctccagcaggctggagttgagcagctctgctagtccgcaggaggagaggactgtgggggtggcctttaaccaggagacaggccactgggaaagaatttacacccagtccagcagatctggaactgtgtcacaggaggccttacatcaggatatgcctgaggagagctctgaggaggattcactcaggaggaggctgctggaatcttccctcatttcattatcccgttatgatggagcaggatccagagagcacccaatttacccagacccagcgagattatctcctgctgcatactacgcccagaggatgatccagtatctctcacggagagacagtattcgccagcgctccatgcgctaccaacagaaccgtctccgttcttccacctcctcctcttcctcagacaaccagggtccatcagtagagggaaccgacttggaatttgaggactttgaggacaatggtgacagatccaggcaccgagctccacgcaatgcccggatgtctgcaccttcgcttggacgctttgtcccaaggcgtttcttgctgcctgagtacttgccttatgctgggatttttcatgaacgtggacagcctggcttggctactcactcttctgttaacagggtcctggcaggggcagtgatcggtgatggacagtctgctgtggccagtaacattgccaatactacctaccggctccagtggtgggacttcactgagtttgacctccctgaaatcagtaatgcttccgtgaatgtgctggtgcagaactgcaagatctacaatgatgccagctgtgacatttctgcagatggccagctcctggcagctttcatccccagcagccagaggggctttcctgatgaaggcatcctggcagtgtactccctggccccccataacctgggcgaaatgctctacaccaagcgatttggtcccaatgccatttcggtgagcctgtccccaatgggcagatatgtaatggtgggcttggcctcacgaaggatcctgctgcacccctccacagagcacatggtggcccaggtcttcaggctgcaactggcccatggtggagagacctccatgaggagagttttcaacgtcctttatcccatgcctgccgaccagcggagacatgtcagtatcaactctgcccgttggctgcctgagccagggcttggcttggcctatggtactaacaaaggagacctggtgatctgccgaccagaggccttaaactctggtgttgagtactactgggaccagctgaacgagacggtcttcactgtccattccaacagcaggagcagcgagcggcctggaaccagcagagccacatggaggacagacagagacatggggctgatgaatgccattgggcttcagccccggaaccctgccacctcagtgacatctcagggcacccagactctggcccttcagctgcagaatgccgaaacacagactgagagggaggtgccggagccagggacagccgcctcaggtcctggtgaaggtgagggttcagagtatggtgccagtggagaagatgcgctcagcaggatccagaggctgatggcggagggcggcatgacagccgtggtgcagcgggagcagagcaccaccatggcctccatgggcggcttcggcaacaacatcatcgtcagccaccgcattcaccgcagctctcagacgggcactgaacctggtgccgcccacacctcctcaccccagccctccacctctcggggactgctcccagaggccgggcaactggcagagcgaggcctaagcccccggacagcttcctgggaccagcctggtacccctgggcgggagccaacccagccaaccctgccctcttcctcccctgtccccattcctgtttcccttcccagcgctgagggaccaaccctccactgcgagttgaccaataacaaccaccttctggatggtggcagcagcaggggggacgctgcaggccctaggggagaaccacggaacaggtagagacaaacgttgcactggtgcctcccctcgaaccgccaagcagaaaccggacctcacagctgactgggaactggacatgtggaagagctgctggctgcatcagggaacaggaggaggaagagggtcagggtggagaggaagatcagtcagtgggcacaagacagtcaaatgggcaaggcctgcctcggggaactagaaccttccaggatctggagcccgggagagccacactgtgggcttaatgtgaatagaggaacaagtgggtatctctgccaggcaccccactttctcctagtaacatgggctcaggggactcagccctggacagagagcctccagagagtgaacagtcttccagatctgggccaatcatcctggacagaggcccgcgaggcagctttgccctgtccacctgttgggtgggcagagccaccaggaacccagacaccacctccaactctgagccttccagagcttcagcctctcttcgtcgtcttaccccactgaaaccaacagggatcgggccaggctcccagattcttgaggacagggacttcggcatttactaatgggggactactgtggggtaagggggcgcctgcttgcctgatacaggatggggtcaagggacagtgggcaggtcctcactcaggagtggggggtgtaggctggccagcccccagggcttgtccaccagtcttctccccgcaaggccctcagagcagcgcctgtgggtgtcagtattacctgagcctaggccaaagctagcccaaggctggggaaggggaggagactccaggtcagaatgtgaggtctcagtctgtgatttaaggtgttgcatgtggactcttaactgtacgtgtagtttctagtggagaaatcaaggctctgatcattttgtttttagtatgaaaatgtgatttcctttctgtttgtaactcatcatagaaacattgtggtgggaggagaggggatagtctacagctaatgagggaaacaccaaagatcacatcattaaaatgatgacatgcccctc

SEQ ID NO: 17584 - protein, 766 aa, Homo sapiens [sequence omitted]

SEQ ID NO: 17585 - DNA, 3102 bp, Homo sapiens
cactgtatgctgtgtggacatgcatttcatgtggctgtgtggtaagaattacagcttacatatggcttggacccacatccgaggaatctgatgttcacttataccagaacattatcttgctatttatgaaattatttaaacgttcaaaagattgtttttaacatggtttaatttcccaaaaactacagttttttttcttagcatgctattcaggtaaacagtcttataataaagcatgtcccattgtcaagaaacataaagtggtgtgaataccactgaaaatatatatatagtatcttctgtaaataatagtacctgtgtgaataaggaataggcttgcctcccagccaggcaatttcctgagggcacactaatgatatcccctgagttgctaagttgatgctgagacattttgctgggaattagtcatggcatgatctctttcagactccctgaataccatttagtcccgtaacagtgctcacaactcatgtgctaatgaatcacaaaggctttaactagctcccaggttgtagccttcgcaggatctagtttatttgccacatctctttatgaacatatagcgattcgcagatctctctattcacggagaggaaggtgttttgcttctgtagatctcaaggtactattttgtggctctcagcaggaagtagaattgttcctaaatgtgtgctgaatgaggacatgatgtccctcctggtgccaggacacatcctgcatggcattctgtgaagggcatacctgctgaggataatgccaggagcagcacatttagggtaattttgctaaaacttccagatgacatataaattccctctttttccccctgaaacttaccatttcagaggtaatggctttttctgtaatttgcctgagaagaaaaaagggataatttagaaataacactccaagcctatatattactagggctgcatcctctggaatttaatagaaaaattgaatatatagccctatgtaactacagacatcattacaactgttaagttctgttcaccatgcaagttctcggtggtgtatgtactctcaccttttggaaacaaaaccttgcattgaaggttttacacatggcttcagaatgttactctgaccatgtttgcctctactccagattatcatggcacctaacacagatgacatatggcagaatggaagtgatttctcctaatgaaaatgaagtgctcttttgagtatttcttgttttattgagattcctatctgcccttgtacttttataactgaatgtaaataggaattgcttaaatactggtttacactaatcccatagttaaaaatcttggctatggtacaggaaggatatctatatagaggatagttccagaaacaagccctggtgaaataggaaatataaaaacttctttatggaacaggaaaacccaagagactttctcgtcagattcctttccagtgcaaagtataacagagataggattatgagatgaaatcacagtagtgtgtttcctttaattttttctgtcttctttttttttttttttttttgagacggagtctcgctctgttgcccaggctggagtgcggtagcacagtcttggctcactgcaacctccacctcctgggttcaagcgattctcctgcctctgcctcctaagtagctgggattacaggcgtgcaccgccaagcccggctaatttttgtatttttagtagagacggggtttcaccatgttatgcaggctggtctcaaactcctgacctcagaatattcacctgcctcggcctcccaaagtgctgggattacagatgtgaatggccacgcctggcctgtttcctttaagttagcacttcacgtgctcttacagcgttaattgccattattggtttgcctgattttcctgcatctcctcatatgtaagtctgcagcccaaggagagaatagtagctgtatgtgcccacaaggggtgtccaagcttcttgattcttgttaatatcgactccccaacattgaaaaaggagtgaagaagggaatatcattttagggtactgctttaaaggaatgataaagtaaacaacgtagcagggaaaataccacttgcacaaatgtatttctttgtcaaagtgtgtacacgctttctgtttgtcctgatgtcctgctgtgaagcagggaccacattgccatttattcattgttccaggcaatgcatttgtccaaacccctctggctctctgatatctctcatttcttgatgttcctattctctgacctcaacaaggaggacactgtctgttgtgtctctttgagactagaactccatgtgtttaaccttcagatccattctctacatgaaccctattctttccaccctggtaagaaggtctggaagacaggtcctaacgaggggtcagagaaggcacagagaaatgaaccagccatgcaggggcagcactgaggaggaaaccccccactctaactgggaggagagtggaaacactcttagtatctcagagtagttaccaatctaagagcatccttcgagtttaagtcaaaactctaggcttaataccaaaaataatacatcatttggaaaaatagcttggagaaaaaaaatcaataaagagtcacataaaatcttaagaaaatggttctattctgtgatatattactaagaaatacagttcttaaacgtgtataactattgtcagacaatttataggtgtttcatctagtcctgggatgaaatacgatgactcatgcaaattcagggagcacactggctgactttaaattggaacattgtaaagtgaaagctgtgaaaggttgtgtgtcctatcaatgagatttattttctaaccaagagctgttcggatgattcagtataaatacgaaaatcacatccaaaaacggtataacccagcttccttaaggcaattttcttctctgaaacaagaatatactcatatgttctttactataatgtatatgatttttatcttgtactttaaaagatgataattatgcattgtatatacgattgtgtgccttgcaataaaatcaaaactgtacctgctgaaaatcacaacagtc

SEQ ID NO: 17586 - DNA, 2330 bp, Homo sapiens
  CDS (11)..(2212)
aatccccgccatgtgggggctcctgctcgccctggccgccttcgcgccggccgtcggcccggctctgggggcgcccaggaactcggtgctgggcctcgcgcagcccgggaccaccaaggtcccaggctcgaccccggccctgcatagcagcccggcacagccgccggcggagacagctaacgggacctcagaacagcatgtccggattcgagtcatcaagaagaaaaaggtcattatgaagaagcggaagaagctaactctaactcgccccaccccactggtgactgccgggccccttgtgacccccactccagcagggaccctcgaccccgctgagaaacaagaaacaggctgtcctcctttgggtctggagtccctgcgagtttcagatagccggcttgaggcatccagcagccagtcctttggtcttggaccacaccgaggacggctcaacattcagtcaggcctggaggacggcgatctatatgatggagcctggtgtgctgaggagcaggacgccgatccatggtttcaggtggacgctgggcaccccacccgcttctcgggtgttatcacacagggcaggaactctgtctggaggtatgactgggtcacatcatacaaggtccagttcagcaatgacagtcggacctggtggggaagtaggaaccacagcagtgggatggacgcagtatttcctgccaattcagacccagaaactccagtgctgaacctcctgccggagccccaggtggcccgcttcattcgcctgctgccccagacctggctccagggaggcgcgccttgcctccgggcagagatcctggcctgcccagtctcagaccccaatgacctattccttgaggcccctgcgtcgggatcctctgaccctctagactttcagcatcacaattacaaggccatgaggaagctgatgaagcaggtacaagagcaatgccccaacatcacccgcatctacagcattgggaagagctaccagggcctgaagctgtatgtgatggaaatgtcggacaagcctggggagcatgagctgggggagcctgaggtgcgctacgtggctggcatgcatgggaacgaggccctggggcgggagttgcttctgctcctgatgcagttcctgtgccatgagttcctgcgagggaacccacgggtgacctggctgctctctgagatgcgcattcacctgctgccctccatgaaccctgatggctatgagatcgcctaccaccggggttcagagctggtgggctgggccgagggccgctggaacaaccagagcatcgatcttaaccataattttgctgacctcaacacaccactgtgggaagcacaggacgatgggaaggtgccccacatcgtccccaaccatcacctgccattgcccacttactacaccctgcccaatgccaccgtggctcctgaaacgcgggcagtaatcaagtggatgaagcggatcccctttgtgctaagtgccaacctccacgggggtgagctcgtggtgtcctacccattcgacatgactcgcaccccgtgggctgcccgcgagctcacgcccacaccagatgatgctgtgtttcgctggctcagcactgtctatgctggcagtaatctggccatgcaggacaccagccgccgaccctgccacagccaggacttctccgtgcacggcaacatcatcaacggggctgactggcacacggtccccgggagcatgaatgacttcagctacctacacaccaactgctttgaggtcactgtggagctgtcctgtgacaagttccctcacgagaatgaattgccccaggagtgggagaacaacaaagacgccctcctcacctacctggagcaggtgcgcatgggcattgcaggagtggtgagggacaaggacacggagcttgggattgctgacgctgtcattgccgtggatgggattaaccatgacgtgaccacggcgtggggcggggattattggcgtctgctgaccccaggggactacatggtgactgccagtgccgagggctaccattcagtgacacggaactgtcgggtcacctttgaagagggccccttcccctgcaatttcgtgctcaccaagactcccaaacagaggctgcgcgagctgctggcagctggggccaaggtgcccccggaccttcgcaggcgcctggagcggctaaggggacagaaggattgatacctgcggtttaagagccctagggcaggctggacctgtcaagacgggaaggggaagagtagagagggagggacaaagtgaggaaaaggtgctcattaaagctaccgggcacctt

SEQ ID NO: 17587 - protein, 734 aa, Homo sapiens [sequence omitted]

SEQ ID NO: 17588 - DNA, 2542 bp, Homo sapiens
gttgccatgtttgctctgcccctggggtggaggccagaggagatgcttaccaggcctgagaccttgagagttcacccagggtttgtacgctgccacccagggttcccaaggtttctcccatctggtcagatgtcgaacacaaaatgtgggcattctgcacggaaggaaagatcaggcttctcttgctgagtgtgtgaagacagggagagccaggccccagcagatgcggcctagcacactctgatttggttttgtggggagggcccaggaacttgggggtggtcttggcattcagagctggtgctaaaaacccagagcagaagcagggagaagggagtgaggatgggacagagaagagcgaccactggggatcagaacagcttttcaggggccaccttgcagcctaagataatgccgtttcagggcctgggcctgctgtgagagccagaatgaagcatgtgcaagattggaatgtgagaagaactgtggggggaaaccagttttaattaagtggaagtgctttgtgcttgtgctgaagttgcctgggcctcctgcagctctggacctcactggagcggccccgccctgcccttgcctgcctttcttttatgctgatgctggtgggctttttcctgcttcaggatccatgtaagggactgaccaggttcatccagccttaactggttcctgcaacccacttttaggtctcccaccaggggcctattgtgctgtcttcctgtgaccagcagatcctgtaagggggtgatcctaattctggggctctttgcagcaagaggagaacgttctttttcttgaacaaggtggccggttccctgggagaaggctgggaatggcacgtccggccagggcaggcggtgcggcatcctcctcctgggattcctgtggcctcccctgttctattcattgtttggcttcccacccataagctctgggatacccagggcttgcttcccagctcttctcatctccaagcctctgctcctcttcccaccaccactgccatataaaatggccatgctaactcctacacaactaggagcctcagcaggattgctaggatgtgggttccttcctgcatgcttgcttctgcagctgtgtggccttgccatgggcctcccaccactttcccttctaccttgccttccattgtcttccttctcccagaaagccaggtttcaccacgtgctcaccacaaactgtctcccctccctcgtaggagtcactgcagtagggcacctgcaggccctggtagagtgagcagggcttacgtgtacattctttctcactctaaggatgtgatatctgaccctgatgtcagagaggaggtctcaggactagcattcggggtcctttgagtgttcccagaatggtttggggtatcacacaaaacaccagagctgagggtagggatagagtccccaaacacacatcctgggagcaagccacttcatctgagcttcccataccaggagcatggtttgtgctttgatgggaaacctagcaagcccctgcactctggggcttctcctctcctggagcccagggcggctctggcccgatgatatggcagccataggtacaggtattgcaggtgcagcctttcttaagtaccctgcctccactctatagcccagctgctgctggagtccaggaccttagacccaggatgagcaaaaggatcccaccaggttgtccaggaccattgccagggtgaccccagagttcttcagacctgtgtctgatactgaatacagtgccatgggaccctgctccaatctaactgcctacaacctgcccgtccccctgctgcagggatgttgctgctacctcgggaggctctctgagactggtgtctggtcttagatgctgcacatagtacctggtgctagggtctaggggctgcccaaagcccagcaggaacagctactactcatcctgcagaggccttggcccagaccagctttccatccaaagcctcacctggtttccatgtccatctcaacagtctggccttcctgtgactgtagcctggcagccacaccctcagtaatcccacacagtgagtccagcttctctgggagcttggccttcagttagcccagtccatgagagggcagggtaatgaggaggagtaaaggacctatcttctctgtccacataaggaagttgggaccacaaggtcttttatctccttgttactccccaaccccaccataacctcctactcagcacacagctttgtcctggtagattataaggtgagcttccagaacctggcaggaggctggtgtatccccctgcacagagggaagtgtatctgaatgttgtgtatgtggctgatatggaagacatacatgtatgcaatccatcagcgtttaaagaagaagattggctccagttcggaggaggaggaggaagattacagatctattctgagtattttttagagagttaatatttatatttttagtaattttctggtagaaggaaattgcacaataaaatgatttggtttggtttt

SEQ ID NO: 17589 - DNA, 2535 bp, Homo sapiens
  CDS (322)..(2013)
attctgcaaggccgtggaaacaaagggaggaactgtttgtagccctcgtccagacgccccaaacaaacaatggagaaggaaaggcaagcgacttgtccagagccactctgtcaaaaggggacttgagtcctcagggctgttgactccaaagctgacaagcaggtggcattcttcttcagagcagggcaagtgtaattctggaccaatgtgtgattctgagaccagaccaaccaactgaaggagccaagttacaccctgtttaaccctgccttcaaagggacgactctgtaagattctctgctacttattcaagttgacacgatgcccttcacactccacctgaggtcccgccttccctctgccataaggagtttgattctacaaaagaaaccaaacatcagaaatacatccagcatggctggagagctccgaccagccagcctggtggtcctgcccaggtcccttgctccagcttttgaaagattctgccaggtcaacactggtcctctacccctgctgggccagagtgagccagaaaagtggatgctgccccctcaaggtgctatctcagagaccaggatgggccatccccagttctggaaatacgagttcggtgcctgcaccggtagcctggcttcgctggagcagtactcggagcagctgaaggacatggtggccttcttcctgggctgcagcttctccctggaggaggccttggagaaagcggggctccccagaagagacccagcaggtcacagccagacaacagtgccttgtgttacccatgctggcttctgctgccctctggtggtcacgatgaggcccattcccaaggacaagctggaagggctggtgcgggcctgctgctccctcggagaactgttgggaatcaaagagctttccaaacctgcctacggggatgccatggtgtgtcccccaggggaggttccagtgttctggccttctccgctgaccagtctcggagctgtcagcagctgtgagaccccactggcttttgccagcatcccaggctgcacagttatgactgacctgaaggatgcaaaggctccacctggttgtctcaccccagagagaattccagaggtccatcacatttcccaagatcctctgcactacagcatcgcgtcagtctctgcttctcagaagatcagagaactagagtctatgatcggcatagacccagggaaccgggggattgggcacctgctctgtaaagatgagctgctgaaggcctctctctcgctgtcccatgcccgctcagtgctcatcaccactgggttccccacacatttcaatcatgagcctccagaagagacagatggcccaccaggagctgttgctctggttgccttcctgcaggccttggagaaggaggtcgccataatcgttgaccagagagcctggaacttgcaccagaagattgttgaagatgctgttgagcaaggtgttctgaagacgcagatcccgatattaacttaccaaggtggatcagtggaagctgctcaggcattcctgtgcaaaaatggggacccgcagacacctagatttgaccacctggtggccatagagcgtgccggaagagctgctgatggcaattactacaatgcaaggaagatgaacatcaagcacttggttgaccccattgacgatctttttcttgctgcgaagaagattcctggaatctcatcaactggtgtttctaactggggaggctatgccctggcctgcgcactctacatcctgtactcatgtgctgtccacagtcagtacctgaggaaagcagtcggaccctccagggcacctggagatcaggcctggactcaggccctcccgtcggtcattaaggaagaaaaaatgctgggcatcttggtgcagcacaaagtccggagtggcgtctcgggcatcgtgggcatggaggtggatgggctgcccttccacaacacccacgccgagatgatccagaagctggtggacgtcaccacggcacaggtgtaaccgtccatgttccgtgtgagcagagtccctaccaacgggcaggtctgcatccggggagaatgcagctgcttctggcgacaatcctgctagtaaacactggtcttcggtgagcaacgaacactcgtctggcctgggaaactgcatgcccactttctgggaggggttagtgcaggtgccgtggacaaaggacaacatttctctggggctttttaacttttattcctaagactctaaaggcgttgatttcaaccctccttcactctggcttcttcaggcaacccacgtggtctcctgtgagaatcttctcgacagttacttatggggacacttgtgaacaattaactgccaggcagagcatgagaacaaacattcccaggccatgtaggataggatactccagactccagtcatcctcccccatccatggtttctgttactcatggtttcagttactcatagccaactgcagaccgaaaatactaaatgaaaaatttcagaaataaacaactcttaagtttt

SEQ ID NO: 17590 - protein, 564 aa, Homo sapiens
MPFTLHLRSRLPSAIRSLILQKKPNIRNTSSMAGELRPASLVVLPRSLAPAFERFCQVNTGPLPLLGQSEPEKWMLPPQGAISETRMGHPQFWKYEFGACTGSLASLEQYSEQLKDMVAFFLGCSFSLEEALEKAGLPRRDPAGHSQTTVPCVTHAGFCCPLVVTMRPIPKDKLEGLVRACCSLGELLGIKELSKPAYGDAMVCPPGEVPVFWPSPLTSLGAVSSCETPLAFASIPGCTVMTDLKDAKAPPGCLTPERIPEVHHISQDPLHYSIASVSASQKIRELESMIGIDPGNRGIGHLLCKDELLKASLSLSHARSVLITTGFPTHFNHEPPEETDGPPGAVALVAFLQALEKEVAIIVDQRAWNLHQKIVEDAVEQGVLKTQIPILTYQGGSVEAAQAFLCKNGDPQTPRFDHLVAIERAGRAADGNYYNARKMNIKHLVDPIDDLFLAAKKIPGISSTGVSNWGGYALACALYILYSCAVHSQYLRKAVGPSRAPGDQAWTQALPSVIKEEKMLGILVQHKVRSGVSGIVGMEVDGLPFHNTHAEMIQKLVDVTTAQV

SEQ ID NO: 17591 - DNA, 2455 bp, Homo sapiens
  CDS (101)..(1456)
gtgccacgtcccaagtgctacgcggaggattagagcaggcggtgcgctgggggcgggagcagcgcggagcccggctcggccacaccgatcgcccgccgccatgggctcctcgcaaagcgtcgagatcccgggcgggggcaccgagggctaccacgttcagcgggtacaagaaaattccccaggacacagagctggtttggagcctttctttgattttattgtttctattaatggttcaagattaaataaagacaatgacactcttaaggatctgctgaaagcaaacgttgaaaagcctgtaaagatgcttatctatagcagcaaaacattggaactgcgagagacctcagtcacaccaagtaacctgtggggcggccagggcttattgggagtgagcattcgtttctgcagctttgatggggcaaatgaaaatgtttggcatgtgctggaggtggaatcaaattctcctgcagcactggcaggtcttagaccacacagtgattatataattggagcagatacagtcatgaatgagtctgaagatctattcagccttatcgaaacacatgaagcaaaaccattgaaactgtatgtgtacaacacagacactgataactgtcgagaagtgattattacaccaaattctgcatggggtggagaaggcagcctaggatgtggcattggatatggttatttgcatcgaatacctacacgcccatttgaggaaggaaagaaaatttctcttccaggacaaatggctggtacacctattacacctcttaaagatgggtttacagaggtccagctgtcctcagttaatcccccgtctttgtcaccaccaggaactacaggaattgaacagagtctgactggactttctattagctcaactccaccagctgtcagtagtgttctcagtacaggtgtaccaacagtaccgttattgccaccacaagtaaaccagtccctcacttctgtgccaccaatgaatccagctactacattaccaggtctgatgcctttaccagcaggactgcccaacctccccaacctcaacctcaacctcccagcaccacacatcatgccaggggttggcttaccagaacttgtaaacccaggtctgccacctcttccttccatgcctccccgaaacttacctggcattgcacctctccccctgccatccgagttcctcccgtcattccccttggttccagagagctcttctgcagcaagctcaggagagctgctgtcttccctcccgcccaccagcaacgcaccctctgaccctgccacaactactgcaaaggcagacgctgcctcctcactcactgtggatgtgacgccccccactgccaaggcccccaccaccgttgaggacagagtcggcgactccaccccagtcagcgagaagcctgtttctgcggctgtggatgccaatgcttctgagtcaccttaactttgaaccattctttggaattggcgtggtatatttaaccacgggagcgtgtctggaaacgcaaactatcattaatttcatactagtttgtaccgtatctgtaggcatcctgtaaataattccaaggggaaaactaaacgaggacgtgggttgtatcctgccaggttgagtggggctcacacgctagggtgagatgtcagaaagcgcttgtattttaaacaaccaaaaagaattgtaagggtggcttgctgccaggcttgcactgccgttcctgggggtgtgcatcttcgggaaaggtggtggcggggcgtccactaggtttcctgtcccctgctgctccttccgtaagaaaatgaaatattctatgcctaatactcacacgcaacatttcttgtactttgtaagtcgtttgcgagaatgcagaccacctcactaaactgtaaacggtaaagagatttttacttttggtctccgtgagtcgcatctctactaaggtttacacaggaattccacctgaagacttgtgttaaagttctacagcgcgcactgttaactgaacgtctttttcttcagcctatacgcggatccttgttttgagctctcagaatcactcagacaacattttgtaactgctgctgttgctttctacatacaccttataaagtgacatttcaaaagaaataaggtgccacagttttaaaccagaaggtggcactctgtggctccttgtagtattatagctatactgggaaagcatagatacagcaataaagtacagtaattttactttttttcttgtgttacatctaaattacaacccttaattgccacgtgtgcacttactactctccagtatgtcttattactctccagtatgtcacgcatctttaacttttcacgtcctatgtttgctttctcccatttttaagagatggtaagttaactggaattgatttactgaatgaaattaaatgcagatatccctgtttttgaaat

SEQ ID NO: 17592 - protein, 452 aa, Homo sapiens [sequence omitted]

SEQ ID NO: 17593 - DNA, 2064 bp, Homo sapiens
agtcaggacaagatgaaaagaaaaacatccaaaagaagtgaaattggtgacagaatgagaggagcaaagcataccagtgtagtaagtggaatgtttgaatgactttgccaggtcagagcaagtaatatttctgtatctgagtttttgtttgtgttttgataaggctaatgaaattgcattccaggtaggggttaacgtcaaatttccatggctggtagctgtgcttttggcatatcacagtgttgtgtcactactacaaggtaaagcatctacagcggagaatgagcttgaaaatgagagacctattgtgaataaatatgcccatgagagcatatttaataagcctctataacatgcagccaaaccagacattcactcctgcagagaaatgttgccctggagaaaaagagatatataaagataggctatcacccttcttttgctgcagtactaagcatagcaagaaattagaatcatttacattggaaatttgaaaattccctttatatacacaactttactgtgtataaataaaaaatatttattaatgcagtgatgtccgtcaggttgttttaggaatggcttctgcaattagaaaaatagcttgctagaatgtaaatgttctgttactggtaaatgtactgcacacattcattggacgttaaaacaagtgagtagccttttttacctgccagcagcatggctgtgtgcagccactaggctgagacaataaattaccaaaaattataatgtaccgagctgaaaatgctcagtacattatgtggcatattctggatgtgatgagaaatctcattgccatttgggacactgacatcccagaagtaatccacaactgctttgcaaaagcaaagtgactgctcagatgaacagagcagagtactcactcactatggtggcatcagctgcaaagcaaaatgaactgtcccatggtcatgttgatggttttctagatactgccaacatgttagctctttctgatgctgatgagtttcaaacacgaacagacacccttgatgtgggtttgctaagaacatagaagaacaggaagaaaagttgccaggttcacacatcccaggaaaaaagaagcataaaaagcattagcagtcagtgactgatgataatgctgcaataatgggagtggttttgtttctaaaccaaattatttctaaatcaaatcatttattgctttgtttctaaagcagttgagtcactaagtttgtgaactgtaggagaacacatcaagattgaatcctgtgttaagcagaaggtaaaaccagagccaggcgcagtggctcgtgcctgtaatcccagctactcaggaagctaaggcaggaggatcatgtgaggccaggagttcaagactagcctgggcaacatagaaagaccctgtctctaaaaaatcttcttttaattagcaaggtgtggggccttgagcaaattgcttgggcccaggagtttgaggctgtggtgagctgtgatcacaccactgcgttccagcctgtgtgacagggcaagacctcatgcctaaaaaataaagagaaagcagagtaaaactggactctgagatacgactaaagttctgtgtgatacgtgtgccttatttagctcaagacattcctggagcacctataaaaactgacttgtaatccaggctatgtctctttagcttcgtaatctttggcaaggccattggattcttcagctgtacaattaggagactcgatcaggtgattgcctttctcagctgtcagttctctaatttcaggcttggtagcttgtaggaactgaaattgcaattaaaacctttataaactcaaactaaatcatgaattacagaaaaagtccattcttccaaaacttgatgttaccacacttacaagtttaaaatatgaagtcgactgtttaaaggattctgcatatattctagtgtgcacattcagaaacatttttcttggaaaaagtacccaacattttttataactgcacatattaatttattgccagaataaattgcattgcatgctaaataaagtcagataattc

SEQ ID NO: 17594 - DNA, 3275 bp, Homo sapiens
  CDS (56)..(1441)
gtactaccttcggtctaggcagcggaggcagccgcgaccccaggaaaccgaggaaatgaagacgcgaaggactacccgccttcagcagcagcactcagagcagcctccgctacagccgtctcctgttacgaccaggagagggctgcgggactctcattcctctgaagaggatgaagcatcttcccaaactgatttaagccaaacgatctcaaagaaaactgtcaggagcatacaagaggctccagtgagtgaagatcttgtaatcaggttacgtcgaccccctctaagatgcccaagatatgaagccaccagtgtccaacagaaggtcaatttctctgaagaaggagaaactgaagaagatgatcaagacagctctcacagcagtgtcactactgttaaggccagatccagggattctgatgaatctggagataaaaccaccagatcatctagtcaatatatagaatcattttggcagtcatcacaaagtcaaaacttcacagctcatgataagcaacgttcagtgctaagctcaggatatcaaaaaactccccaggaatgggccccacaaactgcaagaataaggaccaggatgcaaaatgacagcattctgaaatcagagcttggaaaccagtcaccatcaacctccagccgacaagtgactggacaaccccaaaatgcatcttttgtcaagaggaaccggtggtggctacttcctctgatagctgctcttgcctctgggagtttttggttctttagtactcctgaggtagaaaccactgctgttcaagagttccagaaccagatgaatcaacttaagaataagtaccaaggtcaagatgagaagctgtggaaaaggagccaaacattcctggaaaaacatcttaatagctcccatcctcggtctcagcctgctatcttactgctcactgctgcccgagatgctgaagaagcacttaggtgtctgagtgaacaaattgctgatgcctattcttcttttcgtagtgtccgtgccatccggattgatgggacagataaagctactcaagacagtgatactgtcaaactagaggtagaccaagaactgagcaatggatttaagaatggccagaatgcagctgtggtacaccgctttgagtcatttcccgcaggctctactttgatcttctacaaatattgtgaccatgaaaacgcagccttcaaagatgtagccttagtcctgactgtcttattggaggaagagacacttggaacaagtctaggcctaaaggaagttgaagaaaaagtaagagattttcttaaagtcaagttcaccaattctaacacacccaactcctacaatcatatggacccagacaaactgaatggcctctggagccgtatttctcacttagttctgcctgtgcaacctgaaaatgccctgaaaaggggcatctgcttataagaagtgagagagaagaaaaatcatgtcccaagttctgagaattgttcacactttctaaccagagacagaattcagagctctttttgaaagaactagtttctttttaaagaagttaagtgcttacataaacatggaacatataaatcattcattcaacctaattatctgtgatatgagagaatcatttcagtttccattgagagctctgttaaaggtatcttaggagtgcagattatatgcagttccttagagaatctgttttgattctgggctgagttattacaattatggtatgaccagtgagagcgatttgtgtcctttcttatgaaccttcctgattttttaacttagatttctcactaagtttcctgagttattagtaagattgctccctaaatgtaaccagggatttttccattatgttcccttttataccatttaggtgtgagttccttagcttctgcctataggaacataagtaatgaaaggtcatctaggtgtgtgtttggaatttttttcttttgttttttggaaaatggaaagaacaaggcaaggaaggaaaattaatggggaagctgaagggaggaaatgttacagtaatccactgagatgtagtttagtcaaacataggtatatgaactgttaatcttggtggattccgttgggatttgttttttacatctcctttttccttccttgaagaaaaattcttggctgtcccaaggattcttcatgtatattgcaaaatttaatatatttgttcacttgagtcttaagagtaggtcaggccaaggcaggtggatcacctgaggtcagaagttcaagaccagcctggccaacatggtgaaaccccctctctactaaaaatacaaaaattagctgggcgtggtggtgcatgcctgaaatcccagctacttgggaggctgaggcaggagaattgcttgaacccgggaggcggaggttgcagtaagccgagaccatgcttattgccctccagtctgggcaacaaaaatgaaactccgtctcaaaaaaaaaaaagtaggtcaattcgtaacagtttattttggacacaccctgaagcttttgttttgaattaagaaatgagtttcaggaattgacaaaccatttgttaaccagctgtcctgggctattgaagaagatttcattttccgcgcatccacttgttgcagtccaagtcctctagtgcaacgccatagcaaatataaagatttactatgcacgtgatacattttatggagtgcctcaagccaagatagtgaatttatatgaagggtgtgaaatgtatttctttactactatagtagtttagttataactttgcatctataattgagctttctcatctgtcaaatgctatggttttcttaaaatgttacaattctagatctatccaccttgtttttttattgtctacaaaccattaaatgtaaatattgtttttagagtcagtcattggctttgtcatttaccctttgagagttccacaagtggtagtagagtggtttaacgtctttcctctagtactaccagtattcataaatgtataccccttactgtaatttgttcctcttagaagtcagatcatctgatttatagaggattatgaaaaccagagtttttgaaaaggcttattttatacatacgtattatatagagaaacaaatgtttttattaaatgtttcattgacccaagtaatttaaaagtaatatgttacctatgtctttcaggaaaaataattatagcagctgatctgtaaatgactttaaaagctattttagtaatttaaataaatttactttcttggtttat

SEQ ID NO: 17595 - protein, 462 aa, Homo sapiens
MKTRRTTRLQQQHSEQPPLQPSPVTTRRGLRDSHSSEEDEASSQTDLSQTISKKTVRSIQEAPVSEDLVIRLRRPPLRCPRYEATSVQQKVNFSEEGETEEDDQDSSHSSVTTVKARSRDSDESGDKTTRSSSQYIESFWQSSQSQNFTAHDKQRSVLSSGYQKTPQEWAPQTARIRTRMQNDSILKSELGNQSPSTSSRQVTGQPQNASFVKRNRWWLLPLIAALASGSFWFFSTPEVETTAVQEFQNQMNQLKNKYQGQDEKLWKRSQTFLEKHLNSSHPRSQPAILLLTAARDAEEALRCLSEQIADAYSSFRSVRAIRIDGTDKATQDSDTVKLEVDQELSNGFKNGQNAAVVHRFESFPAGSTLIFYKYCDHENAAFKDVALVLTVLLEEETLGTSLGLKEVEEKVRDFLKVKFTNSNTPNSYNHMDPDKLNGLWSRISHLVLPVQPENALKRGICL

SEQ ID NO: 17596 - DNA, 2360 bp, Homo sapiens
  CDS (98)..(1519)
agtgtgccaggctggaggcggcagcggttggaggcttcgcccggctttgcagcggggacttcggcggcggcgcctcaggcacctcggcccggacacgatgaggcgagtggtacgacagagcaagtttcggcatgtatttgggcaagcggtgaaaaatgaccagtgctatgatgacatccgggtttctcgtgtgacctgggatagttccttttgtgctgtcaatcccagatttgttgccataatcatagaggcaagtgggggaggagcgttccttgtcctccctctgcacaagactggtcgaattgacaaatcttaccctacagtatgtggccacacaggaccagtgctggacatagactggtgcccacataacgatcaggtcattgccagcggttcagaggactgcacggtcatggtatggcagatcccagaaaatggactcaccctttccctgactgaacctgtggtgattttggaaggccactcaaagagagtcggcatcgtggcttggcatccaacggcccgcaatgtgcttcttagtgcaggctgtgataatgccattatcatctggaatgtgggaacaggggaagcccttataaacttggacgatatgcattcagacatgatttacaatgtgagctggaaccggaatggcagtctgatctgcacagcttccaaagacaagaaagtgagagtcattgatcccaggaaacaagagattgttgctgagaaggagaaagcacatgaaggagcaagacccatgagagccatcttcctggccgatggcaatgtcttcaccactgggttcagccgcatgagcgagcggcagctggctctctggaatccgaaaaatatgcaggaaccaattgctcttcatgagatggacactagcgatggggtgttgctgcctttctatgaccctgacaccagcatcatttacttatgtggaaagggtgacagcagtattcgctattttgagatcacggatgaatccccgtacgtccactacctcaacacattcagcagcaaggagcctcagagagggatgggttacatgcccaagaggggacttgatgttaacaaatgtgagattgccagattcttcaaacttcatgagagaaagtgtgaacctattattatgactgttcccaggaagtctgaccttttccaagatgacctgtatcctgacacagcggggccagaggccgcgctggaggcagaagagtggttcgaaggcaagaatgcagacccaatcctcatctccttgaagcacgggtacattccaggcaaaaacagggatctcaaggtggtcaagaagaacattctggatagcaagcccactgcaaacaagaagtgcgacctgatcagcatccccaagaaaaccacagacacggccagtgtgcaaaatgaagccaagttggatgagattttaaaagagagcaaatctataaaagacacaatctgcaatcaagatgagcgtatttccaagttagaacagcagatggcaaagatagcagcctgaaggtcccacccccacccctacagaaaaaatgggagcaagaacttgtgcttgggagctggttattggtgtggtcctagggagggcggaaagggaggcactgccatttggagacattccatttcagatttgtcaaccagcgataggccacattccagtaagaactcaatttgtctcccaaatttgcagaaacaaaacgtgatttaaaagctgagctttttatcaggaagcttttttgatgttttaagtgttatgtgacttgttgaactttttaaaaagtgctacttttaaaatcccagatactctgaattttagaaaacaaactaattctgattgtgtcgtgcccaagtacccttttttttttaatgaatagggaccaatgccacattgctttttatatttctttcttttttaatgttgccaaaaccaaaagtagctttgttttcctttgtattttgctactttgcagtatttgtgtgtgtggttttttttccttaatttgaaagggacagcactgtgtatgtttataaactaaatgaagataagatattattttgtataaacattcatctgagaacaatcaaagcagtagccacatggtgctggctcctttgcagcacaaacctggtcattttgatgactgtacaacaggaagacttgaaaaatcacgtggattcatattaccaccgctctcatttcatggagtcttctgatcaaaaaagctcacgtcgtatttcttcttttcctttctcttttctagaaattgggtgtttgtaccagaatggaattttgcttctcggttatcctgtgcttcagatgattataatctaacccaaactag

SEQ ID NO: 17597 - protein, 474 aa, Homo sapiens [sequence omitted]

SEQ ID NO: 17598 - DNA, 4298 bp, Homo sapiens
  CDS (274)..(1179)
gacaccagagcttccagggatatttgaggcaccatccctgccattgccgggcactcgcggcgctgctaacggcctggtcacacgctctccagagagctacgggagggcgctgggtaacctctatccgagccgcggccgcgaggaggagggaaaaggcgagcaaaaaggaagagtgggaggaggaggggaagcggcgaaggaggaagaggaggaggaggaagaggggagcacaaaggatccaggtctcccgacgggaggttaataccaagaaccatgtgtgccgagcggctgggccagttcatgaccctggctttggtgttggccacctttgacccggcgcgggggaccgacgccaccaacccacccgagggtccccaagacaggagctcccagcagaaaggccgcctgtccctgcagaatacagcggagatccagcactgtttggtcaacgctggcgatgtggggtgtggcgtgtttgaatgtttcgagaacaactcttgtgagattcggggcttacatgggatttgcatgacttttctgcacaacgctggaaaatttgatgcccagggcaagtcattcatcaaagacgccttgaaatgtaaggcccacgctctgcggcacaggttcggctgcataagccggaagtgcccggccatcagggaaatggtgtcccagttgcagcgggaatgctacctcaagcacgacctgtgcgcggctgcccaggagaacacccgggtgatagtggagatgatccatttcaaggacttgctgctgcacgaaccctacgtggacctcgtgaacttgctgctgacctgtggggaggaggtgaaggaggccatcacccacagcgtgcaggttcagtgtgagcagaactggggaagcctgtgctccatcttgagcttctgcacctcggccatccagaagcctcccacggcgccccccgagcgccagccccaggtggacagaaccaagctctccagggcccaccacggggaagcaggacatcacctcccagagcccagcagtagggagactggccgaggtgccaagggtgagcgaggtagcaagagccacccaaacgcccatgcccgaggcagagtcgggggccttggggctcagggaccttccggaagcagcgagtgggaagacgaacagtctgagtattctgatatccggaggtgaaatgaaaggcctggccacgaaatctttcctccacgccgtccattttcttatctatggacattccaaaacatttaccattagagaggggggatgtcacacgcaggattctgtggggactgtggacttcatcgaggtgtgtgttcgcggaacggacaggtgagatggagacccctggggccgtggggtctcaggggtgcctggtgaattctgcacttacacgtactcaagggagcgcgcccgcgttatcctcgtacctttgtcttctttccatctgtggagtcagtgggtgtcggccgctctgttgtgggggaggtgaaccagggaggggcagggcaaggcagggcccccagagctgggccacacagtgggtgctgggcctcgccccgaagcttctggtgcagcagcctctggtgctgtctccgcggaagtcagggcggctggattccaggacaggagtgaatgtaaaaataaatatcgcttagaatgcaggagaagggtggagaggaggcaggggccgagggggtgcttggtgccaaactgaaattcagtttcttgtgtggggccttgcggttcagagctcttggcgagggtggagggaggagtgtcatttctatgtgtaatttctgagccattgtactgtctgggctgggggggacactgtccaagggagtggcccctatgagtttatattttaaccactgcttcaaatctcgatttcactttttttatttatccagttatatctacatatctgtcatctaaataaatggctttcaaacaaagcaactgggtcattaaaaccagctcaaagggggtttaaaaaaaaaaaccagcccatcctttgaggctgatttttcttttttttaagttctattttaaaagctatcaaacagcgacatagccatacatctgactgcctgacatggactcctgcccacttgggggaaaccttatacccagaggaaaatacacacctggggagtacatttgacaaatttcccttaggatttcgttatctcaccttgaccctcagccaagattggtaaagctgcgtcctggcgattccaggagacccagctggaaacctggcttctccatgtgaggggatgggaaaggaaagaagagaatgaagactacttagtaattcccatcaggaaatgctgaccttttacataaaatcaaggagactgctgaaaatctctaagggacaggattttccagatcctaattggaaatttagcaataaggagaggagtccaaggggacaaataaaggcagagagaagagacagaactaaaaatacgaggaaaggagagtgaggattttcattaaaagtctcagcagtgggtttcttgggttatttaaaacatcacctaaataggccttttcttcctaattggccatcaaattaaagcctatcctttctcaagcaggagctggtattgtagggagtggccgggtattctgggctgggctcttctggagtagggggtcagcaaacattgtctgcaaagggccagatactgaatctagtactttcagtttggcgagccgtgaggtctctgtcgaaactactcaactctgccgtcctagcacaaaagcagccatagacaacacacaaacgagagggcttggctcccttccaggaagatttatttaacaggctcccagctgaatttcactcacaggacacagtttactgatctctgttctagtgagtgggtcaaaaagcatatgcatccttatccgtcaactcatcagctcttcctcaaggcaacctgaggccagacaccaagaaaccaagcgtatctgctctaaaatgacttgttcctggggaatgccttcaaccaaaacacagctagtatctctatgccccaaatccaatcccagtctttcatgatccatgccggcggttgggtggggaggggaatcattggttgggggaagggaggaaaccccacctccagcccccgccaccgggctccctgggcacccagcaagatctggggctgcagagaacagaagagccggtgcacttaatccagctctgcccttggggggaggaggacctgtgtgtcaggctctgccatgggaacgagtgtaaaccgtggctgtctcctgcagtgagccaccgcggcaggcacgttgactgttttactgacatcactcaaaagctaaagcaataacattctcctgcgttgctgagtcagctgttcatttgtccgccagctcctggactggatgtgtgaaaggcatcacatttccattttcctccgtgtaaatgttttatgtgttcgcctactgatcccattcgttgcttctattgtaaatatttgtcatttgtatttattatctctgtgttttccccctaaggcataaaatggtttactgtgttcatttgaacccatttactgatctctgttgtatatttttcatgccactgctttgttttctcctcagaagtcgggtagatagcatttctatcccatccctcacgttattggaagcatgcaacagtatttattgctcagggtcttctgcttaaaactgaggaaggtccacattcctgcaagcattgattgagacatttgcacaatctaaaatgtaagcaaagtagtcattaaaaatacaccctctacttgggctttatactgcatacaaatttactcatgagccttcctttgaggaaggatgtggatctccaaataaagatttagtgtttattttgagctctgcatcttaacaagatgatctgaacacctctcctttgtatcaataaatagccctgttattctgaagtgagaggaccaagtatagtaaaatgctgacatctaaaactaaataaatagaaaacaccaggccagaactatagtcatactcacacaaagggagaaatttaaactcgaaccaagcaaaaggcttcacggaaatagcatggaaaaacaatgcttccagtggccacttcctaaggaggaacaaccccgtctgatctcagaattggcaccacgtgagcttgctaagtgataatatctgtttctactacggatttaggcaacaggacctgtacattgtcacattgcattatttttcttcaagcgttaataaaagttttaaat

SEQ ID NO: 17599 - protein, 302 aa, Homo sapiens
MCAERLGQFMTLALVLATFDPARGTDATNPPEGPQDRSSQQKGRLSLQNTAEIQHCLVNAGDVGCGVFECFENNSCEIRGLHGICMTFLHNAGKFDAQGKSFIKDALKCKAHALRHRFGCISRKCPAIREMVSQLQRECYLKHDLCAAAQENTRVIVEMIHFKDLLLHEPYVDLVNLLLTCGEEVKEAITHSVQVQCEQNWGSLCSILSFCTSAIQKPPTAPPERQPQVDRTKLSRAHHGEAGHHLPEPSSRETGRGAKGERGSKSHPNAHARGRVGGLGAQGPSGSSEWEDEQSEYSDIRR

SEQ ID NO: 17600 - DNA, 2512 bp, Homo sapiens
  CDS (141)..(1604)
ctgagtctttcggcctgggtggaggacgcggctgcttcaagtccttggctctgatccaggccacagattccaggattctacaggcaggaaacatcttagaaatcagggttgggcaggcaggagccaggagagtagctacaatgacttcaccagtactggtggacatacgagaagaggtgacctgccctatctgcctggagctcctaacagaacccctgagcatagactgtggccacagcttctgccaagcctgcatcacaccaaatggcagggaatcagtgattggtcaagaaggggaaagaagctgccctgtgtgccagaccagctaccagccagggaacctgcggcctaatcggcatctggccaacatagtgaggcggctcagagaggtagtgttgggccctgggaagcagctgaaagcagttctttgtgcagaccatggagaaaaactgcagctcttctgtcaggaggatgggaaggtcatttgctggctttgtgagcggtctcaggagcaccgtggtcaccacacgttcctcgtggaggaggttgcccaggagtaccaggagaagtttcaggagtctctaaagaagctgaagaacgaggagcaggaagctgagaagctaacagcttttatcagagagaagaagacatcctggaagaatcagatggagcctgagagatgcaggatccagacagagtttaatcagctgcgaaatatcctagacagagtggagcaacgggagctgaaaaagctggaacaggaagagaagaaggggctacgaattatagaagaggctgagaatgatctggtccaccagacccagtcgctgcgagagctcatctcggatctggagcgtcgatgtcaggggtcaacaatggagctgctgcaggatgtgagtgatgtcacagaaaggagtgagttctggaccctgaggaagccagaagctctccctacaaagctgagaagtatgttccgagccccagatctgaaaaggatgctgcgagtgtgtagagagctgacagatgtccaaagctactgggttgacgtgaccctgaatccacacacagctaatttaaatcttgtcctggctaaaaaccggagacaagtgaggtttgtgggagctaaagtatctggaccttcctgtctggaaaagcattatgactgtagtgtcctgggctcccagcacttctcctctggtaagcattactgggaggtagatgtggccaagaagactgcctggatcctaggggtatgcagcaattcactgggacctacattctctttcaaccattttgctcaaaatcacagtgcttactccaggtatcagcctcagagtggatactgggtgattgggttacagcataaccatgaatatagggcctatgaggattcttccccttccctgcttctctccatgacagtgccccctcgccgtgttggggttttcttagattatgaggctggtactgtctccttttataatgtcacaaaccatggcttccccatctacactttctctaaatattactttcccactactctttgtccatattttaatccttgcaactgtgtaattcctatgaccctgcgtcgtccaagctcttgaatattcttctgttcccacccacttctgataagtaccctgaggcttatcagcatgtgattctcccttctgatcttctgtttttctgtgttctcaattcttttgttgttttttggtttttgaatcttttttgagatggaatctcgctctgtcgcccaggctggagtgcactggcgcaatctcggctcactgcaacctctgcctcctgggttcaagcgaacctcctgcctcagcatcccaagtagctgggattacaggcacccaccaccatgcccaactaatttttgtatttttatagagatagggtttcaccgtgttggccaggctgatctcgaactcctgaccgcaagtgatccacccgcctcggtctcccaaagtgctgggattacagatgtgagccgccgcgcccagacagttctttcgttttaaacagttactcagtactaggatgcacccagtggtgagagtaagcatctttgactgatgacaggtcttgaggtggatagggggcgctttcagtattttgccattaagcatagtatttgatgcaggttttttttgattgatgcaggggatcaaatttaggaagttctgatctgttaatttactacaagtttttgtataaaatgaaaactcgtattctacctatgtcttttctgtaaattattgagacaattgtgtatcatttttgttctgttaatgtggcttagtacattgatttacttcaatttgttaccacaacttgctgaaatacaccattattatttgttgtatgcaatactggatttattttgataacgtattgtttagattttgttctcatctatgttaatgaaagaaattggcctgtatttttacattcttgtaatatctttgccaggttctataaaatgcaataataagcaaat

SEQ ID NO: 17601 - protein, 488 aa, Homo sapiens
MTSPVLVDIREEVTCPICLELLTEPLSIDCGHSFCQACITPNGRESVIGQEGERSCPVCQTSYQPGNLRPNRHLANIVRRLREVVLGPGKQLKAVLCADHGEKLQLFCQEDGKVICWLCERSQEHRGHHTFLVEEVAQEYQEKFQESLKKLKNEEQEAEKLTAFIREKKTSWKNQMEPERCRIQTEFNQLRNILDRVEQRELKKLEQEEKKGLRIIEEAENDLVHQTQSLRELISDLERRCQGSTMELLQDVSDVTERSEFWTLRKPEALPTKLRSMFRAPDLKRMLRVCRELTDVQSYWVDVTLNPHTANLNLVLAKNRRQVRFVGAKVSGPSCLEKHYDCSVLGSQHFSSGKHYWEVDVAKKTAWILGVCSNSLGPTFSFNHFAQNHSAYSRYQPQSGYWVIGLQHNHEYRAYEDSSPSLLLSMTVPPRRVGVFLDYEAGTVSFYNVTNHGFPIYTFSKYYFPTTLCPYFNPCNCVIPMTLRRPSS

SEQ ID NO: 17602 - DNA, 3198 bp, Homo sapiens
  CDS (71)..(1813)
taggagaattacacatatctcaggtactttagaagatgaagatgaagatgaagataatgatgacattgtcatgctagagaaaaaaatacgaacatctagtatgccagagcaggcccataaagtctgtgtcaaagagataaagagactcaaaaaaatgcctcagtcaatgccagaatatgctctgactagaaattatttggaacttatggtagaacttccttggaacaaaagtacaactgaccgcctggacattagggcagcccggattcttctggataatgaccattacgccatggaaaaattgaagaaaagagtactggaatacttggctgtcagacagctcaaaaataacctgaagggcccaatcctatgctttgttggccctcctggagttggtaaaacaagtgtgggaagatcagtggccaagactctaggtcgagagttccacaggattgcacttggaggagtatgtgatcagtctgacattcgaggacacaggcgcacctatgttggcagcatgcctggtcgcatcatcaacggcttgaagactgtgggagtgaacaacccagtgttcctattagatgaggttgacaaactgggaaaaagtctacagggtgatccagcagcagctctgcttgaggtgttggatcctgaacaaaaccataacttcacagatcattatctaaatgtggcctttgacctttctcaagttctttttatagctactgccaacaccactgctaccattccagctgccttgttggacagaatggagatcattcaggttccaggttatacacaggaggagaagatagagattgcccataggcacttgatccccaagcagctggaacaacatgggctgactccacagcagattcagataccccaggtcaccactcttgacatcatcaccaggtataccagagaggcaggggttcgttctctggatagaaaacttggggccatttgccgagctgtggccgtgaaggtggcagaaggacagcataaggaagccaagttggaccgttctgatgtgactgagagagaaggttgcagagaacacatcttagaagatgaaaaacctgaatctatcagtgacactactgacttggctctaccacctgaaatgccgattttgattgatttccatgctctgaaagacatccttgggcccccgatgtatgagatggaggtatctcagcgtttgagtcagccaggagtagcaataggtttggcttggactcccttaggtggagaaatcatgttcgtggaggcgagtcgaatggatggcgagggccagttaactctgaccggccagctcggggacgtgatgaaggagtccgcccacctcgctatcagctggctccgcagcaacgcaaagaagtaccagctgaccaatgcttttggaagttttgatcttcttgacaacacagacatccatctgcacttcccagctggagctgtcacaaaagatggaccatctgctggagttaccatagtaacctgtctcgcctcactttttagtgggcggctggtacgttcagatgtagccatgactggagaaattacactgagaggtcttgttcttccagtgggtggaattaaagacaaagtgctggcggcacacagagcgggactgaagcaagtcattattcctcggagaaatgaaaaagaccttgagggaatcccaggcaacgtacgacaggatttaagttttgtcacagcaagctgcctggatgaggttcttaatgcagcttttgatggtggctttactgtcaagaccagacctggtctgttaaatagcaaactgtaggtccaaatctcaattttttagaattttaagttatgaagtgctcaaaggtactgacacagttgattttattcacaccattaggggtatgcaagatgtccctgttttataaacataatcacaacagtaataaacctcaagtagtggctagtgtttagtatagaaatataagatgttgatttagtaaactgataaaaatcgaattcttgtctttttagtgggatccttactgtccctggaaagatatagcatagtggttctcagcacagtctccagaacagaagcatctgtagtacctggtaacttgttagaaatgtacattctcaggctccacagcaggccgcctgaatcaaatcctgggaggtggggacagaaatctgtgttttaagaagccttccaggtaattctgctgcacactcaagttcaggaaccaccggtatagaccattaccttagtggatttacctgtagagtttattggatcctgaaaccaatcaattacttagaactaggcaaagatgaaagtatagccaactattcttggctatatatatatattcaagtgggccgggcgtgatggctcacacctgtaattccagcactttgggaggtcgaggtaggcagatcaccgagcccaagagttcaagacaatcctggccaacggcgaaactctgtctctacaaaaaatatacaggcgtgttagcatgtgcctgtaatcccagcttcttgggaagctgaggcacaagaattgcctgaacccaggaggtggaggttgcagtgagctgggatcgcgccattgcactccagcctggctgacagagcgagactgtctctaaaaaaaaaagactcaagtggaccctacaatgaagcctacacatcccaatagaagccccttcttatgctgagggaagcagccctcagaacatgatagcttgtatccagcagagtggcacgtgctggcacacctcacagaagcaccctggccctggatgcctgcaacctcagaagagtgcagctcccagagggaggcagccatccatctgggatggtcctaagcatggaatcctaactcctgattccgtctcctatttcttgcttggctacgccagttcccaaatctggtagatgtccatgcccatgtgctcctgctgggactcaattcaggctatgtatgactatgaagtcaggctcatctgcttactggctgtgtgaactttttgtatcttggttttcttcatccatgaaatccaagtaatactacctaattgttactgtggagattaagttcaaatgcaatgtatagtaatattaagcaatttctagttattattctagccagtaatggacttcagaatcttttattacacaatataagaatatgtatgt

SEQ ID NO: 17603 - protein, 581 aa, Homo sapiens
MLEKKIRTSSMPEQAHKVCVKEIKRLKKMPQSMPEYALTRNYLELMVELPWNKSTTDRLDIRAARILLDNDHYAMEKLKKRVLEYLAVRQLKNNLKGPILCFVGPPGVGKTSVGRSVAKTLGREFHRIALGGVCDQSDIRGHRRTYVGSMPGRIINGLKTVGVNNPVFLLDEVDKLGKSLQGDPAAALLEVLDPEQNHNFTDHYLNVAFDLSQVLFIATANTTATIPAALLDRMEIIQVPGYTQEEKIEIAHRHLIPKQLEQHGLTPQQIQIPQVTTLDIITRYTREAGVRSLDRKLGAICRAVAVKVAEGQHKEAKLDRSDVTEREGCREHILEDEKPESISDTTDLALPPEMPILIDFHALKDILGPPMYEMEVSQRLSQPGVAIGLAWTPLGGEIMFVEASRMDGEGQLTLTGQLGDVMKESAHLAISWLRSNAKKYQLTNAFGSFDLLDNTDIHLHFPAGAVTKDGPSAGVTIVTCLASLFSGRLVRSDVAMTGEITLRGLVLPVGGIKDKVLAAHRAGLKQVIIPRRNEKDLEGIPGNVRQDLSFVTASCLDEVLNAAFDGGFTVKTRPGLLNSKL

SEQ ID NO: 17604 - DNA, 2828 bp, Homo sapiens
  CDS (3)..(1637)
atatggagaagagccaagaggagatggatcaagcattagcagaaagcagcgaagaacaggaagatgcactgaatatctcctcaatgtctttacttgcaccattggcacaaacagttggtgtggtaagtccagagagtttagtgtccacacctagactggaattgaaagacaccagcagaagtgatgaaagtccaaaaccaggaaaattccaaagaactcgtgtccctcgagctgaatctggtgatagccttggttctgaagatcgtgatcttctttacagcattgatgcatatagatctcaaagattcaaagaaacagaacgtccatcaataaagcaggtgattgttcggaaggaagatgttacttcaaaactggatgaaaaaaataatgcctttccttgtcaagttaatatcaaacagaaaatgcaggaactcaataacgaaataaatatgcaacagacagtgatctatcaagctagccaggctcttaactgctgtgttgatgaagaacatggaaaagggtccctagaagaagctgaagcagaaagacttcttctaattgcaactgggaagagaacacttttgattgatgaattgaataaattgaagaacgaaggacctcagaggaagaataaggctagtccccaaagtgaatttatgccatccaaaggatcagttactttgtcagaaatccgcttgcctctaaaagcagattttgtctgcagtacggttcagaaaccagatgcagcaaattactattacttaattatactaaaagcaggagctgaaaatatggtagccacaccattagcaagtacttcaaactctcttaacggtgatgctctgacattcactactacatttactctgcaagatgtatccaatgactttgaaataaatattgaagtttacagcttggtgcaaaagaaagatccctcaggccttgataagaagaaaaaaacatccaagtccaaggctattactccaaagcgactcctcacatctataaccacaaaaagcaacattcattcttcagtcatggccagtccaggaggtcttagtgctgtgcgaaccagcaacttcgcccttgttggatcttacacattatcattgtcttcagtaggaaatactaagtttgttctggacaaggtcccctttttatcttctttggaaggtcatatttatttaaaaataaaatgtcaagtgaattccagtgttgaagaaagaggttttctaaccatatttgaagatgttagtggttttggtgcctggcatcgaagatggtgtgttctttctggaaactgtatatcttattggacttatccagatgatgagaaacgcaagaatcccataggaaggataaatctggctaattgtaccagtcgtcagatagaaccagccaacagagaattttgtgcgagacgcaacacttttgaattaattactgtccgaccacaaagagaagatgaccgagagactcttgtcagccaatgcagggacacactctgtgttaccaagaactggctgtctgcagatactaaagaagagcgggatctctggatgcaaaaactcaatcaagttcttgttgatattcgcctctggcaacctgatgcttgctacaaacctattggaaagccttaaaccgggaaatttccatgctatctagaggtttttgatgtcatcttaagaaacacacttaagagcatcagatttactgattgcattttatgctttaagtacgaaagggtttgtgccaatattcactacgtattatgcagtatttatatcttttgtatgtaaaactttaactgatttctgtcattcatcaatgagtagaagtaaatacattatagttgattttgctaaatcttaatttaaaagcctcattttcctagaaatctaattattcagttattcatgacaatatttttttaaaagtaagaaattctgagttgtcttcttggagctgtaggtcttgaagcagcaacgtctttcaggggttggagacagaaacccattctccaatctcagtagttttttcgaaaggctgtgatcatttattgatcgtgatatgacttgttactagggtactgaaaaaatgtctaaggcctttacagaaacatttttagcaatgaggatgagaactttttcaaatagcaaatatatattggcttaaagcatgaggctgtcttcagaaaagtgatgtggacataggaggcaatgtgtgagacttgggggttcaatattttatatagaagagttaataagcacatggtttacatttactcagctactatatatgcagtgtggtgcacattttcacagaattctggcttcattaagatcattatttttgctgcgtagcttacagacttagcatattagttttttctactcctacaagtgtgaattgaaaaatctttatattaaaaaagtaaactgttatgaagctgctatgtactaataatactttgcttgccaaagtgtttgggttttgttgttgtttgtttgtttgtttgtttttggttcatgaacaacagtgtctagaaacccattttgaaagtggaaaattattaagtcacctatcacctttaaacgcctttttttaaaattataaaatattgtaaagcagggtctcaacttttaaatacactttgaacttcttctctgaattattaaagttctttatgacctcatttataaacactaaattctgtcacctcctgtcattttattttttattcattcaaatgtattttttcttgtgcatattataaaaatatattttatgagctcttactcaaataaatacctgtaaatgtctaaagg

SEQ ID NO: 17605 - protein, 545 aa, Homo sapiens
MEKSQEEMDQALAESSEEQEDALNISSMSLLAPLAQTVGVVSPESLVSTPRLELKDTSRSDESPKPGKFQRTRVPRAESGDSLGSEDRDLLYSIDAYRSQRFKETERPSIKQVIVRKEDVTSKLDEKNNAFPCQVNIKQKMQELNNEINMQQTVIYQASQALNCCVDEEHGKGSLEEAEAERLLLIATGKRTLLIDELNKLKNEGPQRKNKASPQSEFMPSKGSVTLSEIRLPLKADFVCSTVQKPDAANYYYLIILKAGAENMVATPLASTSNSLNGDALTFTTTFTLQDVSNDFEINIEVYSLVQKKDPSGLDKKKKTSKSKAITPKRLLTSITTKSNIHSSVMASPGGLSAVRTSNFALVGSYTLSLSSVGNTKFVLDKVPFLSSLEGHIYLKIKCQVNSSVEERGFLTIFEDVSGFGAWHRRWCVLSGNCISYWTYPDDEKRKNPIGRINLANCTSRQIEPANREFCARRNTFELITVRPQREDDRETLVSQCRDTLCVTKNWLSADTKEERDLWMQKLNQVLVDIRLWQPDACYKPIGKP

SEQ ID NO: 17606 - DNA, 2623 bp, Homo sapiens
  CDS (385)..(1620)
gtgaacgggttgtgggacctgtcgctgtgtgggggctgtcgagcactccccagaacgtaacaaatcctcaggggaactgatgggcggtcgcgcgggcactgggtcctccacaccctggagagccgttttccgttgccactcggctctggccggggtcacattctgcagcatgtctgttcattcccctgggcggggccctgcaccgactccagcccagcccctgctccctctgcggggaacgtggccccaggcagtgctgggccattggctgtcagtgctggtcctggcggctgcattcccagtccccttggtctctgtgacagtgggcggggccggccctcccaggatctgacggcgcaggtcctccccttctgtgtcctgcagatggacacccgctccgggagccagtgttccgtcaccccagaagccatactcaataatgaaaagctggtcttgccgccccgcatctccagagtgaacggctggtcgttacccctgcactacttccaggtggtgacctgggctgtcttcgtgggcctttcctcggccaccttcgggatcttcattcccttcctgcctcacgcgtggaaatacattgcctacgtggtgaccggggggatcttctcgttccacctcgtcgtccacctgatcgcgtcctgcatcgacccggccgactccaatgtcagactcatgaagaactattctcagcccatgcccctcttcgacagatcaaaacatgcacacgtgatccagaatcagttctgccacctgtgcaaggtcaccgtgaacaagaaaaccaaacactgcatttcctgcaataagtgtgtgtccggcttcgaccaccactgcaaatggatcaacaactgcgtgggaagccggaattattggttcttcttcagcactgtggcctcggccacagctggcatgctctgcctgatcgccatcctgctgtatgtcctcgtccagtacctcgtgaaccccggggtgctccgcacggaccccaggtatgaagatgtcaagaatatgaacacgtggctgctgttcctccccctgttcccggtgcaggtgcagaccctgatagtcgtgatcatcgggatgctcgtgctcctgctggactttcttggcttggtgcacctgggccagctgctcatcttccacatctacctgaaggccaagaagatgaccacctttgagtatctcattaataaccgcaaagaagagagttcaaaacatcaagcagtgaggaaagatccatacgtgcaaatggacaaaggagttctccagcaaggagctggcgccctgggctcatctgcacagggagtcaaagccaagagctccctgctgattcacaagcacttatgtcacttctgcacttcagtaaaccaggatggggattcgacggcacgggaaggggatgaagacccgtgtccatctgcacttggagccaaggccaggaactcccggctgatttgcaggcgcctgtgtcagttctccactcgtgtacacccagacgggggctcgatggcacaggaagcagatgatgccccgagtatatctacacttgggctgcaacaagaaacaacagagcccatgaaaactgacagtgctgaaagtgaagactgagattcaggagctcaggtgcccctgtgatccaggtcttctaccctgaaaccccaccctccatcaaggtcctgcctgtagagtctaccttgcaaagcctcctgctcctacccatgctacaggccaggaaccagagcccatcatctcagaggcccctggatgtccttcgaaggaaccaggaccctcagagcccagcatccatctctgtcatcatcttcatcacacccaaagaagagccagccttgcaggagggtttacatctccaggaagatgggctgccagcaactgcagaggatgcagccacctgcttaactgtgctgtccagccagccagccagctgcagggcctcttgctgcttaagagctgatgggccgggcatgttggctcacacctgtgagcacagtactgggaaatgggagcacagtactaggaaatgggagcacagtactgggaaatgggagcacagtactgggaaatgggggctcacagcactgcaaaatgggagcacagtattgggaaatgggagcacagtactgggaagtgggagcacagtactgagaagtgggagcacagtactgagaaatgggagtacactactgagaaatgggagcacagtactgggaaatgggcatacagtactgggaaatgggcatacagtactgagaaatgggagcacagtactgggaaatgggagcacagtactgggaaatgggagcccacagtactgggaaaggggagttcacagtactcggaaatgggagcatagtactgggaaatgggagcacagtactgggaaatgggagcatagtactgggaaaccccagacctggattctgagtttttcagcctagcccagacttcttatcttagtagacaaaaagagtcaataccagagaaccagaggcatcctctgtattttaatgaactctgcattttaatctgtttagtagtcattttttaaaagataatcagttttccaaatatatctataagttactacgtg

SEQ ID NO: 17607 - protein, 412 aa, Homo sapiens
MDTRSGSQCSVTPEAILNNEKLVLPPRISRVNGWSLPLHYFQVVTWAVFVGLSSATFGIFIPFLPHAWKYIAYVVTGGIFSFHLVVHLIASCIDPADSNVRLMKNYSQPMPLFDRSKHAHVIQNQFCHLCKVTVNKKTKHCISCNKCVSGFDHHCKWINNCVGSRNYWFFFSTVASATAGMLCLIAILLYVLVQYLVNPGVLRTDPRYEDVKNMNTWLLFLPLFPVQVQTLIVVIIGMLVLLLDFLGLVHLGQLLIFHIYLKAKKMTTFEYLINNRKEESSKHQAVRKDPYVQMDKGVLQQGAGALGSSAQGVKAKSSLLIHKHLCHFCTSVNQDGDSTAREGDEDPCPSALGAKARNSRLICRRLCQFSTRVHPDGGSMAQEADDAPSISTLGLQQETTEPMKTDSAESED

SEQ ID NO: 17608 - DNA, 2250 bp, Homo sapiens
  CDS (84)..(878)
gagggcgcttccggcacagcggaactccgggtgccggttgaggttgctggtgggcctgctctggtggtcttggatgaggccccatgagcgcggcgcccctggtgggctacagcagcagcggctccgaggatgagtccgaggacgggatgcggaccaggccgggggatgggagccaccgtcgtggccagagcccccttcccaggcagagatttccagtacctgacagtgtgctgaacatgttcccgggcaccgaggaggggcctgaagatgacagcacaaaacacgggggacgggtgcgcaccttcccccacgagcgaggcaactgggccacccacgtctatgtaccatatgaagccaaggaggagttcctggatctgcttgatgtgttgctgccccatgcccagacatatgtcccccggctggtaaggatgaaggtgttccacctcagcctgtcccagagtgtggttctgcgccaccactggatcctccccttcgtgcaggctctgaaagcccgtatgacctccttccacagattcttctttactgccaaccaggtaaagatttacaccaatcaagagaaaaccaggacctttattgggcttgaggtcacttcagggcatgcccagttcctggacctggtttcagaggtggacagagtcatggaggaattcaacctcaccactttctaccaggatccttctttccaccccagcctggcctggtgtgtgggtgatgcacgtctccagctggaggggcagtgcctgcaggaactacaggcaatcgtggatgggtttgaagatgctgaggtgctgctgcgcgtgcacactgagcaagtccgctgcaagtctgggaacaagttcttctcgatgcctttgaagtgagcaccagaggccttcctcctccagggccctctgcagaccaggctgagatggaggaacctgctaaaatcgatggagatgcttctagcctcccagtaggaggccccagccatgccttcaacctggcaggaggtgtagccactcctcatcctccctgagtgctgatattctctctctctctttctcttcctcttctttctctctcttctcctctctttctctcctctgtctctcttcctctcctctcttcctctcttctctcttcctctcctctctctcttcctcttctctctcttcccctcctgtctctcctcccctcctctctctcttcctctcctctctcttcctctcctctctctacccctcctgtctctcctcccctcctctctcttcctctcctctctctcttcctctcctctctcttcccttcctgtctctcttcccctcctctctctcttcctgtcctctatctcttcccctcctctatctcttcctctcctctctctcttcctctcctctctctctcttgctttcttctctctctcctgtctcggctgttgtgggttgcaggttgggtgctgctgttgtggtccttcccagaaactgccagtagagggcagcctgggcatcctaatgcttactctggttgttacacaaagaaaatattggggtcactggcgagcccacccacactcaccagaatctccactgtagtccccctaacaaacagcccttcacttcctctcccacttcagcaatttgtattttgatgccattggcctcagatcagagtgttttaaatcatcacgccctggcttatccctggtcgagccaggacacggggtgcttcagtgggtctgtcaccctctctccttgaagcatgttgcttttatttatttacttttactctcaccctgctcctgtaccagcaggggccacttcaaagccaaggtacagggtgataacttgtggtccagcatcagttttctccacttctttctcccactcacccccagcaaggtgcctggggagacttgagcagatgtttcattttggcctggccagtggctgaaagccaggcctccaatgcactgtgacctctggcttccccagcagctttcccagagaggcagaggggccttccacagcccgggttctcctgctgcctcctgcctgctgcagctgcaggcattctgaggggcaacgtggaggaagggccagggatgcatgggattttaattgtttcatcacaccttccccgtggcaaagaaacagtcagtcctcttcaggtgtcttctggatttctggtgatggacagagaaatctttttacagtttcaaattatgttcaacaaataaaaattgcatttttt

SEQ ID NO: 17609 - protein, 265 aa, Homo sapiens
MSAAPLVGYSSSGSEDESEDGMRTRPGDGSHRRGQSPLPRQRFPVPDSVLNMFPGTEEGPEDDSTKHGGRVRTFPHERGNWATHVYVPYEAKEEFLDLLDVLLPHAQTYVPRLVRMKVFHLSLSQSVVLRHHWILPFVQALKARMTSFHRFFFTANQVKIYTNQEKTRTFIGLEVTSGHAQFLDLVSEVDRVMEEFNLTTFYQDPSFHPSLAWCVGDARLQLEGQCLQELQAIVDGFEDAEVLLRVHTEQVRCKSGNKFFSMPLK

SEQ ID NO: 17610 - DNA, 2645 bp, Homo sapiens
  CDS (73)..(2058)
aagttatgctgaagaccgaagcaagagctggttcaggtggcagccacagcagcctcagggacctcagcaactatggcctcctgcccagactctgataatagctgggtgcttgctggctccgagagcctgccagtggagacactgggcccggcatccaggatggacccagaatctgagagagccctgcaggcccctcacagcccctccaagacagatgggaaagaattagctgggaccatggatggagaagggacgctcttccagactgaaagccctcagtctggcagcattctaacagaggagactgaggtcaagggcaccctggaaggtgatgtttgtggtgtggagcctcctggcccaggagacacagtagtccagggagacctgcaggagaccaccgtggtgacaggcctgggaccagacacacaggacctggaaggccagagccctccacagagcctgccttcaacccccaaagcagcttggatcagggaggagggccgctgctccagcagtgacgatgacaccgacgtggacatggagggtctgcggagacggcggggccgggaggccggcccacctcagcccatggtgcccctggctgtggagaaccaggctgggggtgagggtgcaggcggggagctgggcatctccctcaacatgtgcctccttggggccctggttctgcttggcctgggggtcctcctcttctcaggtggcctctcagagtctgagactgggcccatggaggaagtggagcggcaggtcctcccagaccccgaggtgctggaagctgtgggggacaggcaggatgggctaagggaacagctgcaggccccagtgcctcctgacagtgtccccagcctgcaaaacataggtcttctgctggacaagctggccaaggagaaccaggacatccggctgctgcaggcccagctgcaggcccaaaaggaagagcttcagagcctgatgcaccagcccaaagggctagaggaggagaatgcccagctccggggggctctgcagcagggcgaagccttccagcgggctctggagtcagagctgcagcagctgcgggcccggctccaggggctggaggccgactgtgtccggggcccagatggggtgtgcctcagtggggatagaggcccacagggtgacaaggccatcagggagcaaggccccagggagcaggagccagaactcagcttcctgaagcagaaggaacagctggaggctgaggcacaggcattaaggcaagagttagagaggcagcgacggctgctggggtctgtacagcaggatctggagaggagcttgcaggatgccagccgcggggacccagctcatgctggcttggctgagctgggccacagattggcccagaaactgcagggcctggagaactggggccaggaccctggggtctctgccaatgcctcaaaggcctggcaccagaagtcccacttccagaattctagggagtggagtggaaaggaaaagtggtgggatgggcagagagaccggaaggctgagcactggaaacataagaaggaagaatctggccgggaaaggaagaagaactggggaggtcaggaggacagggagccagcaggaaggtggaaggagggcaggccaagggtggaggagtcggggagcaagaaggagggcaagcgacagggcccgaaggaacccccaaggaaaagtggtagcttccactcctctggagaaaagcagaagcaacctcggtggagggaagggaccaaggagctacccctctcacctgctttctttggtgaggatggcatcttccgtcatgaccgcctccgcttccgggattttgtggatgccctggaggacagcttggaggaggtggctgtgcaacagacaggtgatgatgatgaagtagatgactttgaggacttcatcttcagccacttctttggagacaaagcactgaagaagaggtcagggaagaaggacaagcactcacagagcccaagagctgcggggcccagggaggggcacagccatagccaccaccaccaccaccggggctgacaccctgccccacagggaatggccttggcctggcccagcccaagatcccagcgttatctaactcctggagggtggactctgtcctggcttgtttggtgtcctcagatatctttcacacagtagagcaaaatcaccagccctgcactgatgtcactttatgtagaaaaaggccttagctggacctgtgttgccgtctatgcaaatgcatgcaaatactccaggccctgggatgtgggcttgtgttttgtcactgtgaagggggagatgggagaggagcctgttttggggtggggtctggggaaggcaatctgattctgaagctaaagagctttcatcctcttgagtgtatgtccccatagtgggccccttgacccacatgctgaccggtgccttgggatttgactagggttgctggctcgaggcccagcacgaggacttaccctggggttttgttaggtttggaagcagctgtccctagggggtgaagtcccccccctttttttttttttacccctgcttctcccacggcttcacctccctatgtgaactgtagactcagatcccaataaagtgctgttgcagct

SEQ ID NO: 17611 - protein, 662 aa, Homo sapiens [sequence omitted]

SEQ ID NO: 17612 - DNA, 2636 bp, Homo sapiens
  CDS (11)..(979)
acagtgggccatggagttcccgttcgatgtggacgcgctgttcccggagcggatcacggtgctggaccagcacctgaggcccccagcccgccgacccggaaccacaacgccggcccgtgttgatctacagcagcaaattatgaccattatagatgaactgggcaaggcttctgccaaggcccagaatctttccgctcctatcactagtgcatcaaggatgcagagtaaccgccatgttgtttatattctcaaggacagttcagcccgaccggctggaaaaggagccattattggtttcatcaaagttggatacaagaagctctttgtactggatgatcgtgaggctcataatgaggtagaaccactttgcatcctggacttttacatccatgagtctgtgcaacgccatggccatgggcgagaactcttccagtatatgttgcagaaggagcgagtggaaccgcaccaactggcaattgaccgaccctctcagaagctgctgaaattcctgaataagcactacaatctggagaccacagtcccacaggtgaacaactttgtgatctttgaaggcttctttgcccatcaacatcggccccctgctccctctctgagggcaactcgacactctcgtgctgctgcagtcgatcccacgcccgctgctccagcaaggaagctgccacccaagagagcagagggagacatcaagccatactcctctagtgaccgagaatttctgaaggtagctgtggagcctccttggcccctaaacagggcccctcgccgcgccacacctccagcccacccacccccccgctccagcagcctgggaaactcaccagaacgaggtcccctccgcccctttgtgccagagcaggagctgctgcgttccttgcgcctctgccccccacaccctaccgcccgccttctgttggctgctgaccctgggggcagcccagctcaacgtcgtcgcaccaggtaataggagttgaagggctaaggagcctcacagctataaaagaggatgttagaaatggcaaagggcaatttgaatccatcagagagatggatcaataagatgggtggcttggggggggtcctgaaacctttcaagaaaaatatttgtgcaagtgatctgggaaaaaaatgcagtgaaggagcagaataggaccttatatggagcctagggaccctggctttaatgtgagagttatgtggaatggtaggaagaacaccgagatccatcgagttgggggaacagagccttctaagattgggaaaatcttcgcttaatacttgctggggaaggggcagtgtctgacagagagtgggaagccactggcttgtgtgccaagagtccatcgcagcaggcagggagtgggcatttcctttatttctctccctttctcttcacctctgacttctctgtttttctctcccccgccccccgccatttcccatctcccttcctcccatccataacatccttccacagctcccttccccgctctgaggagagtcgatactaacagctaccctatccctgccctgggagacctggggtgggcagggaacccctccctgaggacctcagaccctctcttccattgcatcctgtaggacccagtggaacctgacagagcccataggattccctcttctactttcttagacagcagggatgtcagggtctcaaactgcctaacactttgtagcttttcttaacacaaaagcaccccttctctcctaacttgggctctgaatactttcccaacaggaagtctgatctgttgccagacttcttggttagatggctcatacatttatctagagaagcacactcttgcttgctgtcaaactttagaacaccatggaaggtctaagggcatcctgtgccagggaaactttttaaggaattttatctatgggataaaccccatattccctctagtgtctactggtggctctaatactgctttgtgctgcctgccacacttgccctttgagcctgcgaatggccgctagtgagcaagctctgcttcagagcagtctagttaggtagaacagggacttaccagcttcccaaagggatctactcaccattgccaaactcttcatttccacattttgtgtaggtgtcagggaaccccaaactggtgttgctttggggtctctaaaggagattggctgacaccaccatttcccccagatcctgattctctgggggaggttgtttcttgagagtagatccagagtgtcaaggatctgttagatcctggaatcccttcttgcatccatccctccctggtagctaggtcccgatatactcctgtcttgtgagattgtcgagatgagatgggggaccactcttcctctgtccttcctctctcctttcctccatagcaaggacgaccttccctgctccatgcccagagtatagctagatcccttcccctccctaccctctgaatgtgtgctagatcaggtgccccactgtgtttcctgaaatccttgggagccggatctccccatctcccctactcactcttcccttttcttctctcagtgttgtctgaataaagtgtgaaatcttttgtgttttctaaattgacattttcaatgaaaaaaagaatcac

SEQ ID NO: 17613 - protein, 323 aa, Homo sapiens
MEFPFDVDALFPERITVLDQHLRPPARRPGTTTPARVDLQQQIMTIIDELGKASAKAQNLSAPITSASRMQSNRHVVYILKDSSARPAGKGAIIGFIKVGYKKLFVLDDREAHNEVEPLCILDFYIHESVQRHGHGRELFQYMLQKERVEPHQLAIDRPSQKLLKFLNKHYNLETTVPQVNNFVIFEGFFAHQHRPPAPSLRATRHSRAAAVDPTPAAPARKLPPKRAEGDIKPYSSSDREFLKVAVEPPWPLNRAPRRATPPAHPPPRSSSLGNSPERGPLRPFVPEQELLRSLRLCPPHPTARLLLAADPGGSPAQRRRTR

SEQ ID NO: 17614 - DNA, 2314 bp, Homo sapiens
  CDS (69)..(1379)
ctctgcccggctccagccagcgtctgccgccgccgtagctgccccaggctccccgccccgctgccgagatggcgacgcgctcctgtcgggagaaggctcagaagctgaacgagcagcaccagctcatcctatccaagcttctgagggaggaggacaacaagtactgcgccgactgcgaggccaaaggtcctcgatgggcttcctggaatattggtgtgtttatttgcatcagatgtgctggaattcatagaaaccttggggttcatatatccagggtcaaatcagtcaacctagaccaatggacagcagaacagatacagtgcatgcaagatatgggaaatactaaagcaagactactctatgaagccaatcttccagagaactttcgaagaccacagacagatcaagcagtggaatttttcatcagagataaatatgaaaagaagaaatactacgataaaaatgccatagctattacaaataaagaaaaggaaaaaaaaaaggaagagaaaaagagagaaaaggagccagaaaagccggcaaaaccacttacagctgaaaagctgcagaagaaagatcagcaactggagcctaaaaaaagtaccagccctaaaaaagctgcggagcccactgtggatcttttaggacttgatggccctgctgtggcaccagtgaccaacgggaacacaacggtgccacccctgaacgatgatctggacatctttggaccgatgatttctaatcccttacctgcaactgtcatgcccccagctcaggggacaccctctgcaccagcagctgcaaccctgtctacagtaacatctggggatctagatttattcactgagcaaactacaaaatcagaagaagtggcaaagaaacaactttccaaagactccatcttatctctgtatggcacaggaaccattcaacagcaaagtactcctggtgtatttatgggacccacaaatataccatttacctcacaagcaccagctgcatttcagggctttccatcgatgggcgtgcctgtgcctgcagctcctggccttataggaaatgtgatgggacagagtccaagcatgatggtgggcatgcccatgcccaatgggtttatgggaaatgcacaaactggtgtgatgccacttcctcagaacgttgttggcccccaaggaggaatggtgggacaaatgggtgcaccccagagtaagtttggcctgccgcaagctcagcagccccagtggagcctctcacagataatgcagaagggtgatgctgttctccagcactccatcatcagtgcaatctactggccaacgacaaggtggttaaaatgtcctttagtagatgaatcagcagatggctggcatgagtatcagtagagcaacccctactgcaggttttggccagccctccagcacaacagcaggatggtctggaagctcatcaggtcagactctcagcacacaactgtggaaatgaaaactgcaatacaagtttcatccagaactaccacctgacattccttgctgaaacgcatctagttcccctgtttattcatatgcatattttttttctttttacccatttgttcatattaagaatgatctgattgaccgtgttggtctgtactgattcaatttgatgtggtgaaaagcaggttgataaatcattttatgtcaagggcagctttgctcatatttcccatgatttcatgtactgcattatttgagaagctgctcaacttgcaaaatcagttttcctctcaataaaattatagctctaatgtttgcatataagggaagtagttatcatgttagtaatacctctaatagtataaaccccaccccaaaattagccagtaatcctgtaggaaggtactgtatgatcaaatgtttaatcatataaatagaatgtaaatgtctcactgagcactgttttctagtgtatcaaaatgctcttatttcatcattcacttcactgtgctgttgttatgatgtgcttaacagggaacgtgattagtgaaaggaagataaacgtggatgttactccaaaacttcgtttaatgaatgcttaaagaattcaaattttatctgcctctcttgtaatttggatctcttcttaatgtacatagtgctaacatgaagacctttttctgcactatatgcaaacagggtaactaactaaaacaaagccactttcaatcttcaatccttgaaggtatatctaggtttatgacagtaattgtgtttacattttatggtgcctagtattgacaaaatgttatttccctacattaaacatgactccatag

SEQ ID NO: 17615 - protein, 437 aa, Homo sapiens
MATRSCREKAQKLNEQHQLILSKLLREEDNKYCADCEAKGPRWASWNIGVFICIRCAGIHRNLGVHISRVKSVNLDQWTAEQIQCMQDMGNTKARLLYEANLPENFRRPQTDQAVEFFIRDKYEKKKYYDKNAIAITNKEKEKKKEEKKREKEPEKPAKPLTAEKLQKKDQQLEPKKSTSPKKAAEPTVDLLGLDGPAVAPVTNGNTTVPPLNDDLDIFGPMISNPLPATVMPPAQGTPSAPAAATLSTVTSGDLDLFTEQTTKSEEVAKKQLSKDSILSLYGTGTIQQQSTPGVFMGPTNIPFTSQAPAAFQGFPSMGVPVPAAPGLIGNVMGQSPSMMVGMPMPNGFMGNAQTGVMPLPQNVVGPQGGMVGQMGAPQSKFGLPQAQQPQWSLSQIMQKGDAVLQHSIISAIYWPTTRWLKCPLVDESADGWHEYQ

SEQ ID NO: 17616 - DNA, 2407 bp, Homo sapiens
  CDS (1050)..(1436)
ttttactcatgctcagcgaaggctggttcctggtcccctgggctgtgtagacccggtgtcccaccaggctccaggctcccaccatctacagaggggcttacagcgcccattctggtcttggggaacccatcacaaaataggctttttctgctccccgattctggtgtagttctaagtacacagtgatgtcctctgtaggggcgtgcctgtggtggaacataacgcagttacaaaagaaagggcaggtgaggcctgggtaaccccagccatggaccgtcagtggctggagggagcttcgtgtctgtgctggagctgcagcctgctcgccatctggaggctcagtggagtggggagttggggttctcataccagcagatttccctagagcgtgattctcccatctgaggcaatcttgcctcccaggggaaattttgcaatgtttggaggatgttgtcacagctagtagcgggtgctctgggatctggtggatagatgccaaggatgctgtcaagcatactatactgcccagaacagtggcccatagcagggacctgccctatcaaaatatcaggtgtatggaggtggagtcccaacgctagagcagcccttctcagctccaccctgcccggggagggaggaggagctctggtttcagagcagtgccgggattgcctttccccaggatctgtgtcggccatccaggaagaactgtactggccaagcctgggaccacacgtctgcagagatcctgctctgctggcctgagccccaggccttggcctcctgtgcttgggtaaccatggccactgggaaaagcaaggaccgtgtttgactttcttggagaggtgaaagaggtgaaagaacaagttgtgtgctagaaaacttttgaggaattcttatttgtgttagagcagaggaggtcccagataccaagtggcgcctcccaggaaaggctgggagaagaggtggcctggagtaccccgagatcccagcagcgcacacagtggagggatgaggatggatgggtcctaacccctgattttgatgggatgtgttcatgtcctatctcctctcctggacacattaaggggttgggacaagaagagactcctgtgagatcagcagacctcgtgtttaaggagagaatgcctgcctgcaacactcatggagagggacacttcctggccccacctgctaaatacctccaaactctgggcaggcgcctgcattctcaacacaggacttcccttaacagtttccggatcagtgaccaccaccacgttcaggtttctgaatgcagacccaccacgagggatggattccacccgcccgccctgctgcagatacatgcggcacagcaggcacgtgcctggagagaacagctcctgagcacagcacccttggagccccaccccgctcacgatcctcaccagtgctgatgatgccgtcatgctgctggcctgagacagtatcccagctacaacaggacgacaccgggttcaggaatatgtggctatcaccttgagcactgacagtggccttccaggctagttgccttccaaacgcaggtagccgacctgcaggagggcctacaaacgggcccagcaagagctgggcaacagctggcttgtgaaatgagacaccttgaccaatatgctttgggtggacggtctcctacatgttcagtggaggccaccaggagcatccatgagcggggaaggggtccacacccttacatggcaagttgatacgatggggtgcttggtggatgggccatggaggtccgtgagctggaactgggcacacgccatcccagagggctcaggatgccccaggaaggaaagaagggcaacagactacacgattggacgtgtgtggttgactgggatgaagttggagggaggggcagggccttgcaggggattggtactgatcccagggaggaagtgttggggcttcatgaactaggatgaaaggaggcccctgagccatgacaaggggcacatccaggatttccgccaccctgaatttagtagagctagtaggccctggtcgtcactctgggcagggatgccgtcagccttgagggtcgccacccacctgtgtgttgccctctgtcctggcggggaaacatacaccccttgtctcaccaccaaccttgcttgtgtagtcagcagggctggccctgccccaaggactcactgcatgtacccggacccctaggcctggcctttgcagcatagttgggagcttctggattccatctgcacctgtgagccccatgctggctgtgcactgcgcgggcctgagactgctggatacaatgttgggcaacaactcagccagcctgatggcagcctcagaggcttactctaacccatcccagaataaatggagacttcatgtg

SEQ ID NO: 17617 - protein, 129 aa, Homo sapiens
MCSCPISSPGHIKGLGQEETPVRSADLVFKERMPACNTHGEGHFLAPPAKYLQTLGRRLHSQHRTSLNSFRISDHHHVQVSECRPTTRDGFHPPALLQIHAAQQARAWREQLLSTAPLEPHPAHDPHQC

SEQ ID NO: 17618 - DNA, 3533 bp, Homo sapiens
  CDS (500)..(1099)
gagagggcacggggaaaaggtggctctggccggggtggctcggtttcctggggctatgtaactgagctcgtcgacttaggggtccttcttcgctgccctcgccgcgtgctagcagggagtttccgctcgggagagagactgtcctcacgcccgctgcgcctcctcgacggcagagcaggcttgctcgcccgtgggagcgtcccggccgagaagccctgaggggggaggggaggccattttgtcccgaccgactccccggaaccgggcggagcggctgggagaggctgcggagccgcggtcgccgccctcggaggcactggacgccgccactgtcggggcttcctcaaagctgttcgtaggtcgcccgcgccgtctcgagcctttttcccacgcttccccggtcctccggcctgagaacgcccgagtgaggagttggccgtagtgagagggaccgatcccttggggccgccggcggcgagagcccgagccgctcctcccaatggcgaagaagacgtacgacctgcttttcaagctgctcctgatcggggattccggagtggggaagacctgcgtcctttttcgtttttcggatgatgccttcaatactacctttatttccaccataggaatagacttcaagatcaaaacagttgaattacaaggaaagaagatcaagctacagatatgggatacagcaggccaggagcgatttcacaccatcacaacctcctactacagaggcgcaatgggtatcatgctagtatatgacatcaccaatggtaaaagttttgaaaacatcagcaaatggcttagaaacatagatgagcatgccaatgaagatgtggaaagaatgttactaggaaacaagtgtgatatggacgacaaaagagttgtacctaaaggaaaaggagaacagattgcaagggagcatggtattaggttttttgagactagtgcaaaagcaaatataaacatcgaaaaggcgttcctcacgttagctgaagatatccttcgaaagacccctgtaaaagagcccaacagtgaaaatgtagatatcagcagtggaggaggcgtgacaggctggaagagcaaatgctgctgagcattctcctgttccatcagttgccatccactaccccgttttctcttcttgctgcaaaataaaccactctgtccatttttaactctaaacagatatttttgtttctcatcttaactatccaagccacctattttatttgttctttcatctgtgactgcttgctgactttatcataattttcttcaaacaaaaaaatgtatagaaaaatcatgtctgtgacttcatttttaaatgtacttgctcagctcaactgcatttcagttgtattatagtccagttcttatcaacattaaaacctatagcaatcatttcaaatctattctgcaaattgtataagaataaagttagaattaacaattttattttgtacaacagtggaattttctgtcatggataatgtgcttgagtccctataatctatagacatgtgatagcaaaagaaacaaacaaaagccaggaaaacactcattttcgccttgaatatgtaaatgggattaatattgtcctgtgccttatgtggaaaggaacttctttggttttccttttttgttctggtggaagcatgtgcaggagacatatcatccaaacataaaccattaaaatgtttgtggtttgcttggctgtaattttcaaagtagttaattgaggacaaagggtaatgcagaagtgatagctttggtttgctgagtcttgttttaagtggccttgatatttaaaactattcctgccaccatttcttctccttggccacttcttccttgcgtctccctgcatgctgctttatttgcttctccctccccaaccacctcatggtatatttaagagtgaaagggacaaactagtaggtttgtcaagtttaatataaagcactgatgtaacttgctaggtaaacggaaagataagttctaactgcctactatccaatgtcagttaattggtgtcttcccccctcatttgctctcttccctaaaatgtgtcccagatgccttcatttgctgttttacttctatgttctgcttttcctcctctctttgttcccttcctgtctatccattgagtttatgaaatggaagagttaactgcatgcactagtgtttggagggtgttgtggtttgtctttctaattaggtgtatagcctattcactttcctagaataaatctcttaacctaaatttgagtagtctgcattttggcaactcctctagcagcttggtagcctagtacaggttgtttttttaaaaaaggaaaagcaggaaggaggagtgaattttattaacatgtttgccaaatgtattgagatttggcctctgaagaacactttttcagtgttaagtttctttaccttaagattcagaaatactttagaatattattaattttaagtcctgtctttacatccttttggaaaacttgtattaccatgagtttggaaaaaggacaacaaaaggcttttcatgtaaagataagatctttagctatctctaaccctgtccttttttcactgcattttttctagttttgcttcattgcttatcattaggatagggtaagtgaagtttgctatgctgctagcatcctaagatgatacctttgttgaaagaattgtgaatagcatgattcatttctagcagaggctgagtttaggacagcagcttccattgagaagtctttctgtgtcgtgaatagcattttaatgacctcttggctcacataagcaaacaacatagggacgtatctgctatgaaaatccacaaatttttcagatagtgccctaaaaacaattttatatacctcactggttgttattcttaggttattcccacacttgactttatcattgtttactactagtaaaaagcagcattgccgaataatccctaattttccactaaaaatataatgaaatgatgttaagctttttgaaaagtttaggtaaacctactgttgttagattaatgtatttgttgcttccctttatctggaatgtggcattagcttttttattttaaccctctttaattcttattcaattccatgacttaaggttggagagctaaacactgggatttttggataacagactgacagttttgcataattataatcggcattgtacatagaaaggatatggctaccttttgttaaatctgcactttctaaatatcaaaaaagggaaatgaagtataaatcaatttttgtataatctgtttgaaacatgagttttatttgcttaatattagggctttgccccttttctgtaagtctcttgggatcctgtgtagaagctgttctcattaaacaccaaacagttaagtccattctctggtactagctacaaattcggtttcatattctacttaacaatttaaataaactgaaatatttctagatggtctacttctgttcatataaaaacaaaacttgatttcc

SEQ ID NO: 17619 - protein, 200 aa, Homo sapiens
MAKKTYDLLFKLLLIGDSGVGKTCVLFRFSDDAFNTTFISTIGIDFKIKTVELQGKKIKLQIWDTAGQERFHTITTSYYRGAMGIMLVYDITNGKSFENISKWLRNIDEHANEDVERMLLGNKCDMDDKRVVPKGKGEQIAREHGIRFFETSAKANINIEKAFLTLAEDILRKTPVKEPNSENVDISSGGGVTGWKSKCC

SEQ ID NO: 17620 - DNA, 1877 bp, Homo sapiens
  CDS (210)..(1469)
agagagacgcctctaggggcagaggccctgggaggcaaagacccccaggagagatttacccaccccagacggaaagcgcggctcagagtcggacgaggggagactgtcagaggacaacgccccctaggtctcctgggagaccccgaagcgaccccgggggcagcccgggccgtgtccgggcgagggtgacctatccttggttgagagcgatggggacacaagccctgcagggcttcctctttctcctcttcctcccgctgctgcagccgcgtggggcctcggctgggagcctgcacagtccaggcctgtccgaatgcttccaggtgaatggggctgactaccgcggccaccagaaccgcactggcccgcgcggggcgggccgcccgtgcctcttctgggaccagacgcagcaacacagctacagcagcgccagcgacccccacggccgctgggggctgggcgcgcacaacttctgccgtaacccagacggtgacgtgcagccgtggtgctacgtggctgagacagaggagggcatctactggcgctactgcgacatcccctcctgtcacatgccaggctacctgggatgctttgtggactcaggggcacccccagccctcagcggccccagcggcacctccacgaagctcacggtccaggtgtgcctacgcttctgccgcatgaaggggtaccagctggcgggcgtggaggccggttacgcctgcttctgtggctctgaaagcgacctggcccggggacgcctggcccccgccaccgactgtgaccagatctgtttcggccaccctggacagctgtgtggcggcgatgggcggctgggcgtctatgaagtgtcggtgggctcctgccaggggaactggacagcgcctcagggcgtcatctactccccggacttcccggacgagtacgggccggaccggaactgcagctgggccctgggcccgccaggcgccgcgctggagctcaccttccgcctcttcgagctggccgacccgcgcgaccggctggagctgcgcgacgcggcttcgggcagcctgctccgcgccttcgatggcgcccgcccaccgccgtccgggccgctgcgcctgggcactgccgcgctgctgctcaccttccgaagcgacgcgcgcggccacgcgcaaggcttcgcgctcacctaccgcgggctgcaggacgccgctgaggacccagaggcccccgagggctcggcccagacccccgcggcgcccctcgacggggccaacgtgagctgcagccccaggcctggggctccgccggccgcgattgggggagctgtctgctggctccgggaaaagggcccccggcgctgggggcttccaggggccccaggagaagctgggctgtgtggtaccaacagccccgaggggtggccttgccctgctcccccggggacccccaggctgagggttctgccgcgggctaccggcctctgagtgcctccagccagagctccctgcgctcgctcatctccgctctctgactctgggccccgagggtccgctgggcccgccgccggcgagatggacacctgagatgctgtgctgcgccctgcctcggccttgcgcctgtgtaggggcagctcggcctctggtcgccttggggagaccaaaagtcggacaggaaacatctggtgctattatctgggacttggcctgaccgtgggggtccagatggtccaggccctctccatggacctgtatgtgggggtggtctctggtttcggaggtctttgaacccctctgggggtggtcctggactgccgtcctcagtgagaggtcacaggtcagcaaaaacagtcaaaaaacccccacagattttgaataaaggatctactttgg

SEQ ID NO: 17621 - protein, 420 aa, Homo sapiens
MGTQALQGFLFLLFLPLLQPRGASAGSLHSPGLSECFQVNGADYRGHQNRTGPRGAGRPCLFWDQTQQHSYSSASDPHGRWGLGAHNFCRNPDGDVQPWCYVAETEEGIYWRYCDIPSCHMPGYLGCFVDSGAPPALSGPSGTSTKLTVQVCLRFCRMKGYQLAGVEAGYACFCGSESDLARGRLAPATDCDQICFGHPGQLCGGDGRLGVYEVSVGSCQGNWTAPQGVIYSPDFPDEYGPDRNCSWALGPPGAALELTFRLFELADPRDRLELRDAASGSLLRAFDGARPPPSGPLRLGTAALLLTFRSDARGHAQGFALTYRGLQDAAEDPEAPEGSAQTPAAPLDGANVSCSPRPGAPPAAIGGAVCWLREKGPRRWGLPGAPGEAGLCGTNSPEGWPCPAPPGTPRLRVLPRATGL

SEQ ID NO: 17622 - DNA, 2318 bp, Homo sapiens
  CDS (379)..(762)
ctggtaaagcagcggccagggggagccgtgagtgaggcgctgcctctcccgctgaagcgggttccaaggccaccgtgagggggaccatccatccaggagagtactgggcaggctgcaaatgtctgtgttaaaacagctctgctgggctaagacaggacagaagcagacagcaggtggatgagacacaatttcctatccagcagaacctgcagcaagctccacagcaccctccatgggctcagtcttgctcccgggaagatggttaattccatcagctccttctggccggcagcaggaagagtggccctgtgtgtgccaggccctgcagtctctcctctcagctggtgtctccagtgagggacctgagtcatcgcacacatgagcctgtgctcagcctgcacatctcccgcctcccaccagctgctcctcaactgccagggccagactgtggcaaaatctcactcctctgccgatgctggggtttccctcgtgtctgggaggtggtgtgcttggtggcctgagcactgcagtgaatccatgtttccctcccagcaccctgttctgtcctccaacttggccgacagctctggccagggacgcagcccagctggtgcccaccccgcactctgtccatttcataagagcccttggtttcctcacttccctcagattttgccaagagaatggtcctggtgtggcccagaaaggccagcggggtgcagcctgggactgaaagcagaggcggctctggtggggaaaaagtagctctcccagcctagccctactggtgggcggcacctcctggctccaggccatcttttgtcccagtcctaggtaagaaaaacacaaacaaaagccagtcccatggcactcgagaagcaggaggccgttccctgacagcaacatgctgtgtgcacagacacacgggtggacaggaggcagagctcggggttgctgcggagcgggcaggacactggagcggcaggcagtgcggacccgccgggcagccgtgcacggttgtcgtcctcagcggcaggagccagtttgttgctcagggccttgtctttttacaaagagccccaggccccgggggcttctctgggtgcctctttgctgccatgtctgcacgcgggcggagagcagaccaggctaccgaccctctcgctttgctgtcttcacgtggaaaagccagtgtcgtagccccaaaggaggggaaactgtattgatttggggagcctctatgttgatttcaaaacagattgtctcctgtgttctcaaagactggaagcgaaccccacaaccgccttaggccacaaaagctttatcctttctaattagcatccctgtgacctgctctgcgccctgcagatattttgctcagccagccagaaggagggaggccagacaccagcccccacagacctgcggctgcgaccccctgcctggggacgatggggtcggggtccagtagctgccccagaaacaagtggggctgcaggaggctgatggtgagcttggaggttggcagaattctaaatctgggcactgcagggtccccacaggtcacgaccctactctgctccacccaggctccggaggacctgagcaggaacctctgcagggggggcccggggctccctgtcctctcagcagccggcagtgctccctgacagcccgggcctctccctccagtagttcggtagtttgctgtcaccaacatggctgggcctgggacaggctcctcctctccctccagaagccaggcagtccctcctgcctcagtttctcagactaggccgcctctcccatcgcgagacactgaagaccctcagctgtttccatctgcccagtctgactgctggatcgccctctgtgtgcgttggtttgctgtgttcttgctactcgcccttggataagatttcttctctactcatgaagctgcgtgtcctggagggcagggccgcacctcacatgcatgttgcccacatagctcagcaacagatgctctcacgcttgttaaaagtaaaaccgggccaggcgcagtggctcacgcctgtaatcccagcactttgggaggccgaggtgggtggatcacctgaagtcaggagtttgagactagcctgaccaacatggagaaatcccgtctctactaaaaatacaaaaaattagctgggcgtggtggcacatgcctgtaatcccagctactcggaggcaggagaattgcttgaacccaggaggcggaggttgcggtgagccaagatcacgccatagcaattgcactccggcctgggcaacaagagcaaaactctgtcaaaaag

SEQ ID NO: 17623 - protein, 128 aa, Homo sapiens
MSLCSACTSPASHQLLLNCQGQTVAKSHSSADAGVSLVSGRWCAWWPEHCSESMFPSQHPVLSSNLADSSGQGRSPAGAHPALCPFHKSPWFPHFPQILPREWSWCGPERPAGCSLGLKAEAALVGKK

SEQ ID NO: 17624 - DNA, 2811 bp, Homo sapiens
  CDS (68)..(1540)
gaggcgggcggcccccagctcgcgtccccgagtcctagcccgcgaggcgccagggctgcgcctgggcatggaagaggggaagatggacgagaatgaatgggggtaccacggagagggcaataagagcctggtggtggcccacgcgcagcgctgcgtcgtgctgcggtttctgaagtttcctccaaataggaagaagacctcggaagagatatttcaacacctgcagaacatagtggactttgggaaaaatgtcatgaaggagtttttgggggagaactatgttcattatggggaggtcgttcagctacctttagagtttgtgaaacagctttgtttaaagatacaatctgaaagaccagagtctcgctgtgacaaggacctggatactctcagtggttacgctatgtgccttcctaatttaaccagactccaaacctaccgctttgcagagcaccggccgattctgtgtgtagagattaagccaaaatgtgggtttattcctttctcgagtgatgtcacgcatgagatgaagcataaggtctgtcgatactgcatgcaccagcacctcaaggtagcaactgggaagtggaagcagatcagcaaatactgtccccttgatctctactcaggaaacaaacagagaatgcactttgccttgaagagtttgctgcaggaggcacagaacaacttgaagatatttaagaatggtgagctgatttacggctgcaaagatgcccggagccccgtggctgactggagcgagcttgcacaccacctgaagccgttcttcttcccttccaacggcctggccagtgggccccactgcacaagggctgtgatcagggagctggtgcacgtgatcacacgggtgctgctgagtggctcggacaagggccgggcaggcaccctgagtccggggctcgggcctcagggcccgcgagtctgcgaagccagccctttcagtaggagccttcgctgccaaggaaaaaacaccccagagcgctcggggttaccgaagggctgtcttctgtacaaaaccctccaggtgcagatgttggacctgctggacatcgaaggcctctaccctctgtacaaccgggttgagcgatacctggaagagtttcccgaggagagaaaaaccttacaaatagatgggccttatgatgaagcattttaccagaagctgcttgacctttccactgaggatgacgggacagtggccttcgcgctaacgaaggtgcagcagtaccgcgtcgccatgactgccaaggactgctccatcatgattgcactgtctccctgtctgcaggatgccagctctgatcaaaggcctgtcgtcccttcatcgaggtccaggtttgccttttccgtgtctgtgctggaccttgacctcaagccctacgagagcattccccatcagtataaactggacggcaagatcgtcaactattattcaaagactgtacgtgccaaagacaacgccgtgatgtcgactcggttcaaggaaagcgaagattgcacattagttctccacaaggtctaactctttccctgcagtgtctttgaaacttgaacataatgtgaaggctgaatgatagagatattttctgttgtgttgggtgacctttggttgtgaatgtttttgcttttaaccccttttgaggtgggattgcctcttggagacatggaattgaagagcactagaaacaacttcctggacaaggaatgtaggaagtgagtgctgtgtcccaggaagctgctcacactcttaaaatggaagtgtccgttaagccctgggaagacgttctggatagttcttctttcccaaccagggctcatgtctgattctctaatgcgaaaagccttattctaagacccaaggtttggatctgctaccaccagactcctaacatagaaaacttgaattgtcacatacattttacagtttggacttttaagaaaacatggatactactggaacttcccccagctgagttacatggtcactttttcagtgcaagccacatatcaacacaggtttttaggtggttccctgctgcacagcgtgacctcgtggtcgcgcagatgccgattctgagcagtgtagactcagggtccctgtggaggtgctgaagcccacagttccacacagggcagcagggagcgcaaggctcaggtcaggatggacaccactcatgcgagcattgaccttttttttttgctttacaatttaatctttcacatgagggggagatgagctgttctttcccactaaaaattgctgctgtagaagttggaggtggagctgtgactggctgagctgctgtggccgggctgggcagtgtgccccaacagctcagtgctttcctgacactccagtgtctggggtggttgaggagcgagttctctcttcctcccagaccaagttcctccctcgggtttgccttgagacgtgttgcgtttttgggccccgtggcctctccctgttaggctgccacaggccctgcttctggaaggtgaacagctcctggctgctgccgagagggttctcgttggggtcaccaaagtgtgcccggctgctatgaaaaacgttgggaatcttggtttcagttttttactctatgctaggttgtacagacttatttatatcatcgttttgagggactaatggaggcttattgtaacatataatattagtgaaaccatggaattatatgaaaatgatacatgagaaataaggaaactattttgctgattgtaaatttttgtgggaaattttgtgataacttgagaattatacttgtttgaatc

SEQ ID NO: 17625 - protein, 491 aa, Homo sapiens
MEEGKMDENEWGYHGEGNKSLVVAHAQRCVVLRFLKFPPNRKKTSEEIFQHLQNIVDFGKNVMKEFLGENYVHYGEVVQLPLEFVKQLCLKIQSERPESRCDKDLDTLSGYAMCLPNLTRLQTYRFAEHRPILCVEIKPKCGFIPFSSDVTHEMKHKVCRYCMHQHLKVATGKWKQISKYCPLDLYSGNKQRMHFALKSLLQEAQNNLKIFKNGELIYGCKDARSPVADWSELAHHLKPFFFPSNGLASGPHCTRAVIRELVHVITRVLLSGSDKGRAGTLSPGLGPQGPRVCEASPFSRSLRCQGKNTPERSGLPKGCLLYKTLQVQMLDLLDIEGLYPLYNRVERYLEEFPEERKTLQIDGPYDEAFYQKLLDLSTEDDGTVAFALTKVQQYRVAMTAKDCSIMIALSPCLQDASSDQRPVVPSSRSRFAFSVSVLDLDLKPYESIPHQYKLDGKIVNYYSKTVRAKDNAVMSTRFKESEDCTLVLHKV

SEQ ID NO: 17626 - DNA, 3068 bp, Homo sapiens
  CDS (308)..(1408)
gcatgcatcacatcagaagggctcattgccttcaggaacgacaatcgagtggttagaaccaaagatatctttatcaaaccactataaaaatggagctgaccagccctttgcaactgatcagagtaagccggtggcagtcccagaagagcagcctgttgcagaatctggactattagcgagggagcctgaagaaataaatgcagatgatgagatagaggatacatgtgaccacaaagaggatgacctgggagctgtagaagaacaacgtagtgtcatcctacatctcttgtcacagcttaagctgggcatggatttaacaagagtggtgcttcctacatttatcctagagaagcgttccttgctggaaatgtatgcagactttatgtctcatccagacctatttatagccatcactaatggagccacagctgaggacagaatgattcgctttgttgagtactaccttacctcatttcatgaaggccgtaagggagccattgctaaaaaaccatacaatcctatcattggagaaacatttcactgttcctggaagatgccaaaaagcgaggtagcatccagtgtttttagcagttcttccacccagggagtcacaaatcatgctcctttatcgggggagtctttgacccaggtgggatcagactgttacacagtcagatttgttgctgagcaggtttctcatcatcctccagtctcaggattttatgcagaatgtacagagaggaagatgtgtgtaaatgcgcatgtctggactaagagcaagttcttaggcatgtcaataggcgtgacaatggttggagaaggtatccttagtctgttggagcatggagaagagtacacattttctctaccctgtgcatatgctcggtcaattttgactgttccttgggtagaactgggtggcaaagtcagtgtcaactgtgcaaaaactggatattcagccagcatcacttttcataccaagccattttatggtggcaaactgcatcgggttacagctgaagtaaagcacaacatcaccaacactgtggtatgcagagtgcaaggggaatggaatagtgttcttgagttcacatatagcaatggagagacaaagtatgtggacttgactaaattggcagtgacgaagaaaagagtgagacctctggagaagcaggatccatttgaatccaggcgattgtggaaaaatgtgacagactcgctgagagaatctgaaattgataaggccacagagcataagcataccctggaagaacgtcagaggactgaagaaaggcatcgtactgaaacaggcacaccttggaaaaccaaatattttattaaagagggagatggctgggtttatcataaaccactttggaaaataattccaacaacacaaccagcagagtgacacatactatctaaaactcgaccaaatgaggttcttctctgtttaccctaaatcctcccagaatggagtcattgcactgagtgacctgcttcctgattgcgcagactggaactagctaaacctgaatgtacctactagggcaccataatactgcagcaagaccaaagtggtaaagaaacacagtggaccttttaccaacctgttcatgtgatgtgagcaataccatcttaaaacttgttacctgaatcagtagatgaatcttttatccagttcttgctcctaaagttaagtttgaatcccctatttttgcacaggggcagcagatacacacaacaatgagaactcagtgactttgatttctttgtagtgaaaagtgaagtctccgtttcagagtttgtgtctttctttctgtccataactgaggtattcactactcttgtaaaccaaccaagaggaggagaaagatgacccagaagtggattcagccattgtgcctgaaatcagtgtttaaaaaaaaaaaatcaaccaggttgtggtaacaaggcattctatttcttcaaaaagactgtatgcctgtgtctgaggaacttacctattatccacctctgttggaactctcttttaaaaagtacatttatagattgatcagaattataaccatggagaattttttcttctgagcattttaatatacttgaaaacaacattgacttgaaaaatttcagaacatttttcagtacctagttttattaaatattacacttgagagacactttttaaaaatgtgttaatgtcaatatgatgagattttagcctttctccagaactaaggcattaaagaaaatagcaaatattaaaaaataaaactgttacttttttccttctttcttttcacctttaggttaatatccagtattatgtgttatccctttggataagtatgctttattttacctctgttaaaaattaaaataaatgattctattcatatttgtcagtaattcaaaacttatatgtgtaactgaacgcgcatgtaaggtatggttttatttatttatttttttttttgaggaaatttaaatgctaaagaaacaacgaaatgaaaaggtatcaggaaaaaaagatcaggaagttgtattcaggtacaaatctttttttaaataagtattttgttgaggttgaagaattgctggcaattaaaagaatagagctaattatggctttcatcattcattcatgtatttattgagcacctacttattatggtgctcaacacttgttactgcaagctaccttaatttcccaagagtggtgccttactctgttttttctgatatggtcttccaatcagtgtgtgtaacatacctgttgtttatcagccattgtaggtggctgtgtctgttgcatcatcataagaagtttaagctttgtgctctgataaattgtgttctgttaaagaggttagtaggatgaaaacagcaaaacaataattttttcaacaaattgtaaattataagaaaaagagttggtttgtgtacaacaattttaatgattcccttgttcatttttgctgcgaaatgcactgaaaaaaatcctcaaaatgagttatagttcctgtgttgggaaaattgacaaataataaaactagagaacaaac

SEQ ID NO: 17627 - protein, 367 aa, Homo sapiens; identical to SEQ ID NO: 15008

SEQ ID NO: 17628 - DNA, 2609 bp, Homo sapiens
  CDS (274)..(2505)
agtgggtaccgggacgccgtgaggcggaagctgtgtatggcgggaggctgtggcggtcccttggtggggaagctgttgctgttgctagacgacgggaactagctctcgtcacttcctcagcccgccgtctgcccactcctctagccggaacctgggggcccggagccggggtaggcacagagttgtcctcggaggtccaggacagcggccagcccggcggcgggagtcagggccacgccacctgcagggaagaacccgagtcgaagcgggaagatggctgcagacaagcctgcagatcagggagcagagaaacatgaaggcacaggtcagtcctctgggatcactgatcaagagaaggagttatccaccaatgctttccaagctttcacatctggaaattatgatgcctgtctacaacaccttgcccgtctacaagatataaacaaagatgattataaaataattttgaatacagcagtagctgagttttttaaaagtaaccaaacaacaacagataatttgagacaaacacttaaccagctgaagaatcaggtccactcagctgttgaagaaatggatggattagatgatgttgaaaacagcatgttgtactataatcaagcagtcattctttatcatctgcggcagtatacagaagccatatcagttggtgaaaaactttatcagttcatagagccttttgaagaaaaatttgcccaagcagtgtgttttttgcttgtagacctgtatatattaacctaccaagctgagaaagctttgcatcttcttgctgtcctagaaaaaatgatttcacagggtaacaataacaaaaatggaaagaatgagactggtaataacaacaacaaagatggatctaatcataaagctgaaagtggagctctaatagaagctgcaaaatcaaagatacatcagtacaaagtacgagcttatatccaaatgaagtctctgaaagcatgtaaaagggaaatcaagtcagtcatgaatacagctggaaattccgcaccctctctctttcttaaaagcaattttgagtacttaagaggtaattatcgaaaagccgtgaagctattaaatagttcaaacattgctgagcatccaggattcatgaaaacaggtgaatgcttgagatgcatgttctggaataaccttggttgcatccattttgccatgagcaagcacaatttgggaatattctactttaaaaaggctctgcaagagaatgacaatgtctgtgcacagctcagtgcaggtagcactgatccaggtaaaaaattttcaggaagacccatgtgtacgttactaaccaataagagatatgagttgctgtataactgtggaattcagcttcttcacattggaaggcctcttgctgccttcgaatgtctgattgaagctgttcaggtttatcatgcaaatcctcgcctctggctacggctggctgaatgctgcattgctgccaataaggggacttctgaacaagaaactaaaggccttcccagcaaaaaaggaattgtacagtctattgttggtcaaggctatcatcgtaaaatagttttggcatcacagtctatacagaatactgtttataatgatgggcagtcttcggccattcctgtagccagtatggagtttgcagccatatgtctcagaaatgccttgttgctgctacctgaagaacagcaagatccaaagcaggaaaatggggctaaaaatagtaatcaattaggtgggaacacagagagcagcgaaagcagtgaaacttgcagcagtaaaagccatgatggagataaattcattccagctccaccttcttctccattgagaaaacaggaattagaaaacttaaagtgctccatacttgcttgcagtgcctacgtggctctggctttgggtgataacctcatggctttgaatcatgcagataaacttcttcagcagcccaagctgtcaggatctcttaagtttttgggacatttatatgctgcagaagccctcatctctctcgacagaatatctgatgccattactcacttgaacccggagaatgtcactgatgtctccttagggatctcttcaaatgagcaggaccaaggatcagacaaaggtgaaaatgaaacaatggaatcctctggtaagcgggcccctcagtgctaccccagttccgtcaactctgccaggactgtgatgctgttcaaccttggcagcgcttactgcctgaggagcgaatatgacaaagcccgaaagtgtctccaccaggcggcttcaatgatccatcctaaagaggtgccccctgaggccatcttgctggcagtctaccttgaactgcagaatggtaatactcagctggccttacagatcatcaaaaggaatcagctgctccctgcagtgaaaacacactctgaagtgagaaagaagccagtgtttcagcctgtccacccgatccagcccatccaaatgccggctttcaccactgtgcagagaaagtgatacttcacttttggaaaactgttacctgagacccaggggagaatttactggccattttagttgtatcacagcagaatgaataaaagatggtgaaggctgtt

SEQ ID NO: 17629 - protein, 744 aa, Homo sapiens [sequence omitted]

SEQ ID NO: 17630 - DNA, 2780 bp, Homo sapiens
  CDS (37)..(1902)
tattccttcaatatccctttggaagagaggagtgacatgttcacatgggacccctatggaccatgggaaggctgtaccaaaatgtgtcaaggtcttcagcgaagaaacataacttgcatacataagagtgatcatagtgttgtgtctgataaagaatgtgaccacttgccacttccatcatttgttactcaaagttgcaatacagactgtgaactaaggtggcatgttattggcaaaagtgaatgttcatcccaatgtggtcaaggatatagaaccttggacatccattgcatgaagtattccattcacgaaggacagactgttcaagttgatgaccactactgtggtgaccagcttaaacctcctacccaagaactatgccatggtaactgtgtcttcacaagatggcattattcagaatggtctcagtgttccaggagttgtggaggaggggaaaggtctcgagaatcttattgtatgaataactttggccatcgtcttgctgacaatgaatgccaagaactgtcccgagtgacgagagagaattgcaatgaattttcctgtcccagttgggctgctagtgaatggagcgagtgccttgttacatgtggtaaaggaacaaagcagcggcaggtatggtgtcagctgaatgtagatcacttgagtgatggcttctgtaattcaagtaccaaacctgaatctctgagtccatgtgaacttcatacatgtgcttcctggcaagtaggaccatggggtccttgcacaaccacatgtggacatgggtatcagatgcgagatgttaaatgtgtcaatgagctagctagtgcagtgttagaggacacagaatgccatgaagctagtcgccccagtgacagacagtgctccgtatcttgtggaagaggtactcaagcccgctatgtaagctgtcgtgatgctcttgatagaatagcagatgaatcatattgtgcccacttaccccgacctgctgaaatatgggactgttttaccccttgtggagagtggcaagcaggggattggtcaccctgttcagcttcctgtggccatggaaaaacaactcgacaagttttatgcatgaactaccaacagccaattgatgagaattactgtgatcctgaagttcgccctttgatggaacaggaatgtagcctggcagcctgccctcctgcacacagccactttcctagttcccctgtgcagccaagctattatctaagcacgaatttgccattaactcaaaaacttgaagataatgaaaatcaggtggtccatccatcagtcagaggaaaccagtggagaaccggaccatggggatcatgctccagcagttgttctggaggtcttcagcatagggctgtggtctgccaggatgaaaatggacaaagtgctagttactgcgatgcagcctccaagcctccagagttacagcaatgtggtccagggccttgtccacagtggaactacggaaattggggagaatgttcacaaacatgtggaggaggaataaaatcaagacttgtaatatgtcaatttcccaatggccaaatattagaagatcacaactgtgaaattgtaaacaagccacctagcgtaatacagtgtcatatgcatgcttgccctgctgatgtgtcatggcatcaggaaccatggacatcggaggatcttaaagtgaaattgctgcctcaaaggaccatcatcttgtgggaactaatgaaaaacatattttgccatggaaagcactcacatatgtatttaataaatgtcgttactgaccatctactatatcctaggcactgtgatccagagacaattgaaacatatttcttatccctatggagtttacagtttacttggggagatttgaaatactataagaactcactataaaaagatatttttattagctatcttagattggaaatccactttctgcttactgtgtctctgttccatcttctttcattttattggttttagtttgcaagcctagttcttaagaagactgtggattactttcttggaattttttcccaattaggagagcagaatcctaactgctaatgagattgaattgtaatggcatttgtttctgagcatagacgttttattttccctacccattcatgacttcaattcaccgagcattaaacatttacttaggtctcatgctttatattagatattgaagcaattaaaattaagtgtttgtgagtcagattctctgttttagaggtcagcaaactatggtccaggtaccaaatctggcctgttgcctatttttaaaataagttctattggaacacagtcatgctcatttgtttacgtgttatctatggctggttttgcactacagcagtagcattgattagttgcaatagaaactctgtaactcacaaagcctgaaatatttactatctaactttttctgggaaaagtttgctgacccctgttctatttaataaacattataatgcttttaagtttaacataaaaaggtacttagatttatagaatattaaaattacaaataattcattccaggtcagttttagatgtttttgatcctttgatattttacattttaaggtttatcaaccttctctacatatccactgtgatattcatgcaatgtttatgtaaatgtatctatactatattccaatatatttttgttatgctattttttgtatgtaaattatatcacaagtgaaaaatctgaatgctcattaaagtcctctgtatagatgacttttcaacctcac

SEQ ID NO: 17631 - protein, 622 aa, Homo sapiens
MFTWDPYGPWEGCTKMCQGLQRRNITCIHKSDHSVVSDKECDHLPLPSFVTQSCNTDCELRWHVIGKSECSSQCGQGYRTLDIHCMKYSIHEGQTVQVDDHYCGDQLKPPTQELCHGNCVFTRWHYSEWSQCSRSCGGGERSRESYCMNNFGHRLADNECQELSRVTRENCNEFSCPSWAASEWSECLVTCGKGTKQRQVWCQLNVDHLSDGFCNSSTKPESLSPCELHTCASWQVGPWGPCTTTCGHGYQMRDVKCVNELASAVLEDTECHEASRPSDRQCSVSCGRGTQARYVSCRDALDRIADESYCAHLPRPAEIWDCFTPCGEWQAGDWSPCSASCGHGKTTRQVLCMNYQQPIDENYCDPEVRPLMEQECSLAACPPAHSHFPSSPVQPSYYLSTNLPLTQKLEDNENQVVHPSVRGNQWRTGPWGSCSSSCSGGLQHRAVVCQDENGQSASYCDAASKPPELQQCGPGPCPQWNYGNWGECSQTCGGGIKSRLVICQFPNGQILEDHNCEIVNKPPSVIQCHMHACPADVSWHQEPWTSEDLKVKLLPQRTIILWELMKNIFCHGKHSHMYLINVVTDHLLYPRHCDPETIETYFLSLWSLQFTWGDLKYYKNSL

SEQ ID NO: 17632 - DNA, 2797 bp, Homo sapiens
  CDS (256)..(1371)
ccatctcttcaaggtcccactagtctaaaacgcctggttctagatggaaacctgttgaacaatcatggtttaggtgacaaagttttcttcaacctagttaatttgacagagctgtccctggtgcggaattccctgactgctgcaccagtaaaccttccaggcacaaacctgaggaagctttatcttcaagataaccacatcaatcgggtgcccccaaatgctttttcttatctaaggcagctctatcgactggatatgtccaataataacctaagtaatttacctcagggtatctttgatgatttggacaatataacacaactgattcttcgcaacaatccccggtattgcgggtgcaagatgaaatgggtacgtgactggttacaatcactacctgtgaaggtcaacgtgcgtgggctcatgtgccaagccccagaaaaggttcgtgggatggctattaaggatctcaatgcagaactgtttgattgtaaggacagtgggattgtaagcaccattcagataaccactgcaatacccaacacagtgtatcctgcccaaggacagtggccagctccagtgaccaaacagccagatattaagaaccccaagctcactaaggatcaccaaaccacagggagtccctcaagaaaaacaattacaattactgtgaagtctgtcacctctgataccattcatatctcttggaaacttgctctacctatgactgctttgagactcagctggcttaaactgggccatagcccggcatttggatctataacagaaacaattgtaacaggggaacgcagtgagtacttggtcacagccctggagcctgattcaccctataaagtatgcatggttcccatggaaaccagcaacctctacctatttgatgaaactcctgtttgtattgagactgaaactgcaccccttcgaatgtacaaccctacaaccaccctcaatcgagagcaagagaaagaaccttacaaaaaccccaatttacctttggctgccatcattggtggggctgtggccctggttaccattgcccttcttgctttagtgtgttggtatgttcataggaatggatcgctcttctcaaggaactgtgcatatagcaaagggaggagaagaaaggatgactatgcagaagctggcactaagaaggacaactctatcctggaaatcagggaaacttcttttcagatgttaccaataagcaatgaacccatctcgaaggaggagtttgtaatacacaccatatttcctcctaatggaatgaatctgtacaaaaacaatcacagtgaaagcagtagtaaccgaagctacagaggcagtggtattccagactcagatcactcacactcatgatgctgaaggactcacagcagacttgtgttttgggttttttaaacctaagggaggtgatggtaggaaccctgttctactgcaaaacactggaaaaagagactgaaaaaaagcaatgtactgtacatttgccatataatttatatttaagaactttttattaaaagtttcaaatttcaggttactgctgcgattgatgtagtggagatgcctgaacacaattctatattttagtattttttagtaatttgtactgtattttccttgcaaatattggagttataaaccatttactttgtgttctactgagtaagatgacttgttgactgtgaaagtgaattttcttgctgtgtcgaacaatcaggactgcattcatatgagatccttgtagtataagcacaggccatttttcactttggtattaataaaatgtaaaaaaaaaaaactggctgaatggctgaatgagataaaatttaattttaaaaaatggttatgaaataatgttccaattattaaatttgtattatcccagtggtattcaataaatcaaaatgtgtgaagtaatgggcaatatcaaacttcctgcatatctccatttttgctctaggcaaattaattatccttaaaaaagttaagcatatcttctgaactgaatacatcagctggcataaaaggagcatgaagtctgttaaagccattgtcagcaaagctttgaaaataaaggacttcacaaaaacggtaatgtaaatgtgcttccaagttggggggaaaatgtgtacttaggaaaacatggaaacttagacttgtatagtgtaatgaacacaaataccaaaactgcattttggttttgcctataccatcctgatttttgaaaagtgaattataaacacaaaattgttagtgtttatgatgtttttatcataaaggatgtcagagaaactttatgcatattaaaaatgtaatgtaattataagcgattcccctcaacaatccagagaaagtagttctttaaataagagataatttaaagaaaaataaatactagacatcaaatttagatctggtttatgtcaaaggttttaacactgtacataaatgttcaatttacttttacaaagatcaagaatactgcccattactgtcacaattttccagatattatataatgaactcgtaatgtaacatttccttctagcttcctactgaattgtgagctgttacttgttgaaaaaccatatcacttttctgttgccatgatttttttttttcaacaaaaaaccaaagtgcattgtacgccctttggccagtcttgtatgtgccttgatccaacgctacatgtattcagcttttaaaactccacaaatttttcatactccttaaatatgaaaaattatggtcttattgctgaataaaacttttaaaaagt

SEQ ID NO: 17633 - protein, 372 aa, Homo sapiens [sequence omitted]

SEQ ID NO: 17634 - DNA, 2574 bp, Homo sapiens
  CDS (222)..(1781)
aaaaaaagtacccctgcagccggccggagaggctagagcccgacggggcccggctccggcggcagccgcgcctctcgcttgcttccctcggccgggccgtcctcggcggcagtgtcaggagcactccgctggtccaggcggcaacatgtccatgcttttagtgatgtccctgcctctaatccagaagccatggaggagataaggtagcccccctcgatcggatggggaagcccagttcaatggatactaaattcaaggatgacttatttcggaagtacgtgcagttccatgagagcaaagtggataccaccaccagcaggcagcggcctggcagcgatgagtgcctgcgggtggcagcctcaaccctgctcagcctgcacaaggtggatcccttttatcgattccggctgatccagttctacgaggtggtggagagctccttgcgctcgctcagctcctctagcctgcgggctctgcacggcgccttcagcatgctggagacggtgggcatcaacctcttcctctacccgtggaagaaggaattcagaagcatcaagacctacacgggcccttttgtttattatgtcaagtcgacattactggaagaggacatccgagccatcctgagctgcatgggctacacacctgagctgggcactgcatacaagctcagagagctcgtggagaccctccaggtgaagatggtctcctttgagctctttctggccaaagtcgagtgtgagcagatgctagaaatccactcacaagtgaaggacaagggctactccgagctggacattgtgagcgagcgcaagagcagtgcagaggatgtgcgcggctgctcggacgccctgcggcggcgggcagagggccgggagcacctgacggcctccatgtcacgagtggcactccagaagtcggccagcgagcgggcggccaaggactactacaagccccgcgtgaccaagccctcgaggtcagtggatgcctatgacagctactgggagagccggaagccacccctgaaggcctcgttgagtcttcggaaggagcctgtggcaacggatgtgggggacgacctcaaggatgagatcatccgcccatccccttcgctgctgaccatggccagctccccccacggcagcccggatgtgcttccacccgcctcccccagcaacggcccggccctgctgcgcggtacctacttctccactcaggatgacgtggatctgtacacagactctgaacccagggccacctaccgtcggcaggatgctctgcggccggatgtgtggctgctcagaaacgatgcccactccctctaccacaagcgctcgccccctgccaaagagtctgccctctccaagtgccaaagctgcgggctgtcctgcagctcctccctctgccagcgctgtgacagcctgctcacctgtcctccagcttccaagcccagcgccttccccagcaaggcctcgactcatgacagcctggcccacggggcatctctgcgggagaagtacccaggccagactcagggcctcgaccgcctcccgcaccttcactccaaatccaagctctccaccacgcccacttcccgctgtggcttctgtaaccgcccaggcgccaccaacacctgcacccagtgttcaaaagtctcatgtgacgcctgcctcagcgcttaccattatgacccctgctgcaaaaagagtgagctgcacaagttcatgcccaacaaccagctgaactacaagtccacccagctctcccatctcgtgtacagatagaccggcctcgccccttccagctccaagggctacatcaaccgacctttcgggtttcacggtgaagaagtactaacgcattgatctcagaggcggaggcctgcacttgaccatgtaggtggcagagatcgtgggctggctgtgtccacgtgggagttcacttagcgactcagatatctcaaccaatggctgctttgttgtctgacaagggagaaggtggcacttccgttcagattcattttgctaatctctccactccctgttcagttggttctttttttggggttttgttttgttttgttttgttgttttgttttttcctttaaagaggatttctgtctctgggaccctcgctgcacctacccctcccattgcaaagccaacttggactgggaagggcccttcaggtcaccaaacatccacctggagcggcgagctagaggcctgttggcttgtgaaatgagccctcctgccacacggggcctctcccaaaggctcatcccttggccgcccccttcctaaacacaaggatccccagctggactccccaccccctggcttccccacctctccaggtgtcaaaggtgaaccgagtccagtattagctgaatgtcatttcgtacaccacagctcagtcagcccatggccttcgtgaactttgctccaacacactgatgtgtgggcttcccacagcaggactgacttccccctttctgttgtttgcacatgcccctcttactgtactgtcaatagatatttttgagatttatttttaaataaatattcaacttgc

SEQ ID NO: 17635 - protein, 520 aa, Homo sapiens [sequence omitted]

SEQ ID NO: 17636 - DNA, 2505 bp, Homo sapiens
  CDS (579)..(1751)
gcttccggctccggcgtggggtttgatgtctacggagtggcttttgcttagcgtcttgaaggggggaaaaaaatcctctaagctggtgatttcacgttctttgacaaacttcaatagcaacaggcaacgataccactttaagaaaattccaaggaaaagacctcattttaaaattcccacctctggctcccaaagattggtttgcaaacttcgacaaaatactcttctccactcgctattgatggagtctcgctctgtcacccaggctggagtatagtggtgtgatcttggctcactgcaacctctgcctcccaggttcaagcgattctcctgcctcagcctctcgagtagctggaattacaggtctggcagaaggaacagtatcaactgactgagtaggtctcattggcagttgtgattcagagacctagaaagctgaacccacggctggcaagaagaggatggtttgtgggacctgggctgatgtctgatgaaattttaagccccagctatagctactacaaagaaaagtggctgatgataagcatgtaactcaaaaagacaatgtatataaaaatatgcaagaatcacaggaaacccacatatccaaccacctagatgaagttgttgctgctgttagcatcactcatagaaagaagttccaaaacaagctgcttcagacagcactattccagcctcctcgagagaaactccacctctgtgaagagaaagcaaagtcctattccaacagtcatgagtacaaacaggccgtccatgagcttgtgcgttgcgtagcactgacaagaatttgctatggagactcacattggaaactagcagaggcacatgttaatctggctcaaggctacctccagctgaaaggactgtcactgcaagcaaaacaacatgcagaaaaagccagacaaatcctcgccaactccattgtgcctccctatagtgagaatacagatgttttcaagttttccattgagcttttccataccatgggcagagctttactctcccttcaaaaatttaaggaagctgcagagaatttgacaaaagcagagagactttcaaaggagctgctacaatgtggaagaattataaaggaagaatggatagaaattgaagcacggatcagattatcatttgcacaggtgtatcaaggtcagaagaagtcaaaagaagctttgtcccactatcaagcagctttggaatatgttgagatcagtaaaggtgaaacaagtcgtgagtgtgtacccatattgagagaattagcaggtgtagagcaagccctgggactccacgatgtatccatcaaccacttcctccaggcacatctcatcatcctgagtagaagcccctctcaagtggaggcagcagactcggcacacatcgtcgcccatgctgctgtcgcttcagggagacacgagcaccatgatgtagctgagcagtattttcaagagagcatggctcatcttaaggattctgaagggatgggaagaaccaaatttctttcaattcaagatgaattttgccattttctacaaatgactggacaaaaagagagagcaacctcgatcctgagagagtccctggaagccaaagtggaagcatttggcgatttcagtcccgaggtggcagagacataccggctcctgggaggagcagacctggcgcaggggaaccacagtggggcccgcaagaaactgaagaaggtaaagctggaaccagtactaacacgagactaggctctccctcccctctccaaggccaatttctctcccttgtggtggttcttttaaatgaaactttagaagtggcttgtttagataggatgacatcacttttgtggtagatctaacctgatactttttgggtaaaagacatagtaagcctcttagacatacatattttttaaatgaattatcagtttttactatgcaaatatttttaattttttacgtagtacaattgatcagtcctttatgtttgcggtgctctctctatactgagtttatagaggaattctcttacactttcttcaattgtcattcttctttaaatttggagtttatttgtgtggatggcatgaggaatggatctaatcttaccttttttccaaatggccacccagttgtccagcaccatttaattagagagcccatctatgctccagtgacttcagataacaccttcatcatatactgattttccttatggacttaagtctatttctagatttctcttctcttccactagtctttctgtttattcatgtgtcaatatttcagttttaattacagagattttatagaatgatttaatatgtgataggagtagacaccccttatggcttttcttttactagaatatcaggtgttctagctattcttccgtgtttatttttctacatgaatttttgtatcaatttgtctaactccataaagagcttactagtatttttattgcattatttataaataaatcttgtgagaattg

SEQ ID NO: 17637 - protein, 391 aa, Homo sapiens
MQESQETHISNHLDEVVAAVSITHRKKFQNKLLQTALFQPPREKLHLCEEKAKSYSNSHEYKQAVHELVRCVALTRICYGDSHWKLAEAHVNLAQGYLQLKGLSLQAKQHAEKARQILANSIVPPYSENTDVFKFSIELFHTMGRALLSLQKFKEAAENLTKAERLSKELLQCGRIIKEEWIEIEARIRLSFAQVYQGQKKSKEALSHYQAALEYVEISKGETSRECVPILRELAGVEQALGLHDVSINHFLQAHLIILSRSPSQVEAADSAHIVAHAAVASGRHEHHDVAEQYFQESMAHLKDSEGMGRTKFLSIQDEFCHFLQMTGQKERATSILRESLEAKVEAFGDFSPEVAETYRLLGGADLAQGNHSGARKKLKKVKLEPVLTRD

SEQ ID NO: 17638 - DNA, 2510 bp, Homo sapiens
  CDS (188)..(2203)
gtttctccaccagcaacatggccgccgcctgagaggagagccgggccgccgccgtctctgcagcccgcgggtaactgggccgttgccgccgtccgcgctcggcccccgcggagagatcgatgtgtacttggccaagagtctggcggaaaagctgtatctatttcagtaccctgtgcgtccagcctcgatgacctacgatgacattccgcacctctcagccaagatcaagcccaagcagcagaaggtagagcttgagatggccatcgacaccctgaaccccaactattgccgcagcaaaggggagcagattgcgctgaacgtggacggggcctgcgccgacgagaccagcacgtattcctcgaagctgatggacaagcagaccttctgctcttcccagaccaccagtaacacatcccgttatgccgctgcactctacaggcaaggtgagctccacctgacacctttacatggcatcctgcagctgcggcccagcttctcctacctggataaggctgacgccaagcaccgggagagggaggcggccaacgaggcaggggactcttcacaggatgaggcggaagacgatgttaagcagatcacggtgcggttctcccggccggagtcagagcaggcccgccagcgccgtgtgcagtcctatgagttcctgcagaagaagcacgcagaggagccctgggtccacctgcattactatggcctgagggacagtcgctctgagcatgagcgtcagtacctgctgtgccccggctcaagcggggtggagaacacggagctcgtcaagtcacccagtgagtacctgatgatgctgatgccacccagccaggaggaggagaaagacaagcctgtggcccccagcaacgtcctgtcgatggcccagctgcgcacgctgcccctggccgatcagatcaagatcctgatgaagaatgtgaaggtcatgccttttgccaacttgatgagcctcctgggcccctccatcgattccgtggctgttctgcggggcatccagaaggtggcgatgttggtccaagggaactgggtggtgaagagtgacatcctataccccaaggactcgtccagccctcacagcggcgtgcctgctgaggtgctctgcaggggccgagacttcgttatgtggaagttcacgcagagccgctgggtggttaggaaagaggtggcaaccgtgaccaaactctgcgccgaggatgtgaaggacttcctggagcacatggccgtggtgaggatcaacaaaggctgggagttcattctgccttatgatggggagttcatcaagaagcacccggatgtggtccagcggcagcacatgctgtggacgggtatccaggccaaactggaaaaagtctataatcttgtaaaggaaaccatgccaaagaagccggatgcacaatcagggcctgccgggctggtctgtggggaccagcggatccaagtagccaaaaccaaggcccagcagaaccacgcgttgctggagcgggagctgcagcggcggaaggagcagctgcgggtgcctgcggtcccgcccggtgtgcggatcaaggaggagcccgtgagcgaggagggcgaggaggacgaggagcaggaggcggaggaggagcccatggacacttcccccagcggcctccacagcaagctggccaacgggctgcctctcgggcgggctgcgggcacagacagcttcaacgggcacccgccccagggctgcgccagcacccctgtggctcgggaactgaaggccttcgtggaggccacctttcagagacagtttgtgctcacgctgagcgaactcaagcgcctcttcaatctgcacttggccagcctgccccccggccacacactcttcagcggcatctcggaccgcatgctacaggacacggtgctggccgccggttgcaagcagatactggtgccttttcccccccagactgctgcttccccggatgagcagaaggtgtttgccctctgggagtctggagacatgagtgatcagcatcgacaggttttgcttgaaattttttccaaaaattaccgggtacgccgaaacatgatccagtctcggttgactcaagagtgtggagaagatctcagtaaacaggaggtggataaagtactaaaggactgctgtgtaagctatggtggcatgtggtaccttaaagggacagtacagtcttgacaatagtagcaaactactaacccagcaaatctaagcccaaggaagaagggcggaaccagaagtagggcctcgacttgcttcagacgacacagagcaagaggaactgaccatctcatgacctgtggcattgcacggtgcagtggacagaagggattatcctcagccagtcacagggtcagcttaagttagttagatcactcccagaagagaccagctgggaccttctttgcagtacaatttgaaattcctgatgtattttgcttattatttggtttcattctcataataaagagagtgtatactg

SEQ ID NO: 17639 - protein, 672 aa, Homo sapiens
MTYDDIPHLSAKIKPKQQKVELEMAIDTLNPNYCRSKGEQIALNVDGACADETSTYSSKLMDKQTFCSSQTTSNTSRYAAALYRQGELHLTPLHGILQLRPSFSYLDKADAKHREREAANEAGDSSQDEAEDDVKQITVRFSRPESEQARQRRVQSYEFLQKKHAEEPWVHLHYYGLRDSRSEHERQYLLCPGSSGVENTELVKSPSEYLMMLMPPSQEEEKDKPVAPSNVLSMAQLRTLPLADQIKILMKNVKVMPFANLMSLLGPSIDSVAVLRGIQKVAMLVQGNWVVKSDILYPKDSSSPHSGVPAEVLCRGRDFVMWKFTQSRWVVRKEVATVTKLCAEDVKDFLEHMAVVRINKGWEFILPYDGEFIKKHPDVVQRQHMLWTGIQAKLEKVYNLVKETMPKKPDAQSGPAGLVCGDQRIQVAKTKAQQNHALLERELQRRKEQLRVPAVPPGVRIKEEPVSEEGEEDEEQEAEEEPMDTSPSGLHSKLANGLPLGRAAGTDSFNGHPPQGCASTPVARELKAFVEATFQRQFVLTLSELKRLFNLHLASLPPGHTLFSGISDRMLQDTVLAAGCKQILVPFPPQTAASPDEQKVFALWESGDMSDQHRQVLLEIFSKNYRVRRNMIQSRLTQECGEDLSKQEVDKVLKDCCVSYGGMWYLKGTVQS

SEQ ID NO: 17640 - DNA, 2464 bp, Homo sapiens
  CDS (56)..(1915)
gtgggctgggtgggtttcctaatctggtttcgtctgcttggttcatctgtgtgcgatggctccggactcggatcccttccctgaagggccgctcttaaagctgctacccttagacgctagagaccggggcacccagcgctgccgcctgggcccggccgccctccacgccctgggcgcgcgcttgggctcggcagtgaagatctcgctacccgacggcggctcctgcctctgcactgcctggcctcggcgggacggagcggacggctttgtgcagctggacccgctgtgcgcgagccccggggcggcggtcggggcgtcgagatcccggaggagtctcagcctgaatcgcctcctcctagtgccctgtccgcccctgcggcgcgtcgccgtgtggccggtgttgcgagagcgggcaggcgcgcccggtgcccggaatacagccgcggtgctggaggcggcacaggagctgctgagaaaccgaccgatctccctgggccacgtggtggtcgctccgccaggcgctcctggcctggtggctgccttgcacatcgtcggcgggacgcccagtcccgatcccgctgggctggtcacccctcgtacccgcgtcagccttggcggggagcctccgtcggaagcccagccgcagcccgaggtgcccctgggaggtctttcggaggcggccgactcgctgcgggagctcctccgcctcccgctccgctacccgcgcgccctgaccgcgctgggcttagcggtgcctcgcggggtgctcctggcggggccccccggagtgggcaagacccagctggtgcaggccgtggcgcgcgaggcgggcgcggagctgctggcagtcagcgccccggcgctgcagggttcccggcctggggagaccgaggagaacgtgcggcgggtcttccagcgcgcccgggaactggccagccgcggacccagcctcctcttcctggacgagatggacgccttgtgtccccagcggggcagtcgagcacccgagagccgcgtagtggcccaggtgttgacgctgctggacggcgccagtggggaccgcgaggtcgtggttgtgggagccactaaccggccggacgctctagacccagcgctgcgtagacccgggagatttgaccgagaggtggtcattgggactcccacacttaaacaaagaaaggaaattctgcaagtgattacctcgaagatgcccatctccagtcatgttgatttgggccttcttgcagaaatgacagttggctatgttggtgccgacctgacagcactctgtagggaggctgccatgcatgccctccttcatagtgagaagaaccaggacaatcctgtgattgatgaaatagacttccttgaagcttttaaaaatattcagccctcatcgtttcgaagcgtcattggattaatggatatcaagcctgttgactgggaggagattggtggccttgaagatgtaaaactgaagttaaaacagagcattgagtggcctctgaaattcccttgggaatttgttagaatgggcctgacacaaccaaagggagttctcctctatgggccccctggatgtgctaaaaccactctggtgagggccctggccacaagctgtcactgctctttcgtttcagtgagtggagctgatctgttttcaccgtttgttggagattcagaaaaagtgttgtctcagatatttcgacaagcaagagcaagcactccagcaattttgtttttggatgaaattgattcaatcttgggagctcgctcagccagcaagacaggatgtgatgttcaagaacgagttctttctgttctcctgaatgaattagatggtgttggacttaagacaatagagagaagaggaagtaaatcaagtcaacagggtaaatacaaggagctgaaaaaatgaagagagtttcaagaagtttttaaccgaagtgtcatgattattgcagcaacaaatagacctgatgtgttagatactgctttgttacgacctggaagattagataagatcatctatatcccacctccagatcacaagggcaggctttctattttaaaagtctgtacaaaaaccatgccaatagggcctgatgtctccttagaaaacctcgcagcagaaacctgttttttttctggagctgatcttagaaacctctgcacagaagctgctttgctggctctgcaagaaaatggactagacgcaactacagtgaaacaagagcactttctaaaatcacttaagactgtaaaaccgtcgttaagttgcaaggacttggctttatatgaaaacttatttaagaaagaaggattttctaacgtggaaggtatttaaaaatcaccttaaactcttgttcagttcacattaattgaaatgtgaacttgcctgtcgtttgcaacttcacacttttagaatttgtgtttatatttcctgtaagtgaataaataaaac

SEQ ID NO: 17641 - protein, 620 aa, Homo sapiens [sequence omitted]

SEQ ID NO: 17642 - DNA, 2436 bp, Homo sapiens
  CDS (178)..(1296)
aaccctgtcattgctgaactgtcccaagcaataaacagtggtacattgttatcaaaaccgtccccacccttaccacctaagagaggcattccatcaacctcagtacccaccttggagtctgctgctgccatcaccacaaaaacaccaagtgatgaaagagagaagagcacgtgttctatgggctcggaactactaccaatgatctcacctcgctctccgtcccccccactgcctactcatatacctccagagcctccacgcacccctccattccctgctaagacttttcaagttgtgccagaaattgagtttccaccatccttagatctacaccaggagattccccagcaggaagatcagaaaaaggaagtccccaagaggatactggaccagaactttggggagccccatataccctctaggctgcctccactcccactgcatattcgaatccagcaggccctcaccagcccacttcccatgactcctattctggagggttctcacagagctcattcgttgctttttgaaaacagtgacagcttttctgaggacagcagtacgccgggtcggaccaggtctcttcccatcactattgaaatgctaaaagttccagacgatgaagaagaagaggagcaaacctgtccatccacattcagtgaagaaatgacacctacctcagtcattcctaaattaccacagtgtctacgggaggaagaagagaaggagagcgactctgattcagaaggtcccattcagtaccgagatgaagaagatgaagatgaaagctatcagagtgctctcgccaacaaagtgaagaggaaagacacactggcaatgaagttgaaccacagacccagtgaaccagagttgaacctgaattcttggccttgtaaaagcaaggaggagtggaatgaaatacggcaccagattggaaacacactgatccggcgactgagtcaaagaccaacaccagaagaactagaacaacgcaatatattgcaacctaaaaatgaagctgatcgtcaggcagaaaaacgagaaattaaacgtcggctcactagaaagctcagtcaaaggccaactgtcgctgaactccttgccaggaagattctgaggtttaatgaatatgtagaggtaacagatgctcaagattatgaccggcgagccgacaaaccttggaccaaactgacccctgctgacaaggctgccataagaaaagaattaaatgaatttaaaagctccgagatggaggttcatgaagagagcaaacattttacacgctaccatcgtccatgatgccaaaggttgagagaggaatcaacatggctgctttgctgcttccttctccaaagtgacatatggagggaactttagcacttcccagcacagccagaattgcatcctctgggatcttctgaggtggacagcactttgaatgtagcatttcactggaacagagtcttatgtgctgcaccgggggcaaaacaacactttgtcagtgcttttgaacctttcaatattgtagcatgcttgaggagtttttcccttactggccaccaaagttctgaaccacttgcaggttccaggttttactggctgcaccacaccccttcccctagatgactgcctgtgcagagacacagtttgcaccattagccttacctgccctgccctgattgtgagacccaaatgtgtaggctctaaattccagccatcaaatccaattcctggtggggaaaaccttctggagacccccaaccttctgataaaagagtctctacctccagggaaagccttcttaccacactggcatatcagatgaaagcattgcactgtacctctcgtaacacagcaatacagtcctcttgaggcactcaagcctgagaggaagctcaggatctgacatgttcttccttttcctcacaagtcatcatgattttttattttaaaataatctggaagtaatgggaacttagtttttcctgaactccaaccagaatccaaattggttagatgaggccaggcgcggtggctcacgcctgtaatcccagcactttgggaggccgaggtgggtggatcacctgaggtcaggagttcaagaccagcctggccaacatggtgaaaccccatctctactaaaaatacaaaaattagccaggtgtggtggcgcctggttgaggcatgagaatcgcttgaacccaggaggtggaggttgcagtgagccaagatcatgcctactgcactccagcctgggcaacaaagtgggactctgtcttaaaaaaaaaaaaaaaaaaaaaatcggttagatgagaaagcatgtatattttctatatacaaaaacaagaaaggcgttttgagcccctgtgctcaggcccactcccacactgtggagtgtactttcattttcaataaatccccttattccttccttgc

SEQ ID NO: 17643 - protein, 373 aa, Homo sapiens [sequence omitted]

SEQ ID NO: 17644 - DNA, 2635 bp, Homo sapiens
  CDS (327)..(770)
caaatatgtttcagagctctggagtccagcaccaccctccagaaccaaaagcccaaacagaagggaatgaagattcagagggcaaagagcaaccttgggaaatggtgatggataagaaacactttaagctgtggcggcgcccaattacaggcacccacctttaccagtaccgagtttttggaacctacacagatgtgacacctcggcagttcttcaatgttcagctggacacagagtatagaaaaaaatgggatgccctggtaatcaagctggaggtttgtgtgatgcagaacactaatcctgcccctccatttctttagtatccaatgtactcacgggattatgtttatgttcggcggtatagtgtggatcaggaaaacaacatgatggtgttggtgtcgcgtgctgtggagcatccgagtgtgccagagtctccagaattcgtcagggtcagatcatatgaatcccaaatggttatccgtccccacaagtcatttgatgagaatggctttgactacttactaacatacagtgacaatccccaaacggtgtttcctcgctactgtgttagttggatggtttccagtggcatgccagatttcctggagaagctgcacatggccactctgaaagccaagaatatggagattaaagtaaaggactacatctcagctaagcctctggaaatgagtagtgaagccaaggccaccagccagtcctctgagcgaaagaacgagggcagctgtggccctgctcggattgagtatgcttgacaggctttgggataagaagggacaaggtgcttctagccctgtctcagtccgttatcactctgctgtagaagggggacatgccacatgtattagaaggcatctgctgtaacttccagtgcaagataattcaataactgatgtcccatttcattcagagcccttattgctcttatcaaaacagaagaaggctatatttgtgggagtgttgtcatattctcaggccaactgttttgaaattcggtatctcactgagctaatctggaacaaacctctcacctcaggccagaaggggatgacctccatttgcttctctgagtagtttcctctgctgacattccaaatcccaccatcgattgtgcagcgctttggatttccttcagttctccaggtccacctggaaagtatagttggccagttgagtctctcaaatgaggggctactgggagtgctcttggtaacaatcatgatgtgaatgggtgtgaacgatacttggctatgttaagtgccttgtccgcaccttgcttttatctctagagacatgaagttattattaattttttttttttttaagtagagatggagtttcactctgtttcccaggctggtcttgaactcctgggccatgcctggccagggacatgaatttgtacaaagaaatttccctccctgcctgcacaatatcacccattgactcaccttatccaaagcaagtttcctgtgaatcggccagttcttctatattcattggatcattgcctccttcctaaccttccccatttaccaagaacactgggagactaatccttttagatagtagctttttgatgctcaaaacatcacatttaaatttagtttaaaaattttttaacttttgtgtcaaataggagttgaggaattgagcaggattctaccctagtccgattgtatagaaaacaccattttgattcaggtattatttttcatatttcaggtttgacttgttcttttcagaaggctaaagtcagaggaatgggggctgggccactcccttggagctctcagatctacagacaagctgtgtgaatgcatagatgtaatcttgtctcaaatactaatacagtggagatttggtttatgttaccattaagttcctctaaaaagtttttcttcctctcttcagagccaaaataaaagtgaactacactgttcagataaggtcacaatctgatgctgtcagtttgaccgagctggttttgcttatggtcatgctgcaatttgttagaataatagggatcaagttttaaatcctcctccttcccttttttctggagtcttgagggccagagtttttgtttttgtttttgtttttttttttcctgcttgctactgttttgtggtgttgaaaagtggtttaaacctgagactaacttaaacacttccttgaccttcttgttgcctgttcatttttgtgccaaggaagtagctgccccagtgtatgtcttgccttctccgcgtcattgttggaagaggagagatgcatcgagcagtcccagctgcttttcatttattacttcttctttccaggacctgacagaagtcagggaggagtccctgggttatgtccaaacttagcacctgcaattgttgggatgtggatggatgtgtgcataagagagagagagaatatgtgtgtgtgtgtgtgcgtctgcgagcgcacacacatgcacaagtgcgaaggagttgcggttgctccatgttctgacttagggcaatttgattctgcacttggggtctgtctgtacagttactcatgtcattgtaatgatttcactcctaactgtgacatttttatcaaatgtgtgaataaatacataaagattggt

SEQ ID NO: 17645 - protein, 148 aa, Homo sapiens [sequence omitted]

SEQ ID NO: 17646 - DNA, 2699 bp, Homo sapiens
  CDS (4)..(1107)
aagatggctatcaagagtatcgcttcccgcctccggggttcccgtcgttttctgagcggcttcgtggttggggctgtagtgggcgctgcgggagctgggctcgcggccctgcagttcttccggagtcagggcgctgagggagcgttgacagggaagcagccggatggatctgcagaaaaggctgtcttggaacaatttggattccctttaactggaacagaggcaaggtgttacactaatcacgctttgtcttatgatcaggcaaagcgggtgcctagatgggttcttgaacatatttccaaaagcaagataatgggtgatgcagacagaaagcattgtaaatttaagcctgatcccaatatccctccaaccttcagtgccttcaatgaagattatgttggaagtgggtggtcacgaggacacatggctccagcaggaaataacaaattttcaagtaaagccatggctgaaaccttttacctttctaacattgtgcctcaggattttgataataattctggatattggaacagaatagaaatgtactgtcgagagctgacagaaaggtttgaagatgtttgggtggtatctgggcctttgaccttacctcagactagaggcgatggaaagaaaatagttagttaccaggtgattggcgaggacaacgtggcagtcccctcacacctttataaggtaatcctggcccgcagaagctcagtatctaccgaaccactggcgctaggggcctttgtggtacccaatgaagccatcggcttccagccccagttaactgaattccaagtgagcctccaggacctagagaagttgtcaggactggtgttttttcctcatttggatagaactagtgatatccggaatatctgctctgtggacacctgtaagctcctggatttccaggagttcaccttgtacttgagtacaagaaagattgaaggagcccgatcagtgctcagactggaaaagatcatggtaaacttgaagaatgcagagattgaaccagatgattactttatgagtcgctatgagaagaagctagaagaactcaaagctaaggagcagtcaggaacccagataagaaagccatcctagtttttatctcaagatgtgtcataccgtctgtaatgaagcaggcatgccctctttaggctaacatattttagtggctttgctttttgctttttaaaaagtttttctctttaagagatgtggtctcgccgtgtcatccaggctggagtgcagtggtggaatcatagctcactatggcctcaaacttctgggcttaagcaatcctcctgcctctgccccctgagcagctgggactacaggcacacaccatcaccctcagctactagtggctttgctttaaagaaacagtggaatcctaaatttatgactaaaaattcccccaaaagatgaaagatctacaatgtttttgtcagtattatatttgactcaggaactaattattaatggagctttgacacctgcagatggagggctgatcttgtgtcaagttaacaggaagactgcccacagatgacactgcatttgtatccctgtggatgtagagtattgggaaggcatttgtttagtttcatgcctccaaaccatgcattgtctgtgatgtatctgcccagccttctcagaactcaatgttgtacatttttccctctaggacctgaattggtcttggaggcagcttttagaaatcctctatgtagttcctgtccacatgcactatatatttgtttcttctttctcctctcatgaatctgctcgtttctctacttctgtctacgtagaagcactcagcaactagtttctgctcattaaatgtgttctatatactaggctcagtgctttacatgtgttgtctcacaatgactctctgaggtaaatacactatccccattttacctgtgagaaaattgaggcttagagagcttagtgtcttacccgagtttcacttttccaaagtagtcatccacaaagtatgaggcagacagatctaagagaagaaagacagctgaggtagattcaaatcttttctgacatggatggtggctttttactcagaaatatatacctatttccatgggtatttgtgggcctgaggcatgcttggcaagaagagtctggtttctcgtctgctatgcaagccaaagggactttaatgttctttgaattgaaccctccttagctctgtggaaagagacagtcaggaatatttgggaattagacggcaatactttgtggggtttattagagcccatgcttgcctccagagatacagttcttttagtgaccagatactgccaaattgatgtgttcttgctttccaggtgagctttttgttcttaagattaagaaacctatgaaggatctgcagccaggcatggtggctcaggcctataatctcagcactttgggaaatcgaggtgggtggatcgcttgagcccaggagtttgagaccagcctgggcaacataatgaaaccctatctttacaaaaaaatacaaaaattagctgggcgtggtggtgcacacctgtagtcccagctactcgggaggctgaaatgggaggattgcttgagcctggcaggtcaaggctgcgatgggacatggtcatgccactggacgccagcctgggccacagagggagaccctgtctcaaaaaaag

SEQ ID NO: 17647 - protein, 368 aa, Homo sapiens [sequence omitted]

SEQ ID NO: 17648 - DNA, 2328 bp, Homo sapiens
aaacaaaaacaactttaaatgcttgtagcagaccgggtcatctcatgtcagaaacctttaatccaggcctaaatttgcatagacctgacattcagctgccttgcagttgcttcctcccatgagccaaggtggtgtcagagggcaactggatgactcgcagtaccacagcactgggacagacagaagccacacctttcttttgggtttttgccaagcctcctccatctcccatcagtgctgtgggctggctgcaagcctcgaaacagttctcctggaagggaggtttttgctttacccccgccagcacttccgcacacaatcatagagaacctctctgctctctgctggcctacagcttgtctgtttctcaagcagaggcaggaagagctagtcttagcatttatattttaataggaagttgactcccagcatgtaaaagtgatccacgcagccggagtgtatgccgggagctaagtggtctatgggtgaacatatcccaccttgcttcctgagtccttggtcccaatcttctcatttgttcctctcgttttaaattttttccccccaactcttttgatgtaagagttcagtttgtcttcgggagtgggtctctgcaagggctctgggatgagtcttggcttccaagaggacaggctattaggttcttggactttttcctgtgctaccgctgctgcttggtggaagtaacaggacgtggattctgcctcataagtggcagtttcccttttctctctgacttgtcctaggccgatttctctatggcttccctgagaaaggtgaggcccaaaggagagaggccttcaaactgtcccaggtcctgcgcagctcagtgcgtatcttcttgcttccatgtgtcttttcccctgctgcctcactccccacccccacttgccaggtgtttgagccatttctacaccaaagcaaagtacggcctcaggagggagtaaaaagggtgccatctgtgtctggaggggcagctgtgttcatgccctgtgctactggacatttcacaattctggcaccttgcgattggtcagtcaacctcagaaagtaactatcttgaaggtttgaaaaacaaccaaagaaagggagtgaggactatggctgcatgtcctctgcttgcccggctgcagagcagagatgtgcagccctctggtcagctggtccaggctggtccccgccggtccccttccagtccagccaccaagagtccacttgtcccgggcttccacctggctgacaggaagaatttctgagagctggatgtgcatgccctgtggacgaaggtacagctcgcctgcctgccccaatcccagccccgacaatcacatgcagctgactcggacactggccttgggaacaatgttcgagagaacacttgccccttgactgtaggagccagaaggggacccaggtgtgcatagctctctgtagacatttttacccaaacctgttggtaaagtgcccatctggtgctcaagagagcctgggggtctaacagggagcccggctgcctcacctggccacagcctccacaccagatctccacattgtcttgatccagaccagctctgtgatcagaaggaaattgggtccagtgtaggagagagctggtcctgggcctggcaggcaagagtgtgggcatcctttcctggcctttctccactctccctcaagcctgtgctcaggttgccttgaatgtggactctggaagagccaggggcccagaatgccgggggaggcttctgagtggcactcatggaacaccgtccctctgccagccataggccctgcctccagtgtcagggaatggaggctgggctgcgagagtgttgctgccccctgtgtcattcttctaatccaatgtagaaattgtacgtaatgtatttaaatcaacgcaaatgtatgaataacaaatacagttctgaccttttttgtccagtttctttgggggaaggaagacaaagaaggtaggaacggaattttgagggcaaagaaacctgtgtttccatggaattgctgagacgtggctcctggggctatttctccctaataaaggatgatccaggtcctcatttccaaagtcccaatgctctgaaaaccaaaagtattttcataacccatttgaaaccaaacctgacctgaacttacactgataggaagctatgggtaattatgatgtgttccttttagtgtgattctttgttgcagaaatgtcaatatattttatgacatggttccctactagggattatacagtatttgctgactacttcctaagagccaaaaataaaaaatctgaattcc

SEQ ID NO: 17649 - DNA, 3295 bp, Homo sapiens
caacccttaacatttgggtaatgtggtccaccctccctcccaggcaacaaactgcttgaggctggcagctcctgtttctgaagactgatgcagcccttgaaggtcaacctgctggagcaaaaaaacttgggacttgaatttgtagctccatttacatggatccattgccccagctactggagtatagcctacaatgtttatttcagtcaatattcctttatctgggtgttctgtacaatgtttattacagtcaatattccttcatctggatgttctgtgaagatagccatgtttatgggggtcttagttttcaaactctggcaactctgtgaaaaataggagcaaactagagagccctggagattggtagtagggaagggaggatagcaggaagtttgaaaaattagcagccccggggcctaaaggaatcagctgtcatcattttcatcattattattttggttaggatggcttgaaaatcagaacgtatcttggtttacgtaattgaggtcttaaagaactaagaacagttaaatagtcacaactaccaccctctgacttacataatcattggtgtgggcttcgttttgcctttagagtcacatctttcagtaaattcacagagatcaagagggacgtgcaacatacagcttaaaggctgttatgcttcagggttgctgaagaagatgaaacatcagcctgccatcgtctagaagagacattggcagttaaaaattagcacctccagtgtagtcgcctggcactgcccatcatgctgagggagcagattcttcccaaggcagcttcagctaggagtttgtaagcaaggactttgtgacacatttgtcccctggaactgagcctttttaactgtccctgtgaatgaacaattttgagtgacctacggtttgtgttaattagtgttctttccagattccaggtaccgtagagagtatgttctttgtggtggttgtgccttttaagaacatttgtggccgggcacggtggctcacgcctgtaaccccagcactttgggtggccgaggcgggtggatcacgagatcaggagatcatgaccatcctggctaacacggggaaaccccatctctactaaaaaatacaaaaaattagccgggcgtggtggcaggcgcctgtagtcccagctactggggaggctgaggcaggagaattgcttgaacccgggaggcggagcttgcagtgagctgagattgcgccactgccctccagcctgggcgatagagtgagactccgtctcaaaaaaaaaaaaaaaaaatttgctttttctgttgtctccccagcttgtcaccagggggcgagcttgccatttccctgctggtaacaataccattctgtcaccatctactgttttaggcttccgttttgcagccgtcctgaaaggaaggcttgctgtgtaaatgaaggcttgtgagcacagcagccagcctctcaagttgatagaggacagggacttccccaagtgcacagaggagatttcaaaagacatcaaattcactttttaaaaatgtaaagtagcttttggtgtgcttaaactaggtcaggccaggcgtggtggctcatgcctgtaatcctagcattttgggaggccaaggcaggtggatcacttgaggtcaggagttcgagatcagcctggccaacatgacgaaacccctttctctactaaaaatataaaaattagctgggcgtggtgatgcatacctgtaatcccagctacttcggaggctgaggcaggagaatcacttgaacctgggaggcagaggttgcagtaaactgagactgtgccactgcactccagcctgggcaacacagcaagactctgtctcaaaaacaaaaacaaaactaggccaggtgcagtggctcacgcttgcaatcccagcactttgggaggccgaggcaggcggatcacgaggtcaggatttcgagaacagcctggccaacatagtgaaacctcgtatctactaaaaatacaaaaattatctgggtgtggtggtgggcacctgttgtcccagctattcaggaggctgaggcaggagaatcgcttgaacccaggaggtggaggttgcagtgagccaagaccatgccattgcactccagccaggtaacagagtgagactctgtctcaaaaaaaaacacacacacacacacacacaaaactgtaggtcaaaaaacatgaaaatatgttcaacatcactaattagggaaatgtaaatcaaaaaccacaatgaactcttaaaattcaacagtaagaaaacaacctgattaaaaacaggccaaaacccttaacatatctcagcaaagaagatagacaggtggcaaataagcatatgaaaagatgttccatataacatgtcatcaggaaaatgcaagttagaacaacagaccactatacaactattagaatggccaaaatccaaagcaccgacagcatgaaatgctgggaaagttggagcaaccagaactcttattccttgctggtgggaacgcaagatggcacagccactttggaagacagttaagcagtttcttacaaaaactaggtaagctcttaccatgtgatccagcaatcttgctctttagtatttacctgaaggaactgaaaacatgtccacacaaaaaccagcacatggatgtttatagcagctttatctataattgccaaaactcaacccaaaatgtctttcagtaggtaaatgggtaaataaattgtggtgcatgtagtcattattcagtgcttaaatcaagctatgacaaattatgagttatcaagctataagaagtcacagaggaacttaaatgaatgctactaaatgaagccagtctgaaaaggcttcatattaaatgatgccaactatatgacactgggatgtattctggaaaaggcaaaactatggagacagtaaaaagcagtgggtgggggaggggagggaggaataattggagcacagaagatttttagggcagcgaaactactctgtatgatactataattataaatacctgtcattgtacatatgtccaaccccctaaaatgtacaacaccaagagtgaaccctaatgtaaactgtggactttgagtgataatgatgtgtcagtgtaggttcatcaattactgcaaatgtacctctttggtgggagatgttgaaaatggtggagactatgcatgtgtggggacaacaactatatgggaaatctctgtaccctctcaattttgctgtaaacctaaaattgctctaaaatataaagtctattaaaaccac

SEQ ID NO: 17650 - DNA, 2410 bp, Homo sapiens
  CDS (112)..(1239)
atattgtttgacatcctgtctaatcaaaaagatttgaatttatcaaagtgccctggacctcttgctgttgctaatggagttgtgaagcagctacattttcaggaaaagcagatgcctgaagagccaaagctgactttggatgagtcgtatgaccttgttgttgaaaatgaagaagtcctaactttgcaagaaactctggaagcacttagcctctctgaatattttagcacttttgaaaaggaaaagattgatatggagtccctgcttatgtgtacagttgatgacctgaaggaaatggggataccccttggacccagaaagaagatagctaactttgtagaacataaagcagccaaactgaaaaaagcagcgtcagaaaagaaggcagtggcggccacttctacaaaaggacaagagcaaagtgcccagaagactaaagacatggcttccctcccctcagaatccaatgagccaaagaggaaacttccagttggtgcttgcgtgtcttctgtgtgtgtgaattatgaatcttttgaagttggcgccggacaggtttctgttgcttacaactcattagattttgaaccagagatattctttgccttggggtctccaattgctatgtttctcactattcgaggagttgataggatagatgagaattacagccttcctacctgtaaagggttcttcaatatttatcatccgcttgatccagtggcatatagattagaacctatgattgttccagatttggacctaaaagctgttctcattccacatcacaaaggcagaaaaagacttcatttagaattgaaagagagtctctctcgtatgggatctgatttgaagcagggttttattagctctctcaaaagtgcttggcagacattaaatgagtttgcccgtgctcatacgtcttcaacccagttgcaagaagaattggagaaggtggccaatcagatcaaagaagaagaagaaaagcaagtagttgaagcagaaaaggttgttgaaagtccagatttttccaaggatgaggactacttaggaaaggttggaatgtttaatggaggccgccgaattgactacgttctccaagaaaaaccaatagagagttttaatgaataccttttcgctcttcagagtcacttatgctattgggaatctgaagatactgctctgttactacttaaagaaatttatcgaacaatgaacattagtccagaacagccccagcattgatcaaacttcagttttactgtactttcttgtctgcacagaaagtcccagtacaacttccattgctgagaaaatcctcagaggactttcccacttcgctcctgtgatggatgacagaagagtgattcattaacaattgctcagccacaattctcggatatagggattcaaaagacaggatacagaactaacacagtgaaaaaaatcagtaccacatttggacagtataggtgagaaaacataattataaaaatgatgccatgaaaaattccacagatcagtttagttgtatagttgtcaaagttatatgtgatatcaatgaagaaatatttgtagcatgtaaacggttatttctgtttcttaaaaagtattgttagtgggctattaaacttggatttttctttttattaatgcagtatgttctttttattcaagtatgaacttgttgagaaactatagtaatatgatttttaagagatttatgttctacttaaaatgtgaattgtacttctgagctgccttaatgcaaggtcatttatatttgttaagaggaaataatcaagatcactcatatcccaactgaatctgaggttttataaatccctcaaacgattgctgagagcctgattgtggaaagaagtgagatgcaccttattttcaagaagtcctgggaagcgctctcctagcacgtccatttccaggaggagaagcaagcagatgagaggttttccattttgtcatccaaggtagctgtgcacttgccttgttgctgaagttccaataatgtgaaaaccaaagtagaggtttttttcttcttctttttgttttctattaatttcacttataccaaagtgtttgaaagtatgaaatgtgctgcttctgagttatataaggctacttcatgacaagactgctttgtaatatttcactttgttttactacaaattcagatcactttgttttactataaattcagattatccaaatattttcctaatactatgtgggaatgctgattttcttttgttacgtagtggaaacattttgcattgtttacatagttctcatggaacatggaaatttttgaaagtgatatatgatacacattttttgtgtatgtattctaattagtgtgaataaagcagtaacattaatgcattttttaagcagc

SEQ ID NO: 17651 - protein, 376 aa, Homo sapiens [sequence omitted]

SEQ ID NO: 17652 - DNA, 2876 bp, Homo sapiens
  CDS (1305)..(2501)
gatgctgaaattcagaagtcagcacttcagattgtcatcaattgtgtgtgtggcccagataaccgaatatccagtattggtaaatttatctctggtactcctcggagaaagctgcctcagaaccctaaaagcagtgagcacaccctggccaagatgtggaatgtggttcagtccaacaacggcatcaaggtgctcctgtccttactgtccattaagatgcccatcacagatgcagaccaaatccgggccctggcctgcaaagccctagtgggcctgtctcgcagtagcactgtccggcagatcatcagtaaactgccccttttcagcagctgccagatccagcagctgatgaaggagcctgtgctgcaggacaagcgcagtgaccatgtcaagttctgcaagtatgctgctgaactcattgaacgggtgtcaggaaaaccacttctcattggcactgatgtttccctagcacgactgcagaaagcagatgttgttgcccagtcaaggatctccttccctgagaaagagctgcttttgttgatacgaaaccatcttatttctaaagggcttggagaaacagcaaccgtgctgacaaaagaggctgacctgcccatgactgctgcctcccattcttctgcctttaccccagtcactgctgctgcttctcctgtctctctaccccgaacccctcgtatcgctaatggcattgcaactcgtctgggcagccatgctgctgtgggtgcctctgcgccttctgcccctactgctcatcctcagccacggcccccccagggtccgctagctctgcccggcccatcttatgcaggcaactcccctttgattggtagaatcagttttatcagagagaggccatcaccctgcaatggcaggaaaatcagagtgttgcggcagaagtcggaccatggtgcctacagccaaagcccagccataaaaaacagctggacagacatcttccttccccacctacgctggacagtataatcacagagtatcttagagaataacatgctcgctgcaagaatccagttgccacctgcccacctttctccctctttactcctcaccaatgtcctgagccaaaacagaggcggcaagcgccaataaactttacgtcaaggctaaaccgcagggcatcatttccaaagtatggaggggtggatggcggatgctttgataggcaccttatctttagcagattccgtcctatttcagtgttccgggaagccaatgaagatgagagtggcttcacctgctgtgcattctcagcacgggagcggttcctgatgcttggcacctgcacagggcagctgaagctctataatgtgtttagtggacaggaggaggccagctataactgtcacaactcagccatcacacatcttgaaccttccagggatgggtccttgctgctgacatctgctacttggagccagcctttgtctgcactttggggaatgaagtcagtatttgatatgaagcattccttcacagaagatcactatgttgagttcagtaagcactcccaggatcgggtcatcggcacaaaaggagacattgcccacatttatgatattcagactggcaacaagctgttgactctgtttaacccagatcttgccaacaactacaagaggaactgtgccacctttaatcctacagatgatcttgtcttaaatgatggcgtcctctgggatgtccgctctgcacaggccatccacaagtttgacaagttcaatatgaacatcagtggtgttttccatccaaatggactggaggtgatcattaatactgagatttgggaccttcgaacttttcatcttttgcatactgttcccgctctggatcagtgtcgcgtggtgttcaatcacacgggaacagtgatgtatggagctatgttgcaggcagatgatgaagatgacttagtggaagagaggatgaaaagcccctttgggtcatccttccgaacatttaatgcaactgactacaaacctatagcaaccattgatgtgaaacggaacatctttgacctgtgtacagacaccaaagactgctatcttgctgtcattgagaatcaaggcagcatggatgccctgaacatggacacagtatgcaggctgtatgaagtgggcaggcagcgtctggcagaggatgaggatgaagaggaggaccaggaagaggaagaacaggaggaagaagatgatgatgaagatgatgatgacaccgatgatttagatgagcttgacactgaccagttgctggaggcggagttggaggaggacgacaataatgagaacgcaggggaagatggggacaatgacttctctccctctgatgaggagctagcaaaccttctagaggagggagaggacggggaggatgaagactctgatgcagatgaggaggtggaactgatcctgggggacactgacagctctgacaactctgatttggaagatgacatcatcttatctctgaatgagtgaggagccatcactgcttggaagagattcttggcaggcgagaaactgagtcaaatgaattcagaacatattcccttctctttctcccagggctgtctgtcttttaaggagctgcatgccctgcattcagaagattatggcttagagagcctcattggcacccgagggtccttccagaatcaataaccaccacaaaaatgacaacagggactaggccctactctgcaccccccacatccaccccccaccatttcctaggatggacatatctttcaaggggaaaaaaaaaccatgtctctggggtatttcacaatatattttctttgtatagtgttctttacttaaagaacaagaaatagttttttataaaacttt

SEQ ID NO: 17653 - protein, 399 aa, Homo sapiens [sequence omitted]

SEQ ID NO: 17654 - DNA, 2677 bp, Homo sapiens
  CDS (240)..(1001)
gtttttacctaagcaagcctgggcaatggcgggcgtccctcccccagcctcgttgccgccttgcagtttgatctcagactgctgtgctagcaatcagcgagattccgtgggcgtaggaccctctgagccaggaactgaagttaaaagatgaagaatgtgagaggctttcaaaagtgcgagatcaacttggacaggaattggaagaactcacagctagtctatttgaggaagctcataaaatggtgagagaagcaaatatcaagcaggcaacagcagaaaaacagctaaaagaagcacaaggaaaaattgatgtacttcaagctgaagtagctgcattgaagacacttgtattgtccagttctccaacatcacctacgcaggagcctttgccaggtggaaagacaccttttaaaaaggggcatacaagaaacaaaagcacaagcagtgctatgagtggcagtcatcaggacctcagtgtgatacagccaattgtaaaagactgcaaagaggctgacttatccttgtataatgaattccgattgtggaaggatgagcccacaatggacaggacgtgtcctttcttagacaaaatctaccaggaagatatctttccatgtttaacattctcaaaaagtgagttggcttcagctgttctggaggctgtggaaaacaatactctaagcattgaaccagtgggattacaacctatccggtttgtgaaagcttctgcagttgaatgcggaggaccaaaaaaatgtgctctcactggccagagtaagtcctgtaaacacagaattaaattaggggactcaagcaactattattatatttctcctttttgcagatacaggatcacttctgtatgtaacttttttacatacattcgatacattcagcagggactcgtgaaacagcaggatgttgatcagatgttttgggaggttatgcagttgagaaaagagatgtcattggcaaagctgggttatttcaaagaggaactctgatgctctgcgtgggaccatgcctgaactccccgaataactgaaaaatggctgaatatttttatggttacttgatatttatttccaaggagtgagcctaagacttttttccccttttgcaaattgctctaagaagtaccatgatttcttttaaactgatctatgctgtgtttgcttattctttagttgaacacactatgaagaattccaggtgtactagtgaatgtaatttatagttgccaaaaaaaaaaaacaaacctgaaataaataaatgttagattgaatgtgtgtacattttctcttctagctctgacatggcatttagggttagcagaatgtattaaatagtaattttcaaactacacagtagcttccttccttgtgagaggcaagaaagaagtctgagtggatagtactcactttccaaggcccccacctctagaatggctttatttttatctgttttctatattgggtttcaaaaaagattttatttgaagaaatacttctgctgctacaaagtttgaaagttactattttaattattctgctctctgtaactgaaagaatccctttattttggttattcattaaaatataatagaaggcagtcagattttatcccagagatgtattcctgagtgtcttgatatagtgtattcatgttttatatgtgttgaccactatattgtcattggagggacatagatgtaaatgagtttgacgtgtgtcaaaggggtttaaaggggtgtggattgaatgaatggtacgtgcgaagtatatgctgattatagaaccacttgatctctgcattccaatttgtaaaactgactcaactggagaaattataacaaagaggtttgtggtagaaatgtaataagtatagaaaagcaaaaagaaaagagaaactgctttagtttctgtttagagaaagctgctgttaatatttttggatagtagcctttcagctttcagatattttctacttacatatgcatatttttgaaacaaaaagtaggctttttttttgctttttaaacctaaacattaaatatattttcccttgggtaaacctacacatcctaatccctgtttatagaattttaacataatttaattgtgtttggagatgaggtggttttcagtttatttttcatattataatgctgtgacgagtatccttatctgtacacttctgaacattgtggagttctttcatgtggatgcctggagataaaattgtgtcgagatatatatgtatttttaaatgtttgatctgcattgctagattgccatccagaaaagttaatcaatttgtattcacagcagcagtgtacaagagggctggttttctgaagataacatttttttcagtcctgttcagaggtttggtcaatcttacctgtagatgacttcagccaccaggctggatgggagcccacagacaaaaggacattggtgtatgttatggtgaaaaccatcagtaccatgcctagctcaagaatgtgaaattgaacctgaaaaaaactttgaacctacaattttatgttctgaaaatagttattctaatgtgagggcattaataagaatatgtaccatcaaagcatcagaagattttccatacaaactaaaatcacttttggagaaagtacctaaataaaaagagaaacaaatcc

SEQ ID NO: 17655 - protein, 254 aa, Homo sapiens; identical to SEQ ID NO: 17278

SEQ ID NO: 17656 - DNA, 3066 bp, Homo sapiens
ataacatgattcatcaggtgccaattaaatccctccctcaagaatggctttggtgtgaaacgtggtgtgatgacgcctctaagaaaagggcaaaaaccattgatttgtgtaataatccgatgaccaaagagccgaaactggaagcagctgtgcggattgtcccggagtggcaggactacgaccaagagatcaaacagctacagatccgctttcagaaggagaaagaaacgggagcactgtacaaagagaagacaaaagaaccaagccgagaaggtcctcagaaacgtgaagaattatgatctctggagaaggacaggaaatcaccccatttgaaaaacagtttttataataaatgctagttttttctgatctgtctatacaactgctgataagccggctgggcaggagtgccacaccttttgattctgagcatttgattctgacttctgtactctggtggccactggatctttgggattaaagctctgttggatttgtacctcagaggaagaccaagtggctgatcctttggactctgtaaagagcattcttctagtcagagggtggaatggcagcagcaactggaagaaaatgagttttttggtgcccacacccaagagcacacacatgctgcactgtctcggaaagcagggccagctagagccaccatgttcttccttacctcagtttacctgcggcctgcgctgcactgcagatgcccaccctgccctgggtctggccggcggaagctctgtccaaggtccacacacctccaggtttacgccaacatccttgtgccctccccaccttctcttccaacgcattaggtgcattgtttaattgaaatccaaccaacaattgtgtgtcaaggctggtttggtgcagtggctgggcaaattaattttgggccaggatgggggtgggttgcagtgagggtagggaaaatgtcaggagtaggaaggttcgggggttaagggaagggaaggaagaccagaactggccatcctcttttataatccattagtagcaccatggctcatttgaaatgaaaatattacacttattccccacccaaccgcagtgaactttctaggtaattgttttgaaaacaatttttgtatctgtgaaagtctttgctttttctttccaccttctagaaaagtctgctaccagtttccttactgaatacagccatactcagcccctctcgcatccagcccgtcagggtcagggtcagggtcaggctccctcaagacgagcaccgcattgtctgccctcttttgcgtaggatttttctctcagacccaggggacattgccttggacttttctctacaaatgccctcagatgtaagaccagaaatgattctgcttgtggaactcgtggctttctgtcctattttccttttatgtgagccctgcaggttgcctttggcgcccacaccagttctgtcttcatgtcgctgcatcgtgaagccccatttgcctttagtccctgctttgtgtgtcttcacttccacagccagtgttgcccctcagggcatactttgctggtgaacgggctgtagagtcttgagtatgttattggcctaagtgggcatgaggccccagcatccgactccatctgccaggctgcagggcacagcagcactggcatagacaggcacgctctgtcttccaacgtgcaccagccttttcttacatattttgcctgtttttaaaaaatacgaggagagggtgcagatggatactgtgccctcaccctcctaagccaggtaatatattgatgtgcagacttttaagaaatcttagtcttatcacaaatatcaagtaatttattttttccattttcaaatgcaaaagttagcctaggaagcctcccagtcatcctgaaggaccttttgactttgcttttataattctgttaaaaattgaggaggggattaatgagtacaatgaaaacaaaacaaaacaaaaaattaagaagaggaaagctcaaaagaggataagagactgaaaaggcacctcagaatggctgctgtgggcagagtctgtgacatgactttccccgccctgcccctctgttcagagcagctggaaagatgggaccagtaagattaaaaaacttttgttcggccaggcgtggtggctcacacctgtaatcccagcactttgggaggctgaggcggacggatcatgaggtcaggagttcaagaccagcctggccaatatggtgaaaccccgtctctactaaaaatacaaaaattagccgggtgttgtggctcaccctctattcccagctactcgggaggcagagacaggagaatcgcctgaacccaggaggcagaggttgcagtgagctgagatcgtgccactgcactccagcctgggtgacagagcgagactccatctcagaaaacaaacaaacaaaaagaaacttttgttcaagctgcatcttcacattgaatgaaagcattcagacgggtgactgctgctgtccacaactgtgggcggaagtgtgccttttcccagtttctcgtccaggaggttgcatagcaaatactcaagtcactgggatatatgctttccaaatgctggcccccatagcacctttccccatgtctttctaccaagcctcttatgtttaatctgtgcagggaagacaagagtagaccatattctctgtgtgctgtgcatgtcctggtgtcactcattgcctcttatctgtcgccattctaatataagtcagcttaatagttgactctgaataatgcaaaacccagcttgcttccagaatggcctaggaccctcctcctcctgccagtttttttttttttttttggttcatgtggcataatcatctttcaaaattaaccaaatgccccagaaaatgatgttaccactaaaatattttctccaagaaggcatactgtaacagaaaagataggtaagatatttttttcccaagaagtaagaattgattgtgctgaatgttcaaactctggaaactgttcacagtatgttgttcttagctgttatttatataaagtgaattattttctctctc

SEQ ID NO: 17657 - DNA, 2382 bp, Homo sapiens
  CDS (339)..(1067)
ccccgcccctggagccggcggcgcagggcgcagcttcccgccgccagagcgggccagcctgctgcgtgcgtgcgtgtgtacgactctgcgtgcgtgcgtgcgtgcgtgcgtgccgtcagctcgccgggcaccgcggcctcgccctcgccctccgcccctgcgcctgcaccgcgtagaccgacccccccccagcgcgcccacccggtagaggacccccgcccgtgccccgaccggtccccgcctttttgtaaaacttaaagcgggcgcagcattaacgcttcccgccccggtgacctctcaggggtctccccgccaaaggtgctccgccgctaaggaacatggcgaaggtggagcaggtcctgagcctcgagccgcagcacgagctcaaattccgaggtcccttcaccgatgttgtcaccaccaacctaaagcttggcaacccgacagaccgaaatgtgtgttttaaggtgaagactacagcaccacgtaggtactgtgtgaggcccaacagcggaatcatcgatgcaggggcctcaattaatgtatctgtgatgttacagcctttcgattatgatcccaatgagaaaagtaaacacaagtttatggttcagtctatgtttgctccaactgacacttcagatatggaagcagtatggaaggaggcaaaaccggaagaccttatggattcaaaacttagatgtgtgtttgaattgccagcagagaatgataaaccacatgatgtagaaataaataaaattatatccacaactgcatcaaagacagaaacaccaatagtgtctaagtctctgagttcttctttggatgacaccgaagttaagaaggttatggaagaatgtaagaggctgcaaggtgaagttcagaggctacgggaggagaacaagcagttcaaggaagaagatggactgcggatgaggaagacagtgcagagcaacagccccatttcagcattagccccaactgggaaggaagaaggccttagcacccggctcttggctctggtggttttgttctttatcgttggtgtaattattgggaagattgccttgtagaggtagcatgcacaggatggtaaattggattggtggatccaccatatcatgggatttaaatttatcataaccatgtgtaaaaagaaattaatgtatgatgacatctcacaggtcttgcctttaaattacccctccctgcacacacatacacagatacacacacacaaatataatgtaacgatcttttagaaagttaaaaatgtatagtaactgattgagggggaaaagaatgatctttattaatgacaagggaaaccatgagtaatgccacaatggcatattgtaaatgtcattttaaacattggtaggccttggtacatgatgctggattacctctcttaaaatgacacccttcctcgcctgttggtgctggcccttggggagctggagcccagcatgctggggagtgcggtcagctccacacagtagtccccacgtggcccactcccggcccaggctgctttccgtgtcttcagttctgtccaagccatcagctccttgggactgatgaacagagtcagaagcccaaaggaattgcactgtggcagcatcagacgtactcgtcataagtgagaggcgtgtgttgactgattgacccagcgctttggaaataaatggcagtgctttgttcacttaaagggaccaagctaaatttgtattggttcatgtagtgaagtcaaactgttattcagagatgtttaatgcatatttaacttatttaatgtatttcatctcatgttttcttattgtcacaagagtacagttaatgctgcgtgctgctgaactctgttgggtgaactggtattgctgctggagggctgtgggctcctctgtctctggagagtctggtcatgtggaggtggggtttattgggatgctggagaagagctgccaggaagtgttttttctgggtcagtaaataacaactgtcatagggagggaaattctcagtagtgacagtcaactctaggttaccttttttaatgaagagtagtcagtcttctagattgttcttataccacctctcaaccattactcacacttccagcgcccaggtccaagtctgagcctgacctccccttggggacctagcctggagtcaggacaaatggatcgggctgcagagggttagaagcgagggcaccagcagttgtgggtggggagcaagggaagagagaaactcttcagcgaatccttctagtactagttgagagtttgactgtgaattaattttatgccataaaagaccaacccagttctgtttgactatgtagcatcttggaaagaaaaattataataaagccccaaaatt

SEQ ID NO: 17658 - protein, 243 aa, Homo sapiens
MAKVEQVLSLEPQHELKFRGPFTDVVTTNLKLGNPTDRNVCFKVKTTAPRRYCVRPNSGIIDAGASINVSVMLQPFDYDPNEKSKHKFMVQSMFAPTDTSDMEAVWKEAKPEDLMDSKLRCVFELPAENDKPHDVEINKIISTTASKTETPIVSKSLSSSLDDTEVKKVMEECKRLQGEVQRLREENKQFKEEDGLRMRKTVQSNSPISALAPTGKEEGLSTRLLALVVLFFIVGVIIGKIAL

SEQ ID NO: 17659 - DNA, 2366 bp, Homo sapiens
cagaagcagtagtccaaacctagtatagggaaaggataaaaataagtcaccttcaccaagagatgccaatgattaccaaacaacagacaattgccaaatactggtttctctttcccctgaaaatggcttttgttctcaaatgataagagagctaatacatttagctaatattctagctctctttattatggaacagatcttgatagatggtttaattttctcctaaagagaaataatcagttgagaatttgagaatgggttgtaattatcgctcacccattgggatggttcattgtttaaatatggcattttccccccttcagctgcaggttcctgagatttggtgcctgtgagctctgattgtaggaatgcatgtgacagtcccagtcctatggtaatgacttaggaggaatgcagataaaagtaccttgtaagataaatataaattggagttaggaatttcatgaacctcactatgaccaaaattaattttttgattcagtttgtctgtctgtctgtccttcccctctcttcttttttcagggtgaggtgctgtgtttcttatttcatacgagataaaacagagagaagttctctcttctccagcttgtccatttccccacttgaagaaaacttttgatatatatgccttactgagtacatgccccctttaatgttaatatgacttggagtaatttctgaggtttactgacaaacataaaaatccctttaattgtagtgtagttgttctataaaccatattttttcatgatgtggatattttcttctatttctttgtcttcatttaatttggtggtggtgaactttacttgctgattttcttttatttttcactgaatgaagtttgtgcttgaatgaagagtgtatcttaaaccccctttttttggacaggctgcacttggataaaataggcaccactgtgttgatatgtaattaaattcataactatttatgaatgtgaccattgttaaatttaattatagtgtctttcttgaatttcagtctgctgctttgtaaaaaataactgtaattgatatttcatttttaaaatttataaattccaatcattgtcattcaagttattagaaatgagtcacggcactaactcatggttctatactcattttaagaaattgtaaaggttgaggtgtatttggtgactttctctgagacacagatgaacgttggaaatagatgagaaatggatgcagaataatgcagatagtgatcccatgtttgttaattgccatcatggaagtcagagaattaaccaattaagtgacggtaactattttttgtataccttgttctttgtgatctataaaattaaactggataaaatgttaattgggggtagggaaaaagctttgttttaagatttctaagctaattattttaccgttttgttgaccttgtacacaagaatgagattaatctgtattatataagaaaagaactgataaatatttataaaatgacaaacttggaccacaggctttcttgaccttgtacagtatagtaaaaataccctttacttctgacattaaggtcacgtcctatagtttgggggctcttttacttcaaaggtgtgtttctgccctcttttggttgtatcaaatttatttgaaaattgttttgtgctgtactttatgacttgtttccctatggtggtaaagaatgatgccatagtcagttttattgacattgttagatgaaagaaaagtagctgtcaacaaggggaaagtgaaattgagcaattcactgtttcaggatacttgaggatctttagtgtactgctgactctttttcttgttttgtctgccattcttgaaagtgcatcttgagagcccccatttgttgtgtagagatatagcagctgaagcaggacttcattccagatagctgtgtgcatttatgtcatgccaattactataacatttccaaagtatgaaaggtctttcaggcttatgcatgatattgtgggtgacttcatgccccagcctttctccccagcatacagtgagctgccttttggggagcaatgccatgataaggagcatacgtgcatgttttccgtactttcagaatagagtgccttagctaggccagaggctcgtattgtgtttctgctgaccaaagttgcatacacctgtaagaagtgtctttttaggttatggtattaaaaaagtcgtttcaggcttatcagataataattctcctatatttgaggggggcatgggataaaaagatttaataatacctggatagagaatgctaatgctgccttttgtgatcctttaatattatccatgcttttataaagtgcagtacacattttgacattg

SEQ ID NO: 17660 - DNA, 2389 bp, Homo sapiens
  CDS (528)..(2267)
gggccgaggcgcgggagaggcggtggacaccgagaagcccgccggcggcttgcaattccctcacccggcgcgcgcctttcgcagagggaaggagcaagagggcccctacctcatcgtgcgcgggtggggtcggcgcttgtcgcgtgtggcgcgcagtggggcgggcggcgggaggggggtggcagtggagggagcgagaggtgcaggggtgactttgttggcagcaggactagctggagagctagacctggaagcgcatccggggaggacttgcggggcagaggagggcgtgggcgtgtctggtatgggatgcagtggaaaggagggggccctcctgagtagatctgtgggtgattccttcgaggacgcctcgtcttcccgtctgcccttttatttgtcagcgagggagtccccatggtctctgttcaagttctggaaactttctctttgggtgggcttaatcacctgctactaaatcgtagaactgcccagggccctttctaatattggtcacaaacgtgaggagtatgtcagaaaacagaaaaccgctgctgggctttgtaagcaaactcactagtgggactgcacttgggaactcaggcaagactcactgccccctgtgcttggggcttttcaaagcccccaggctcttgccttgtttgcatacagtttgcaccacgtgtctggagcagctggagcccttctcagtagtggacatccgagggggagactctgacacaagctctgaggggtcaatattccaggaactcaagccacgaagtctgcagtcgcagatcggcatcctttgtcctgtatgtgatgctcaggtggacctgcccatgggtggagtgaaggctttaaccatagaccacctggccgtgaatgatgtgatgctggagagcctacgtggggaaggccagggcctggtgtgtgacctgtgcaacgacagggaagtagagaagaggtgtcagacctgcaaagccaacctctgccacttctgctgccaggctcataggcggcagaagaaaacgacttaccacaccatggtggacctaaaagacttgaaaggctacagccggattgggaagcccatcctgtgtcctgttcaccctgcagaggaactgaggctgttctgtgagttctgtgaccggcccgtgtgccaggattgtgtggtgggggagcatcgggaacacccctgtgacttcaccagcaatgtcatccacaagcatggggactctgtgtgggagctcctcaaaggtactcagccccacgtggaggccctggaggaagccctggctcagatccacataataaacagtgccctccagaagcgagtggaggcagtggcagctgatgtccggacattctcggagggctacattaaggccattgaggagcatcgggacaagctgctgaagcagctggaagacatacgggcccagaaggaaaattccctgcagctgcagaaggcccagctggaacagttactggcagacatgcggactggagtggagttcaccgagcacttgctgaccagcggctcagacttggagatcctcatcaccaagagggtggtggtagaacggctcaggaagctgaacaaagttcaatatagcacccgtcctggagtaaatgataagatacgcttctgtcctcaggagaaagcaggccagtgccgtggctatgaaatttatggtacgattaataccaaagaggttgatccagccaaatgtgtcctacaaggagaagacctccacagagcccgggagaaacagacggcctctttcaccctgctttgtaaggatgccgcaggagaaatcatgggcaggggaggagacaacgttcaagttgccgttgtccctaaagataagaaagacagcccagtcagaacaatggtccaggataacaaggatgggacatactacatttcctacacccccaaggaacctggcgtctatactgtgtgggtctgcatcaaagaacagcatgtgcagggctcgccattcactgtgacggtgaggagaaagcaccgcccacactcaggcgtgtttcactgctgcaccttctgctccagcgggggccagaaaaccgctcgctgcgcctgtggaggcaccatgccaggtgggtacctaggctgtggccatggacacaaaggccacccaggtcatccccactggtcatgctgtggaaaatttaatgagaaatctgaatgcacatggacaggtgggcagagcgcaccgaggagtctacttaggactgtggctctctgatgggtttgtgctcagccttttaaagctgcaggcagcaccacttgagatttccagaggacccagacctttgttcattctaaagagactgatagaattaaaaacaaagtgccttatcttgc

SEQ ID NO: 17661 - protein, 580 aa, Homo sapiens
MSENRKPLLGFVSKLTSGTALGNSGKTHCPLCLGLFKAPRLLPCLHTVCTTCLEQLEPFSVVDIRGGDSDTSSEGSIFQELKPRSLQSQIGILCPVCDAQVDLPMGGVKALTIDHLAVNDVMLESLRGEGQGLVCDLCNDREVEKRCQTCKANLCHFCCQAHRRQKKTTYHTMVDLKDLKGYSRIGKPILCPVHPAEELRLFCEFCDRPVCQDCVVGEHREHPCDFTSNVIHKHGDSVWELLKGTQPHVEALEEALAQIHIINSALQKRVEAVAADVRTFSEGYIKAIEEHRDKLLKQLEDIRAQKENSLQLQKAQLEQLLADMRTGVEFTEHLLTSGSDLEILITKRVVVERLRKLNKVQYSTRPGVNDKIRFCPQEKAGQCRGYEIYGTINTKEVDPAKCVLQGEDLHRAREKQTASFTLLCKDAAGEIMGRGGDNVQVAVVPKDKKDSPVRTMVQDNKDGTYYISYTPKEPGVYTVWVCIKEQHVQGSPFTVTVRRKHRPHSGVFHCCTFCSSGGQKTARCACGGTMPGGYLGCGHGHKGHPGHPHWSCCGKFNEKSECTWTGGQSAPRSLLRTVAL

SEQ ID NO: 17662 - DNA, 2731 bp, Homo sapiens
aagaaaaagccgggtgaggtggtgtgtacctgtagtcacaggtacttgggaggctgaggtgggaggatcacttgagcccaggagatagaggctgcagtgagctgtgatcgtaccactgcactccagcctgggcgacaaaatgagaccctgtctcaaaagaaagccctctccttagctgagcagaggaagggaaggagtgtggctatgagaatatgatttatgccattttctgtttttaaatctagaagatcttctaagcacaaatacagctacaatgaaatattttacagacaaaatgttaatagaccatattctttgaattaaatttgtttttaattttctctacacattttttttttcctggagtctcttagctctaaatatatcaatcagatttatattttttttacctgattcagatgtcttacatttttatattaaatgaaccttaagcatgattcttttggtaagccagtatgaatgccagtggttggggggcgggggggggagtcagttgacataagatttagtcctaataaggactctgtattcacttgattattctgacccttcctaagggagggaggtggattagataccactggaggcccattctgtattcctaatccagtctcagcactttattcatacaaaataatcaaaataggttttctacaccaaatgctacccaggcagtgctctataatttatttgcacacctgtatgtggggtgccatgttagccactaaatctgaacttttaccctgctttcatcatggatttttttgtgtaacctgaaacaagtcaccaatgctcactgtgcctgtttcctcatttgcaacaagaggataattccgacctacctctgaaaaatgtgtagattaaatgagtttttaaagcactttagaaaatataagggagaaaatgatttcttaagatatcactgcctaatatagacaggtatatttgaaagctaaatacaggttaatgcttttgataatgtattgttcctgttgcaaatttaagcattatatgttaggagactaaacattgaaaactttcactgatttttaaattggagtaatagcctaaataagtgtaaataatctttatcaaaatttagtgtttatctacaaagatgcgaatcagtcaaggggaaatgtgtatgcaatgtgtgtgtatatgatgtatgcgaacatatgtgattttggggtactaaagcacaaaaaaatcccccataaaataaaccttcctgaaaagactgatcataaactttttcactccaagcagatgtgaatcaagatgttaggtttatggtgagttagctttgaggtgtgttgccctaatactagccagcgttgttgtagccatattccctgctgctgcacgccgaattgaaaatccatctcttacctcttctctatgaagcaagccaggtatgtcttgcttaagtatttcttctccatgaatggccttaacattattttgtattcacgtgtactgtttaactgagggtctcaaagcactttaaactgttgtgttctatttccactcgtctggcctgcctcatttttctaggcccttttgtaagctgtaattttttattaccactcatgttctttctacactgacactattcattaagaacatcaagcttcatctctgcttacagaatctcaccttattgagtgggttccactttatttttcatttgttatctacattttgaagggtttatgtgcaaagtgaaaacaaattttgaaaaataagacaaatccattctcttcttcaattcagtctaatatgcattgtagtgtcttttaatcagtcttatcctctaagtcaacttcattttcctctttgtgaatacccatagcaatatgtaagattttattgaagtttcctgtgataactgaggaacactttgctatgcctcactgcccaatagggtgggtcatcaattaggagaaatcccaaattataaaagccaacatatgccgtgacctacgtaggaaaagatgtatttgtgcatcttctttctgggtagttaaaaattactccctcttttctctagcgttttgacatttcagactcaatgctctgatctctagggagtgtgattattcaaactaatgagaggacaagaagacacagttttagaatctactgctgctaaagcacattaaaaacaaatcctggtttttaatgtatgcatagtttcatatttaatgaatatgctttcattaaatagggaggtagatttgaaaaaactgttataaagaaatgtgccttttggggaatgaatacttttgttcatgtctagcccactgggaattttgttttcaccttatactgagtcctttttctaatgtaaaaatatttcttccaagtttgatttctgtatcagggtaacatcgagaacacacatatttctgtttgaggatttgtgacttcctatggaaacagtcttgcatctatgtatttacaaatgaaatttaaagtattcttaaagctttgccttaaatactgcttgcatactgatttacttaatgctaagcatggcaggggttataaatttaaatactataagacctggctgaatcccagatgtatcaataaattgttatagtagcttatggaaaatgctattaaagataaattttcatacattgtatttttagtcaagtaaaatatggatgaaaattaataaagtactgtcaagggaaaaaat

SEQ ID NO: 17663 - DNA, 2523 bp, Homo sapiens
  CDS (1033)..(2205)
agtccgctccggcagcgcgctctgcccggcttcctcagtctcctcgccgggagcgtccgggagcagctccgaggccgcggcgaaaccaggtggagtccgaggttcggaggagtatcagaggttaggggaaggccggagaatgggctgggaggctgcgtttcggagcttagggttctgtccctgcgatcgccgcgtctccctcccttggtgggcgcggctcccgggaagcggctcgtctcgtctcccctcacaggccgggttcccgttctggaccttcgccctcggaacacagtgctgttggccgggactccttcccgaggtggacggctccctgttcttattcctggctctgccagaactgtaggaagtgctcagtacactttagggcatgcatggcactccctgggagacagtgctttagggccagaggaaagatcttccctgaaggcaaacgcccgcggagcccacaagtccgggccgcactgaacaagtcaggatgttgccatcggcaattctgcagaaggcagtaacccatctgagagaaagagccgctgtcataaggtctcttgcttgagctgctgggttgagaatggagctggaagagggaactgatctcggagctccttggggatcttggttatgtttgacccttttactttcagggagcagggattggatcaagtcattgcatctagagtacgggggaacgaagaaatcatggagagagtttgccccaggagagaggcgagcgttatgtaacctaggatctggggtgggtaacagtctgtgcagtgtcaatgtgagaggagaaaacacccaacgtgagggaatggtcaggtaagaaaggaccagaagttccggttctaccatagcaaggacctaagttgctaatttaggttctttaatgcagacctggtctttcagaacttctttctcttccctagccttgtcatttcagcattctggccttccctatgaggaggaagatcaacgaagtcacagggcccttctagcccaatccagagctgtaccatggcagagacaagagaagaggagacagtgtcagcagaagcctcagggttctcagacttgagtgactcagagttcctggagtttctggacctagaagatgcccaagagtcaaaggctttagttaacatgcctggcccatcttctgaatcccttgggaaggatgacaaacccataagcttacaaaactggaaaagaggattggatatattatcacccatggagagattccaccttaaatatttatatgtcactgacctggctactcagaactggtgtgaactgcaaacagcatatgggaaggagcttcctggtttcttggcacctgagaaggcagctgtgttggacactggtgccagcatacacctagctagagaactagaacttcatgatcttgtgactgtcccagtcaccactaaagaagatgcttgggcaattaagtttctgaacatacttttgctgattcctaccctgcagtcagaagggcacatcagagagtttccagtgtttggggaaggggagggtgtacttcttgttggagtgattgatgagctgcactatacagccaagggggaactggagctggcggaactcaagacacgcaggcgccctatgctccctctggaagctcagaagaagaaagactgttttcaagtcagcctatacaaatatatctttgatgccatggtacaaggaaaagtgacccctgctagcctaatccaccacacaaagttgtgtctagaaaagccactggggccatcagtgctgaggcatgcccagcagggaggcttctctgtgaagtctttgggtgacctcatggaacttgtcttcttgtctctaacactgtcagacctcccagttattgatatcttgaagattgagtatatccaccaagagactgccactgtgctgggtactgagattgtagccttcaaagagaaggaggtgagagccaaggtgcagcattatatggcctactggatgggccaccgagagccccagggagttgacgtggaggaggcttggaagtgccggacgtgtacctatgcagacatttgtgagtggagaaagggcagtggagtgctcagctctacactggcgccccaagtcaaaaaaagccaaatgaatagaaggtatgctttcaagaatgttgatccttcctgctcctgttgtacctaagcaaaagaggaccagtctctgagcttggcttttatggagagtgttcttattttggttcttttttttatttccacaacctctaaccacattcagtccaggaccaaggctcagggatgagtgggagagatgggttatactgtccctggagcttcatcatgattgcctgagaagacagatgctcatcatggctggaatgaaggtatccttcagtaaactttgctttcctaagaaaattcttcagtttctgataagtcatccctatttttatcttgatcaaggctttctacagttacataataaaatgaaatgctgtcc

SEQ ID NO: 17664 - protein, 391 aa, Homo sapiens [sequence omitted]

SEQ ID NO: 17665 - DNA, 2268 bp, Homo sapiens
aacactacctttgctgtaatttcatttgagattttctaagggtagaatttggtctcaccaacaagtgaggatatagccttatctcatggaggacgagctccgtatttactcaggagcagtcagggtacattacataaaacaatggaggatgcctcattttagcaaactaggtttctttgtattcttcagtccttttacagaattgatgtgctaactgaatatcattgcagcaactagactaagatattcaagatctctttattggggatgggagaaatagggaaagaaatgtgtataagtaattatgatattgcaaaagtgatacttagattttacagcctcagtagtctgcccagtgtccacattaatgaaggatccatgtttgtagtgagagaaaaaaaccccaaggtaacccgatatgatttaggatgcatatcagttctaacaattcaatcagaagtcaagctcattggaattccttttttaactgatccaaatactagtagaagggggagggagaggtgttgggtttttttttaagtttttatttaattttgttggttagaatttttttctgtttttggcatcctacataataccccccttcttgactttttctgataattagctgatattcatggttgtttagcacacagttcaggacctttgagatcatgtttgtataagcactccttgaagaatatctaagctttttctgagatgggcttttaaaattataataagggaagtttattttctgcggtttttgcaagaataagcaaagcccatggaatttaatttttcattgtgatcagattaaaattactatttgtgcaaaacaaattccacaccacatgtactgtatattctaatctgctgagaaaggtggtcaggcccttctaaatgcttaaccaaaaacaaacattattggagtttcagtgtaaaataaaattaaaattggagggttggttagattgatttcagatggatactaacagtttgaggggaggtccagatatttccaaggcataaattcttgcctggaaactttggagcaattaattaaattaggttaagttttccctcagcaacctgtgtgttcaaaggttaggcacaccattgctgttactaaaatacatgcactgctcattcttgacatagcttgggtgtgggttcctcttgttttggttattttgtgtagcagtttaatcagtggataactgagcctgtttcctcttagctttctagacttcttaacagaaaaaacagtttgggttcaatagcattttatgattctacaatattttgtcacctagctggaagttgcaataaaaattccttatgaaatatatggttttcatctgtaattgaaggaaatcatagaaagtttgctgaaagcaaagggctaagcttatgaaggaatgcctcctttgttacacactcaagaatttgtcagcacacaattaattgcagccatagtacctttttgcgtaatgtttgggatattcagtagcccaggattgctacaaaaaggtcctttgagaaaattaatttgtgcttgcttttatcccctctcagaaagacatcactaaaggcccattaaaaatctggccctaaaagttcaacttttgtagagtttattgttcagagaggtttaatcctatgtggtagtctatataagtgatgtatgagttgagttatgtaaattttgtcattgtagtgtacatggagtgatcattttactaacataaatattttctatgtgtgtttcagtggatgacaatcgagcagcagaagaatggtgtgcctaccctttaatgctgcagtttaagagaacttgtattgtgtcatttcagattgtaggctgagagttgtaaatagtgaaaatttgagtacttctattatttgttttggttagaaagtgaatttaaaaaacaaaccaaactctaaactttctcagattaaaagtcctgagacctgaagattgtaatattcatgtctgtgaagcttttaaacattacacttgagatcagtcatgacttgatattcaggtaaattttcttttccaagaagcttttgaataagcatatttcctccaaaggtctctctctttctctctctttttttgagtgtagattattttaaagcactaattgcattacattggtaactgcaatataaaatagccattattgttttgtgaagcatggttgaaattagctagtggtcccttttgaatttcatgagcctctcaaaaaagaaaaactt

SEQ ID NO: 17666 - DNA, 2931 bp, Homo sapiens
  CDS (333)..(722)
atgcgaggctggggccggttgcctaccggccgcttctcgccgaggcagtccagacttttcccccggcggtgcccgctccaagacagcatctgtcaacgctcctcttctcccctcctcctcctgccgggccgggctccgccggctgcggccgagaggacgcgggacccggcgcggtgagcccatcagctgtcaggcgagcggcgaagcggctggagggcggcgagagacacacaaagaacgcggtgggcggcggcggcgaaaggggacggcaactcctccccgcgcccgccggtgccaccgccggccgtgcttgttccgaggccgcgcagacaatgcggccgggctcgtccccgcgtgccccagagtgcggagcgcccgcgctcccccgaccccaacttgaccgtctcccggctcgcccagccccctcccggggtaggggcgccccctccctccggtggccggcgaaggaagtcggtccgcggccgcagatcccggcaacttgcgaaccgggaaaagtttgcggcgcctccgcggggcggcgcgacgcgtcccgcccctcgcgtccgcggtcatcgcgggtgactttctcgactcgtcgtcagccggggccgcagcgcggccggtggggactgcggggcgggccggagtccgtccgaggtctcccgcacctcgggctgcggatttcaggtactccactgggcattttctcttcatggagcttatagcaacaaaagtgttttacaaaacaccagacatgttggcatcatctcttagttgggccatgtggccagggaacccttcatgaaaccacctctgcagtcctggagagttgctgtagaagaaggaaaagagaggaagacaacacaacacaggaggggataagtacctctggacacaatggaagtagtagttgttgagcagagggaaagggataggagaaggatgtggactgcagtgctgcagtgccaggtaataactttgatcatgtacctccttggctcaggtgctgtctcttctactctcctccttacttgtactaccttatttagcacttaattatatactttcttgactcactttgagacacactgattatgtggtctgcctcaaagacagaatcctagttttggattttagcattactgatctatagccttgcaggggcttaaggatggcagctgtctctctcccttgggatctagcttttgcaaatattgaagggaagagatttctttgatcttataggaatagatccacagttcctctccagatttgcttttatagagaagtgtgtgtcaccaaaacaatggagatacggtcagagaggcccctacccccagaattttaatataattttactttctggggcatttattcttgacaaatactttctctcctatcagctcacttgttcctcacaaaaaccctataagatattaatattattaaacagacccctatgaagcacctcaagtctttctctcttcccacttccattcttgcacaccttttgctagactagtctctgcgttcatcacatcaggtttctaaaataaaagtcccctaataactttctatttgttctctcatcatattgaaccttttttgcctggcttataaggtggccttaaaaccccattttcctctaaacattgtctctgtagttcaggaatatggcaggctcaacactatgcttgagcccatattgcttccctcattagtgatgcctcctctcagaccacccagattctactcattcttcaatttccagcttctccttggagcctttccagatcattagcttcttaaaaatcccagctttctctgaattctgatggtagcccccgttatttggacaattatgtcctggtcttaaagtcctaatgggaaaaaaaagtacatgatggacttcatgtagagaagaaagcactggactgagttttaagacagctgctaaggagctgtgtgagccaaaccaggttactttacctctctggatctatatttgctgatctgttaagtggagacaattgggtcagataatcttggtggtctttgcttattctgaggttcttgtacaacttggcctagttcacgtgggatgggattgaagatcttactgagttcttggatggaaatgtcagtaatgggcacttagtgccttcaggacttgttctatactatcccagaaatttctgatgctaaacttggcaatttttaaatgtcatattccttttctccaaactctttaaccacaagaattcagggaaggttatggggggtgacttagttatctggataatacatattgtggacaatatagcattatccttgggaatgatttcatattgttgaataaataggatcaacttcttgataaaccttagtcccaagcatttcatcttcattggatagtgttacatagtaatatatttatgttttcttttaatcatttcataacttggaatactaacatagtcaaaactctagggtaggtgatacatgagtttctgtagtaatctggttggagacatgttgtaattctgtatatatatgtacatttatcccatgcatgttatgcctaaactaagacggatacccctgaattaagaggtgctgttatacattgaccaggcttaagaatatctctttaaagtgtgtcgacatttaattgacctttggaagttcattctgttaatcatactcaaagtgctaaagctatggttgactgctctggtgtttttatattcattcgtgctttagcatataaattcttcagcataattgctacttatttagcaagagtttcctttatttgaaaatgtgagttgtgcttgtatttttgtgtctttctttctttctttctttttttaaactttgcttcaggctgggtagtggtagaggtttgaattaaaatgttttcctgtcagt

SEQ ID NO: 17667 - protein, 130 aa, Homo sapiens
MRPGSSPRAPECGAPALPRPQLDRLPARPAPSRGRGAPSLRWPAKEVGPRPQIPATCEPGKVCGASAGRRDASRPSRPRSSRVTFSTRRQPGPQRGRWGLRGGPESVRGLPHLGLRISGTPLGIFSSWSL

SEQ ID NO: 17668 - DNA, 2467 bp, Homo sapiens
  CDS (15)..(773)
aaaaaatcacccggatggcggctgcgacgcgcggctgccggccctggggctcgctcctcgggctgctcgggctggtctcggccgcggccgccgcctgggacctggcttccctgcgctgcaccttgggcgccttttgcgaatgcgacttccggcccgacttgccgggtctggagtgtgacctggctcagcacctggccggccagcatctggccaaggcgctggtggtgaaggcgctgaaggcctttgtgcgggacccagcccccaccaagccgctggtcctctccctgcacggctggaccggcaccggcaaatcctatgtcagctccctgctggcgcactacctcttccagggcggcctccgcagcccccgcgtgcaccacttttctcccgtcctccacttcccccaccccagccacatcgagcgctacaagaaggatctgaagagctgggtccaagggaacctcactgcctgtggccgctccctcttcctcttcgatgagatggacaagatgcccccaggcctgatggaagtcctgcggcctttcctgggctcctcctgggtggtatacgggaccaattaccgcaaagccatcttcatcttcatcaggtggggcccggctttgcagtgggcacagtgcgggggccacttctcagaggttcagctctacagccttagcctgtgctcccagcagaatccagttccccatgggcttagctgggctttcccagtgccctccgccactctcagagatgacattgtcattccgcctggttgatttccctttggacattctcagcaaattctgggctcagtctttttgatcgccacttctttgtggaagccctgccaggtcaagaagttttccctcttttgtggtgaggaggacacaggcctgggaaaaataggaacagagttcttgtcctttagtcccagctctcagaatcctcgctgtgtttcctcaggcagcatggctccgcctctctgagcctctgtctctgcttctgaacagcggggccaataatgatgccccgatgccttcctggaagttcagtgagggaaagtcagttgagggacacaaaagtgttttgtaaactataaagtacgtggcatgtgtaggtgaattacaggggccatggatgtggacaccatggagggggaagtggagcgttttcagtggagttggctcctccccgcactgagccatgttcctatgtcaggtggcagcggggaagcgagggtccaatcctgccctgcgctagtcctcatctgagtctcagcctgggtcccccatggttttagcaacacgggtggcgagcagatcaaccaggtggcattggaggcgtggcgcagccggcgggaccgcgaggagatcctcctgcaggagctggagccggtcatctcccgcgcggtgctggacaacccgcaccgtgagtctggctcagcagccccctcccgggcggcttcaccccacacccaggggccaggctctcccggggtctcatgctttgcccactgacccggcagttctgagcctggctttggcactcccagctttgtgactttgggtgagccttacagcccctgagtcctacacccagaaggtggctgagggaactgaggccagcatttttcctcctgcccctgggggtttggggccggcttctcccctcttgtgaagcacaaagtcccctccccacctacccttcctgcagatggcttctcaaactcgggcatcatggaagagcgcctcctagacgcagtggtgcccttcctcccgctccagcggcaccacgtccggcactgcgtgctcaacgagctggcccagctgggcctggagccaagggatgaggttgtccaggctgtgctggacagcaccaccttcttccctgaagacgagcagctcttctcctccaacggctgcaagaccgtggcctcccgaatcgccttcttcctctgactctctgagtggtgtcctcggcccccctgatggccaggccatgcaggaaaggccaggggcctctgtcacaggaacccagagcaccaagtgagatgaacggagtgtcggctaggccacgggacagatggccaggaagggccctggcctctaaactggctcgagagcatcttggccccggccaccttccccagggaaacccctggtcaccccagaacctcactgagccttgacctccccctgcagcctgagccttcttactgtgaattataactcagggactgtggctcgtggcggtgctccctcctcagtctgccacccttgccccttgcctccttggtcgggcaccatacctcctcccctccaccccacaccctgtgtccatatcaagccaggtggagccttctcagtttccagaaatggagggactcatgctgccacttgggcctggttttagatgtttttaattttgtaaaagaaaacaagtataataaactcagctgtgggaccag

SEQ ID NO: 17669 - protein, 253 aa, Homo sapiens
MAAATRGCRPWGSLLGLLGLVSAAAAAWDLASLRCTLGAFCECDFRPDLPGLECDLAQHLAGQHLAKALVVKALKAFVRDPAPTKPLVLSLHGWTGTGKSYVSSLLAHYLFQGGLRSPRVHHFSPVLHFPHPSHIERYKKDLKSWVQGNLTACGRSLFLFDEMDKMPPGLMEVLRPFLGSSWVVYGTNYRKAIFIFIRWGPALQWAQCGGHFSEVQLYSLSLCSQQNPVPHGLSWAFPVPSATLRDDIVIPPG

SEQ ID NO: 17670 - DNA, 2904 bp, Homo sapiens
  CDS (49)..(1230)
aagtgctctcctgacccgccgctgtgcagcgcagcgcaccgcgggaagatggcgttggaggtcggcgatatggaagatgggcagctttccgactcggattccgacatgacggtcgcacccagcgacaggccgctgcaattgccaaaagtgctaggtggcgacagtgctatgagggccttccagaacacggcaactgcatgtgcaccagtatcacattatcgagctgttgaaagtgtggattcaagtgaagaaagtttttctgattcagatgatgatagctgtctttggaaacgcaaacgacagaaatgttttaaccctcctcccaaaccagagccttttcagtttggccagagcagtcagaaaccacctgttgctggaggaaagaagattaacaacatatggggtgctgtgctgcaggaacagaatcaagatgcagtggccactgaacttggtatcttgggaatggaggccactattgacagaagcagacaatccgagacctacaattatttgcttgccaagaaacttaggaaggaatctcaagagcatacaaaagatctagacaaggaactagatgaatatatgcatggtggcaaaaaaatgggatcaaaggaagaggaaaatgggcaaggtcatctcaaaaggaaacgacctgtcaaagacaggctagggaacagaccagaaatgaactataaaggtcgatacgagatcacagcggaagattctcaagagaaagtggctgatgaaatttcattcaggttacaggaaccaaagaaagacctgatagcccgagtagtgaggattattggtaacaaaaaggcaattgaacttctgatggaaaccgctgaagttgaacaaaatggtggtctctttataatgaatggtagtcgaagaagaacaccaggtggagtttttctgaatctcttgaaaaacactcctagtatcagcgaggaacaaattaaggacattttctacattgaaaaccaaaaggaatatgaaaataaaaaagctgctaggaagaggagaacacaagtgttggggaaaaagatgaaacaagctattaaaagtctaaattttcaagaagctgatgatacatcacgagaaacttttgcaagtgacacgaatgaggccttggcctctcttgatgagtcacaggaaggacatgcagaagccaagttggaggcagaggaagccattgaagttgatcattctcatgatttggacatcttttaagtacattttcaacagtttgaggactaagcctttctaaaataacattgtaataaaccatttttactgagattgcaacgttttgcactgataaacatgagaatctggaggaaagacaattgttttcttgtttaaaatatgtgtggaaaggaatgcaattgatagaacatttaaagatatatctgacaaaatacttaagagtatatagcacaggatttaatttctcaatctgttgcatgtgctaattatgagtattactagttgataatcagttttgtctaggtcataacataccatttgtaagtttgtttgctttttcaggtttatctttgcagtgaattatgctttgctttaaaacattccgctaaaatcataatgggacatataaattattaagctgttagaaatgcattcaaatttgttttttctgtgttctaagaactcaggcaattttaaggataaaaactaacattggccaggcacggtggctcacgcctgtaatcccaacactttaggagaccaaggcgggcagatcacttgaggtcgggagtttgagaccagccaggccaacatggtgaaacttcatctctactaaaaatacaaaaactagccaggtgtggttctccatgcctataatcccggctactcgggaggctgaggcaggagaatcacctgaacccccaggctggagtacagtggcaggatctcagcttactgcagcttccatctcccaggttcaagcgatcatgtgcctaagcctcctgagtagctgggatcacaggtgtgtaccaccacgcccagctgatttttgtatttttagtaaagactttcgccatgttgtccaggctggtctcgaactcctggcctaatgatctgcccacctctgcctcccaaagtgctgggatcacaggcatgagccaccgaacccagccttattctgcttaaatttgacgtgttttttgacttcttaattaacttggtcatatactaaacgtgatctcctgtggattaccacatgcattaaaaaatttttcaagctgggcgtagtggcgcacacctgcaatcccaacactttgggaggccaagaagaggaagattgcttgagcccaggagtttgagaccaatctaggcaatgtagtgagaccctgtctctaatttaaaaaagaaaaagaaaaaaacattcccagtggcagcctgcctaagactgtcttaccttatgttaaggaagtcaggtatttaaaatgttacatatgccggcgcagtggctcatgtgtgtaatcccagcactctgggaggctgagacaggtagatcatttgaggtcaggagttcaaaaccaacctggtctacatggtgaaaccccatctcaactaaaaatacaaaaaatacaaaaaattagccgggcgcggtggctcacacctgtaatcccagcactttgggaggtggaggcgggtggatcacaaggtcaagagatcgagaccatcctggccaacatggtgaaaccctgtctctattaaaaatacaaaaattagctgggcgtggtggcgcatgcctgtagtcccaactactagggaggctgaggcaggagaatcacttgaacccaggaggtggaggttgcagtgagccgagatcacgccactgcactccagcctggcgacagagcgagactccctctc

SEQ ID NO: 17671 - protein, 394 aa, Homo sapiens
MALEVGDMEDGQLSDSDSDMTVAPSDRPLQLPKVLGGDSAMRAFQNTATACAPVSHYRAVESVDSSEESFSDSDDDSCLWKRKRQKCFNPPPKPEPFQFGQSSQKPPVAGGKKINNIWGAVLQEQNQDAVATELGILGMEATIDRSRQSETYNYLLAKKLRKESQEHTKDLDKELDEYMHGGKKMGSKEEENGQGHLKRKRPVKDRLGNRPEMNYKGRYEITAEDSQEKVADEISFRLQEPKKDLIARVVRIIGNKKAIELLMETAEVEQNGGLFIMNGSRRRTPGGVFLNLLKNTPSISEEQIKDIFYIENQKEYENKKAARKRRTQVLGKKMKQAIKSLNFQEADDTSRETFASDTNEALASLDESQEGHAEAKLEAEEAIEVDHSHDLDIF

SEQ ID NO: 17672 - DNA, 2392 bp, Homo sapiens
  CDS (41)..(595)
gaaagtgtgtgaaattcattttcatgaaatcaacaacaaaatggtggaatgtaagaaagctcagccaaaggaggtgatgtcgccaacgggctcagcccgggggaggtctcgagtcatgccctacggaatggacgccttcatgctgggcatcggcatgctgggttacccaggtttccaagccacaacctacgccagccggagttatacaggcctcgcccctggctacacctaccagttccccgaattccgtgtagagcggacccctctcccgagcgccccagtcctccccgagcttacagccattcctctcactgcctacggaccaatggcggcggcagcggcggcagcggctgtggttcgagggacaggctctcacccctggacgatggctccccctccaggttcgactcccagccgcacagggggcttcctggggaccaccagccccggccccatggccgagctctacggggcggccaaccaggactcgggggtcagcagttacatcagcgccgccagccctgcccccagcaccggcttcggccacagtcttgggggccctttgattgccacagccttcaccaatgggtaccactgaagcaggggacggtggcaggagcgccccagcctgcagctgactgaggaccacgagtgagccagcgagggggcgggagacctcagccgcagccgccgccccctcccctgcagcgactcggacccgctactgcctgcccccaactccccgggcccggcccctgccctgctgcccccaacagcgtctggctcccctactaacgtccccctcttcgcccttgcccccatccccacccgcccctctcccggccctgcttttatttattttggattagccggttgcccaccccagccctctggtccatccctccctccgtgccgcgcccccctaggaccgccccctccccaaaaggcttttggatttgtgcatagctggagtgaaggcggagggggcctgctacaggccgcagcccaacccctgttttttattcagatttcccctcctttaccctttccctttttttttttttttttttttaaagaaaccttttttaaactatttctaggtttgtgaatgtgaagccccaggccgcagggggcaaggggccaggtgccccccaccagctgagaacaaagtgtctatctgggtgtgggcccctggccgcctccctccagccctggagaggagggcagggctgcggggaggccaggccgagcccctggaaccatcccgtcctgtatcatatgtaaatactgtgaggtgatgtgcccacccctctctaagacccctcgggggtgaggggctcccccctcccctgtttctgtcccctcagacaccgttactgtaagcttgcaggcctcagctgtggccacggcaggcccgctctctcaggccctcagggtcaaggccttggttggacctgcccactccaaaaacccagtgtgggggcaaagggcgtgggaagagcagggcttgcccagcgacactgctggacaggaattaactctccaaaggtctcccctgctccctacctaggttggggcttcatggtttctgctccgtctgtcccccttccccctcgacccccgcaatgagtgggcaccaggggacgctctggcgagggcagaccccaggggaaagcaaagggcgtctcagggaacccccacattctctcactgaagtttcccaccaggatgaccccacagccagagtcccttggcagcccctcaccccagaccccccttctaaggaaaaagagaggttcagagcgttggaccttcatgaacagtggcctggctggcgtggcagggccaaggcccacccactgccatcccccttctgtgtgtccctctcccccagttatgaggcccagggcctgagctctcttccccagcattgcccccacccggaaaccccacccttggagagttaattgtctgtgtgaggtgtttaacctatcagccctgagaacacaaagcaataatctttgttactgagatgcgcggctgttcgtgttttgggtttttttttttttaatgtttcctaataaaagagaagctgcattttattggtttttatttttaattttctacacgtttgagctgagtcctgagacacttagcttccctctccctcatacccggacccttccaccccactgggcccaaccatgggctcaggaccctggaattccgttttctgatttgctttgggattttttttttttttaagatgttacatggtgtttcgaagccagcaagttaccatcctccggtgtctcttctctccacatctgtaacttctttttccaggttttattttcagttttaaattcctaataaattatttgaaaacgtt

SEQ ID NO: 17673 - protein, 185 aa, Homo sapiens
MVECKKAQPKEVMSPTGSARGRSRVMPYGMDAFMLGIGMLGYPGFQATTYASRSYTGLAPGYTYQFPEFRVERTPLPSAPVLPELTAIPLTAYGPMAAAAAAAAVVRGTGSHPWTMAPPPGSTPSRTGGFLGTTSPGPMAELYGAANQDSGVSSYISAASPAPSTGFGHSLGGPLIATAFTNGYH

SEQ ID NO: 17674 - DNA, 3460 bp, Homo sapiens
  CDS (259)..(609)
attgctggttcaaatggtagttctgttttaacttctttgagaaatctccaaactgctttcacagtggctgaactaatttgcatttccatcagtgtaggcgcattctacactgcactggcttctacagtgttgaagcattccgtttttcccacagcctcaccagcatctgttatttttttgactttttgataatagccattctgactggtgtgagattgtaactcattgtggttttgatttgcatttatctgattagtaatgttgagcattttttcatgtttgttaaccgcttgtatgttgtcttttgagaagtgtctgttcaagtcttttggcatttttttaatgggtttttgtttgtgtgtgtgtatttttgtttttgtttttgttttgagatggagtttcactgttgtcacccaggctagagtgcaatggcaccatctcagctcactgcaacctccacctcccgggttcaagcgattctcctgccccagcctcctgagttgctgggattacaggtgcctgccaccaagcgtggctaattttggtacttttagtagagacagggtttcaccatgttggccagcctggtctcgaattcctgacctcaggtgatccacccatctcagcctcccaaagtgctgggattacaggagtgagccaccacacctggccacgagttacttggttttcgttttctgaattgttttagttccttatagattttggacattagacctttttcagatgcacagtttgtgaatattctctcccattctgtaggttgtctgtttactgtattgatagttccttttgcggtgcagaagctctttagtttgattaggttccacttgtcaatttttgtttttgttgcaattgcttttgaggacttagccgtaagttctttcccatagctgatgtccagatgttatttcgtaggttttcttctaggactcttatagcttgaagtcttacatttaaatcttttttttttttttccccaaagacagagtctccttctgttgcccaggctggagtacagtggtacaatcttggctcaccacaacctccacctcccaggctcaagcgattctcatgcctcagcctcccaacctaactgggattacaggcacatgccaccacgcctggctaatttttctatttttagtaggaatggggttttaccatgttggccaggctggtcttgaattccgagcctcaagtgatccacccacctcagtctcccaaagtgctgggattacaggcatgagccactgcacccggccccttatatttaaatctttaatctatcttgaggtaattttatatatatggtgaaaggggtccagtttgagtcttctgcatatggctagacagctgttccagcaccatttattgaattagggaatcctttctctgttgcttatttttgttaactttgtcaaaggtcagatggctgtaggtgtgtagctttatttctgtctgttccattccattggtctatgggtctgtttttatatctgtaccatgctgttttggttactgtagcttccttatagtatagtttaactcaggtaatgtgatacctcagctttgttttatttgcttaggattgattttttggttccatatgaattttagaatggattttttctttttttttttttgagacggagtcttgctgtgtctcccaggctctgagtgcagctgtgcaatctcagctcactgcaacctctgcctcctgagttcaagcaattctcctgcctcagcctcccaaatagctgggattacaggagcccgccaaccatgcccagctaatttatgtaattttagtagagatggggtttcatcatcttagccaggctggtcttgaactcctgacgttgtgatccacccgcctcagcctcccaaagtgctgggattacaggcgtgagccactggacccggcaggatttttctaattctgtgaaaaatgatgtttgtagtttgataggaatagcattgaatctgtggattgctttgggcagtatggccattttaatgatattgattcttctagctcatgagcttggaatgtttttccatttgtttgtgtcatctctgatttctttcagcgtgttttgtagttcttgtccagctcacattttatcttcatactttgagtagcctccttccatgaatggatcatccagtggccgcacttaggttctcctatgaagatttttgttgtattgtacctcagaaccatctccatattctctaaataataataatgatggtcataaattgaatagaagtatttactagatgaggaggaaaaccctaaaacaaaacatgaacataaaatatttttaaaaggaagacatacaaacagacactataaccaaataagatgacagaattaaggccttatgccacagccagagttgaaaaatgcagaaaaaaagtttaaaaacaaggaattaaagccaaacctaacttttatcaaaataaatgtaaaagtgatgaaagaatctgttaagatatcagattgtaatataaaagatactagaaacaaatgccaatagaacacttaagtacattttatatattcatccattagaatatatagctgtcagaatgatagaagaattacatatgtgtgcaaaagtttttgtatccatgtggaaaacacaggaagctaatagtactgtttttctctggagtgggtgtaagggtagagacttaactctttacatccttatggcagccttcgaataccttttaactcccagttcccttaactgggggtgtgtatcctagaatcctcgacccattagaaagtatattgtagacatcatactctttaccctttaacactacacatgcacttcataagaacaagcatgctgtcttacccaagtacagctatcaagttcagaaatttaacattgccataatactttacagtccatatttcaatttcatttgctgttttattggtaatttttttcagctccacgatccagcctaggatcatatgttgtattgccataaccctctaatctggagcagttcctcagcttttctttgttttttataatagtaatatatttgaaaaatacaggacagctaaaggatagagtatccttctatttgggtttttctgatgtttcctcatggttagattggggtagtgcagtgagggttgaaatgctgtaagtgatatgtattgcaggtatacatccagatgcacagaatgtccatttgtcccttattggtgatgctaattttgatcacttgggtaagatgtccagtttctccagtgtatcgttattgtttttccttttgcaattagtgggtaatttgtgaggagaaactttgagaccttgttgacaattctgttcctcatcaaatctacccctcctaggtttagcatcctttgacgattcttgtctgaataaatttttactaggatgtttcc

SEQ ID NO: 17675 - protein, 117 aa, Homo sapiens
MLSIFSCLLTACMLSFEKCLFKSFGIFLMGFCLCVCIFVFVFVLRWSFTVVTQARVQWHHLSSLQPPPPGFKRFSCPSLLSCWDYRCLPPSVANFGTFSRDRVSPCWPAWSRIPDLR

SEQ ID NO: 17676 - DNA, 2505 bp, Homo sapiens
  CDS (243)..(1598)
ccagagcccagacttgcaggctcacggtgcagggtgaacctggccacagctcaccctggaacagccacaatgtctgccccttagagaagaaccctgaaatcagaccagtttttgcggcctccccctttcctctctgttacagtgccctttccaggccttaagagaagtaaaacttagctgcagcgtcaggaggtggaccccagagtgtgagtggcacgcttccctgtgaacccgtcctcaccatgtttgccacatctggggcagtggcagcggggaagccttactcgtgcagcgaatgtggcaagagcttctgctacagctcagtgctgctgcgacatgaacgagctcacggcggtgacggccgcttccgttgcctagaatgcggtgagcgctgtgcacgggctgctgacctccgagcgcacaggcgcacgcatgctggccagaccctctacatctgcagtgagtgcggacaaagcttccgccacagcggccgtcttgacctacacttgggcgcacaccggcagcgatgccgcacttgcccctgccgcacatgcggccggcgcttcccgcacctcccggcgctgctgctacaccggcgccgccagcatctgccagagcggccccgccgctgcccgctgtgcgcccgcaccttccggcagagcgcgctgctcttccaccaggcgcgggcgcaccccttggggacaacctctgaccctgctgccccaccccaccgctgcgcgcagtgcccgcgagccttccgaagcggcgccgggctgcggagtcacgcgcgcatccacgtgtcccggagccccacgcgaccccgtgtctcagacgcccaccagtgtggcgtgtgcggcaagtgctttggcaagagctctacgctgacgcgacacctgcagacgcactcgggggagaaacccttcaagtgcccggagtgtggcaagggcttcctggagagcgccacgctggtgcgccaccagcgcacacacacgggcgagaagccgtacgcatgtggcgactgtggacgctgcttcagcgagagttccacgctgctgcgccatcggcgcagccatcagggcgagcggccacatgcgtgcgccacttgcggcaagggtttcgggcagcgctccgacctggtggtgcaccagcgcatccacacgggcgagaagcccttcgcgtgccccgagtgcggccgccgcttcagcgaccgctcggacctcaccaagcaccggcgcacgcacacgggcgagaagccctaccgctgcgaactgtgcggcaagcggttcacgtgcgtgtccaatctcaacgtgcatcggcgcaaccatgccggccacaagccacacaaatgccccgagtgcagcaaggccttcagcgtcgcctccaagcttgcactgcaccgcaagacgcacctgggcgaacggccagcggagtgcgcagagtgcggcaagtgcttcagccacagccgctcgctgtcacagcatcagcgggcccacacgcgcgcccgcaccgctgccgccgttgccatccagtccgcagtgggcactgccctcgtctttgaggggccggctgaacaggaaaagccagggttctctgtgtcctagttgagggaggcttgctgaggcttctctaaaggtggttgggcaagcacctatatagtatcacggggacagttgaggcaactcgtagatggagatttgggaaaagacgatgtggcctcctacctttccagtttctgttggcagcccttcacgtagcctcctgcctcgcctctacacctactaccctgtcggcccttttgccatgctgtcctcgtataactcggattctctcctcaggtgtaggtgcagggagtcagggaacccttagactcccctgtgtgcaagagcccaggtgttggtgtgtccctttaatgctactgtgctctctggtgtttctgattttcctgcctttattctgtcttctcttgtcctatctcattccagcccacatcttctcctttcctgattacttttgttgtcctgcctcttcaggtaatggtcacagatttggctgtaggcacgttaccagccctgtggcttcttgactcttggttccctgttaactctgtttctgagaaatgtgggtatggaggtgggtgggaaagctcacttccatgaaggatgtctccatgctaggagctgcctgcaccctggcagaggtggccagtcacgtgaaggtgggcagggcccttagcatggccacacatgtccccagggcagatcaaggggcctctcagaaccatgttccccagccaggtgaggaccattttcactgggacccaggccaaaaccatgtgggtgcacaaagccaggcactgccaagtggaacatgaggttatttccaaatcatgggagccaccagcagggagagggcaggatggaaaatcccctggagccggtcaactttttgctcatggctagtgaaataaagttgtttgagtactagatgccaagtgccgcctttatc

SEQ ID NO: 17677 - protein, 452 aa, Homo sapiens
MFATSGAVAAGKPYSCSECGKSFCYSSVLLRHERAHGGDGRFRCLECGERCARAADLRAHRRTHAGQTLYICSECGQSFRHSGRLDLHLGAHRQRCRTCPCRTCGRRFPHLPALLLHRRRQHLPERPRRCPLCARTFRQSALLFHQARAHPLGTTSDPAAPPHRCAQCPRAFRSGAGLRSHARIHVSRSPTRPRVSDAHQCGVCGKCFGKSSTLTRHLQTHSGEKPFKCPECGKGFLESATLVRHQRTHTGEKPYACGDCGRCFSESSTLLRHRRSHQGERPHACATCGKGFGQRSDLVVHQRIHTGEKPFACPECGRRFSDRSDLTKHRRTHTGEKPYRCELCGKRFTCVSNLNVHRRNHAGHKPHKCPECSKAFSVASKLALHRKTHLGERPAECAECGKCFSHSRSLSQHQRAHTRARTAAAVAIQSAVGTALVFEGPAEQEKPGFSVS

SEQ ID NO: 17678 - DNA, 3029 bp, Homo sapiens
  CDS (890)..(2479)
agcatcctcctgggcgccgctttcgcgcggcggcggcggctgcggcggggtctttctttgcttaaatacctcgttggccagaagcgctggtaccgggggcgggttgggtcgggtcgggcagtgctgcacacctgggtttccttgcctagagctgtgtgttcggggtcctttggtccagtcggaggctgcggagcggcgggggttgcctgcgctgtccgcccgggcatcctcccggtgatggaagcagccgccgccgccgctgcggggtcgcgctgtgccccattcaccgctgccagagaggtgggaaaattcgccgcacggaggccgaaagcgagaggggctgcgccgctatgccgggagctgagtcccatataagccgcccccagccatcgcccccagccggcttcgttcccctgagcgagacaggaagctgcggtcccgagaaagcggaggagacgtcgctggagccgggaggcgccgggttcggcggagcgcggagcggggctctgggccgcgtgaaagtttttcttcccgagccgcagggcgcccgctgcccggaaactgcccagggataagtcggccgactccccagacccctcgaaggtgcggggacccccagcggaagcgagagggagcgaaatcgaggaacgagtgacagccggacagtccgccgggcggtgatccggggccgctcccgggcgcgccctcggctccaggtcctacccggagccgctgccatgggagagccagccttgggcgctggggaccagccgccgcgcccgcctcggagtcgcggcccgagtcccggcgccagcagccagcccgctgcgtccccttcccgggctgcagggctgcctccgccgcgccgccggcccggattgtgcctgtgatgagccgcagcccgcagcgagctctgcccccgggcgcgctccctcggctgctccaggctgcgcctgcagccgcgccgcgtgccctgctcccgcagtggccccggcgcccaggacgccgctggcccgcgtcccctctcggaatgaaggtgttccgtaggaaggcgctggtgttgtgcgcgggctatgcactgctgctggtgctcactatgctcaacctcctggactacaagtggcacaaggagccgctgcagcagtgcaaccccgatgggccgctgggtgccgcagcgggggcagccggaggcagctgggggcgcccagggccgcctccggccgggccgccccgtgctcatgcccgtttggacctccgcactccttaccgccctcccgctgccgccgtcggggcggctcctgcaaccgcggcagggatggcgggggttgcggcccctccaggcaatggcactcggggcaccgggggcgtcggggacaagcggcagctggtgtacgtgttcaccacgtggcgctctggctcgtcgttcttcggcgagctattcaaccagaatcccgaggtgttctttctctacgagccagtgtggcatgtatggcaaaaactgtatccgggggacgccgtttccctgcagggggcagcgcgggacatgctgagcgctctttaccgctgcgacctctctgtcttccagttgtatagccccgcgggcagcggggggcgcaacctcaccacgctgggcatcttcggcgcagccaccaacaaggtggtgtgctcgtcaccactctgccccgcctaccgcaaggaggtcgtggggttggtggacgaccgcgtgtgcaagaagtgcccgccacagcgcctggcgcgtttcgaggaggagtgccgcaagtaccgcacactagtcataaagggtgtgcgcgtcttcgacgtggcggtcttggcgccactgctgcgagacccggccctggacctcaaggtcatccacttggtgcgtgatccccgcgcggtggcgagttcacggatccgctcgcgccacggcctcatccgtgagagcctacaggtggtgcgcagccgagacccgcgagctcaccgcatgcccttcttggaggccgcgggccacaagcttggcgccaagaaggagggcgtgggcggccccgcagactaccacgctctgggcgctatggaggtcatctgcaatagtatggctaagacgctgcagacagccctgcagccccctgactggctgcagggccactacctggtggtgcggtacgaggacctggtgggagaccccgtcaagacactacggagagtgtacgattttgtgggactgttggtgagccccgaaatggagcagtttgccctgaacatgaccagtggctcgggctcctcctccaagcctttcgtggtatctgcacgcaatgccacgcaggccgccaatgcctggcggaccgccctcaccttccagcagatcaaacaggtggaggagttttgctaccagcccatggccgtcctgggctatgagcgggtcaacagccctgaggaggtcaaagacctcagcaagaccctgcttcggaagccccgtctctaaaaggggttcccaggagacctgattccctgtggtgatacctataaagaggatcgtagtgtgtttaaataaacacagtccagactcaaacggaggaagcccacatattctattatagatatataaataatcacacacacacttgctgtcaatgttttgagtcagtgcatttcaaggaacagccacaaaatacacacccctaagaaaaggcaagacttgaacgttctgaccaggtgcccctcttcttctttgccttctcttgtcctctttctcctatttcttaccctgtcctccacctgccttccattttgaagtgggatgttaatgaaatcaagttccagtaacccaaatcttgtttacaaaatattcgtggtatctgtgaacatgttaagagtaatttggatgtgggggtgggggtggagaaaggggaagtggtccagaaacaaaaagccccattgggcatgataagccgaggaggcattcttctaaagcagacttttgtgtaaaaagcaaaggttacatgtgagtattaataaagaagataataaat

SEQ ID NO: 17679 - protein, 530 aa, Homo sapiens [sequence omitted]

SEQ ID NO: 17680 - DNA, 2633 bp, Homo sapiens
ggtttatcctaaattactcaaccccttgtagccttgacaaattttaccttaaaaccaaaatgaaacacaaaaattaatccttaataatgatagcaagtgatctttctttttagttttagccttcctttttcaatagtaatatttaaacccactcttgaccaattgtttgcccaaatattcttgtcatttggagtcagtggaaaatccagcacaccaagcaccagtcttcttctgaggcaaaagaaaagtgttgtcattttcactctgttggagctgcacactttttttctttttctttttttttttttgtcgtgtaagaaggatgctggtcagagctgcagaaaatatgaggcaattaaaagtctttagctgttagcaaacctgttagttttacttctgcattgaaccagcctcagaagctacttactgctttatgtactctttgggcattaatgccttctctgtaattatatctcgtttttgcttgacagtgacctagccagtaattgcatcgtgcattgccatgaaaggtaaacacattgtgaactgaacttaccaagcagattctgtaagaaagcgctggttgaggctgaacactgttgacacatcatttttattggaagagtattaactggtgcctcttctgaaacacaccaacccatattcctctgctcccccaaagctgtttctgatcctgctgggagcaactaactagttattatgcacatctgctccagacccagctctttaacttcacggttttacagcttgttttttctttttcttttcttttcttttttttttttaaaaaagcacctttttttgttgtttccccttaataaaagaggtttctaatttatgtttctctaagatttcctttggttgtatttagaaacacaaatagttttataatcaggattgcatttgtgctgggtaaaagaggagagctgtgctttctaccccaaagttgttggtaatggagccggtctgcccttcctacaaactcaagaggctcattgttcaaggtgtaacaacatttaattgcatgtcctctaacgctttgaaacctttagagggaagatcctcattttttacaattttgttccttttcatcatagaaaacatgtttaagataaaatacaaactttacctaccccaaattcataaagtacatttagtgctgtatagcactaaaacttagagatacagacactgtacttactttttaagaattagagacagtaactccaaaaataattgtccttttttctttctttttttttttttacaataaggctcttgaaaattgtcattacttgtgttttcctatacattcatctgtgtgaaagcctttttcttctttgatttaaaaaaaattatacagttaatggtttagaacttagaactacttagaattaatgctaaagtgtcaggaagaaattaatttagcttcaataattgtgactggcctcaggaattctcccttccacacctgcccacctcacctcacctcacctcacctcaccgcaccgcaccgcaccgcaccgcaccagagccagagcagctgcttgtctgcagcaggacacggttcctacatacgtttcagttctttcatggtaagctcaatggactttgaattgtttacagtgctgtatgtccaattgttaaatgtaccattctgaacgatgttaaagcaagtgtggtttatttatggcatgaaccatgtaacttgaaatatgaacttacaaggaggggcactcattaggtaacaagttcttacaccaaacttccttgatgaaataagccaaaataatcctaaaattcattagaagaacttgataaaagactcaaataaatgttagaaagagcccataattttaggactcctataaaattcttccttgtttgttaatgctattaaaactcagattcaagggaaataccagcttccacttgagtcactttgaaatagttaattcaacagcaccatgttagaaatatattggcagccaagactctgaactctgcagaaacatttgtttcacccagacttcaaactctagccctgactatgatgcccctgtgtgcatttacaataaagactccaacggagggagcctgttggtgttaaattgtttacatttctttatacaaataatgtgctttcagtgccttagttacagctccctttctgtttcttgttccaaggattctgtagtatgtagtgtgtttcttaggtaaagtctcttttgctactgaaagggaaatggtctctaaacactggtcactgtagcaggtaaacactactctaacgtggagaaatgagcttcatgctgaggtagtggttgccttagagctgttatttatgctgtagaaaacgaaaatggttttgctacctgataagcttcagattagatatagccctaaagttatcctgtacctgcattaaattttcattttagaagagaatcttggttttggtaattcatttttttttaagatcattatgtgcaaaacaccaagttttaaaaataactcacagaatggccttagttttcaatgtctgatggtatatttgtgagttgtgttatctgtaatatacatcccagaataaaggagtgaattaaatagtt

SEQ ID NO: 17681 - DNA, 2094 bp, Homo sapiens
gatcttggctcactgcaaccaccatctcctgggttcaagcgatcttcccaccttatcctcctgagtacctggggctacaggcatgtgccaccacgcctggctaatttttgtattttcttagtagagatggggttttgccatgttgttccggctggtcacaaactccagggctcaagcaatccactcacttcagcttcccaaagtgctgggattacaggcatgagccacaacacccagccctttatataattttaaaagtgtaggtaattaggtaaaattaggttaaaagtatatgtatatttacctgatatttaaatattacctaagtgtttaatgtggacatgtaagctctttaaagatagtgcttatgtattttatatctgtttcacatactccttatatatcccccacagaaatggtcacaaataggttccttaataagtatttttgaattcagccatgctatatattcattagtaagtgagttttcttttattatgaactacaaactttaacctttttttgagtagtgagcagttattcatttaccttcacactctttaaataccaaattttgagtgagtgagtgtgtaaggttttgtcatacagacttgcaattcctatatgggataaagtagactagcacaggaatttttcttgtatcactcatgcaagactctaaattccttaaaggcagggatcatgtatattttgatcactgttgtatcctcagcacttcacatggtgcctgtcacataaatatttgttaaatgacttctccaagcaatagctttgtctttatgttatcctgtatttcaaaacgttcatatataaattctctcaactatgacttgtttcatagggtctaataattgttcctctgctgagttattctcagcagatttagattcatttagcaaatgtttattgagcactaactatataccaggccctgttctgggcattcaggatatagcagcaaacacaataatttaaaatccctgtccagtgaagtgtatattcttgtaggctctgtaaaaagatgccctgtgcattgtcatggttgtttctcagtccctgactcttcttccgtgactagatgtttttcttactcatgtgatcagttgctaattcagacgtggctgtcatgcctgtgttattaagtaacgccatgtttcccaatcaaaaccagtctctattaagcaactccaaatattccaaaagcattctttaaggaagaaacaaccggattgcaaaatagttttttctgaaatttcaagaagtgaaaagtttgatcagaatttattatgtcaaatggagagtttgtgtttattattaaaatatgccttatattttaatatggtctagcttgtgtctatctggctatttctctaagtgtttagttaactgttataagaagataacaacattacaaatgtccttgggggtgaaaaaacttgccagaaaatactaaaaagcttaatttacttgcgtttttttttgtagtacttattgtattttagttacaactttcctatgtctattgaaatataaatcctgatagctttaacttcatagtagtctctactatgtggagaatcttagaaatgttagcagtcatcattgaagtatagcttaagactgtgtttggttaattgaattttctggttatctgagtttgttttacatgggttatcattatcgtttttcaaaatataagagaatatgattcagaccattagaagattatgaagataataattattaacatgtaataattattataatttatcatgtgcaggcattgttgctcactttacaggcaatctcatgtacatacaactttatgacatagttactgttattatccccaattatagatgaagaaactaggttttaaataggttacatgacttgaccaatgtcacataacttgtacaggtgatatctgaaccaaagagtctgaggccagaacctgcacttctaaccaccttactatatagcctcaaaaattcagacatcatctgatcagcatcatcagttaattagtatatgcaatgttagccttaaaataaaaatgatgatttaagattc

SEQ ID NO: 17682 - DNA, 2026 bp, Homo sapiens
attgataatacttttaatgtgttggtaatgatgtttaaaattgaaagatttttaaaataaaaatgatagattttcttactaaaaatgtttttattaaccttgcttttattggaaaaaatcaagcaatatttctttttcttttgtgttatattgtactttactgattcatttactggtgatacatatgtttttatggattttccagtttaatttgcatatacaaatgaatgcaatggtctattggtgagcattgagcaacactgtataaagttttaaaaatgtaaacactttttaatctactttcctctaaaaatcaataatattctattatttctaatccttttccacttgggaaataacaatgaagaatctgagaatttgacatctataactttacagattcatttttccatttaaatttcagtttcttggatcactgaatatgggaagggagagcttcactaattagacgcagcttcttaagaacttatattctctttgacatacatctctattgtagttttttgttttgttttgttttttgagatggagtcttgctctgtcacccaggctggagtgcagtggtgcaatctcagctcactgcaacctctgcctcctgggttcaagtgattctcgtacctcagactcccgagtagttgggattacaggtgcccaccaccacacccgactaatttttgtatttttagtagccatgtggttttgccatgttggccaggctggtttcgaactcctgacctcaggtgatccacccacctcagcctcccaaagtgctgggattacaggtgtgagccaccgttcccggcctattgtagattttcttaactacttgctaaggaaatcatatccttttacatgaactacaggtttagaacttggttttaagacaactgctatggccagaaggtaaatgggaattgccttattgaaggtaacattgattgcctaataagaaaatgaattgtttgccacagagttgaatttaatttgagttagatagttcagaatgtagcacttgccctataaatgaatcagatttgttctatttatataatattagaattaatatattatcatgtaagtgggaattttattttgttaagtggactctcaaattttagaacttgtgtgaaatatctcccagaaaacacaaaaggtttcaaggtatcacccaaagctagggaatcaacgaacgtactttattaatgcaagaccacaatttaagccccaggcaggaatccaacagtaacatttttcctttaggttaagcagtaatttttttgaattgtcatttttaatgggtctcacacatgcatattgctaatatcattcatgtttgaggttttcaacaaagaaccaatttgttaatataatgtacaaaaatagttggttcattttctgaattcagtctttgaaataaaactccttgttttggccgtgtttctgaatgtattggtgattcacccccaagctaattttttaaagtcatttttgaagttgggaagtctcatgagagatgttgaagtatgtatttaatcaagagtcatgatttcaaactagttttacatattaagcagttggtgttctaatttaatgggtaaatgtgtgtttggataaatatctgaaaattttatccttaagtatatataattatttgcctcttatatgtcttaaagctatttaaacaaggtgttaaatgagccaaaacaattaagtaattagaacagtacatttttatcagagtgtctgtcatatgcaatgaatgtatgtaatactaaaaaatcatgactacttttatcaaagaaaaaccacacattaatcctattaatcatgaaagcgtagcattgtaaattaaaggttttctttgaggctcttgaaagtgatcccattgctttcctgttttaaaaatattttatgctctttatttccacttctgtgaatgtgatatttctattttgtgattatgttactgaataaacaaacttgctacataaaattcttagcaatt

SEQ ID NO: 17683 - DNA, 2732 bp, Homo sapiens
  CDS (1034)..(1954)
atgcgcataacggccgccatcttaacagcgcgttcccgttggcgtctgaggaacagcatctctgccttcctgttcacggtgaccttcgcttggtgtcctcctggcctcagcaacctgacaattctgtcgtgtcccgagagatggctaatgaatggcgcttgatgacagatgagtaatgcctgttgctgaaagattgacggtatgagatcatctttctcaagatgttttctgtcttcatgagtcaaaatttgaagaggaaaggatggtggctgggtggttgacaaattactctcaggactcagtgacctttgaggatgtggctgtggacttcacccaggaggagtggactttgctggatcaaactcagagaaacttatacagagatgtgatgctggagaactataagaatctagttgcagtagattgggagagtcatattaataccaaatggtcagcacctcagcagaattttttgcaggggaaaacatccagtgtggtggaaatgaattcagagtaaaagggagaatctcaatgaaataaatttggaaaacttctatgaaccatcattaattttcaccaacaggagagaaaccattttggagaggaactgtttgactttaaccaatgtgaaaaagccttgagtgaacactcatgccttaagactcacaggagaacttactttagaaagaaaacctgtgagtgtaatcaatgtgaaaaagccttcagaaaaccctctatctttactttacacaagaaaactgatatcggagaggaacttcctaactgtaatcaatgtgaaacagccttcagccaacatctacatcttgtttgcaagaaaactagccaaaatctacatcttgtttgcaagaaaactcacactcaagagaaaccatataaatgcagtgactgtgaaaaaggcttaccttcctcctcacacctcagagaatgtgtaagaatttatggtggagagagaccatatactcataaggagtatgtcgaaaccttttctcattctacagccctttttgtacacatgcaaactcaagatggagaaaaattctatgaatgtaaagcatgtgggaaacccttcactgagtcgtcatatcttactcaacatttaagaactcatagtagagtgttacctatagaacataagaaatttggcaaagcctttgctttttccccagatcttgctaaacatataagacttagaactagaggaaaacactatgtttgtaatgaatgtggcaaagaatttacttgtttctcaaaactcaacattcacataagggttcacactggagaaaaaccgtatgagtgcaacaaatgtgggaaagccttcactgattcatcaggtcttataaaacacaggcgaactcacactggagaaaagccttatgaatgtaaggaatgtgggaaagcttttgctaactcttcacatcttactgtacatatgagaactcacactggtgagaagccttatcaatgtaaggaatgtggaaaagcctttattaattcctcttcctttaaaagtcacatgcagactcatcctggtgtaaaaccctatgactgtcaacagtgtgggaaagccttcattcgatcctcatttcttattcgacatttgagaagtcacagtgcagaaaggccttttgaatgtgaggaatgtgggaaagcctttagatactcctcgcaccttagtcaacataaaagaatacatacaggggagaggccatataaatgtcaaaagtgtgggcaagccttcagtatctcatcaggccttacagtacacatgagaactcacactggtgaacggccctttgaatgtcaggaatgtgggaaagcctttactcggtccacatatcttattcgacatctaagaagtcatagtgtggagaaaccatataaggaatgtgggcaaacctttagtaattcctcatgccttactgaatgtgtgtgaattggggctgatacttggaaagaatgtggtaaagccactacttcctcacacttactgaacatgtactcattcatagtggcaatgtacacagtcataaggaatgtgggaagccttccttggtgtctcagatcttaacaattccaatagaagagaagacatatgaatataaggaatgtgggaaaatcttggctccttccataggccttactattcatgtgtctgtgcatcctaggaaacaaactgaacgtaggaaacctgtcgatgcttacatcttactgagtctgtttgaactcatgctggagagaaatgctatgaatgtgaggaaggtggaaaagctttcattattttcctcgggccttactgagcttgtgagcacattggatataaatgcacgtcctctggctgtaaggaatgtgttgaaacctttcgctctgccttataccttaatattcagctgtgatctcacaagtgtgaaaaatcttatgaatgtaaaatgtgtggagattcttctttgtttttagcttccactttgggaacatgtcaaagcacacattgagaagtcccatgagtgaaagagatgttggaaagcccttgaacttggtcgttaggaaacatccacactgaagaggaacctgactgtatggaaggtcaaaaaggctgtattaatttacatgcaaaaagtcacactagaggaacgccatatcagaatgcttttggtaaatatacatgttttaaagaggttatatatcattaataaaaatatctagctggtctg

SEQ ID NO: 17684 - protein, 307 aa, Homo sapiens [sequence omitted]

SEQ ID NO: 17685 - DNA, 2659 bp, Homo sapiens
  CDS (260)..(1654)
ataaggctacggatgggcgggacggagcagcccaccgcaaagtggcggtttacttgaggcggttaccttagtactccgagtagactgagtctgtggcgagctgcgggccgattcctggccagtgccatctcagccggagcaggcctcggggcctcagaagcaggcttttatctggcccgaggctcccagccgttcagcgcgtcttcccataacctataccgattattgggactctcggctgcagacacaggagtcacagatgctgggaagtatggcccgaaagaaacctcgaaatacctcaaggttgcccctggctttaaaccccctgaagagcaaggacgtgttggcagtgctggctgagaggaacgaggctatagtaccagttggggcatgggtggaacctgcctcaccaggtagttcggaaatcccagcatatacatcagcatatttaattgaagaagaactaaaggaacagctaagaaaaaaacaagaagctttgaaacattttcagaaacaagttaaataccgagtaaatcaacaaattaggttgagaaaaaagcaacagcttcagaagtcttatgaaagagcacaaaaagaaggctccatagccatgcagtcttcagcaacacacttaacttccaaaaggacaagtgtttttccaaacaatttgaatgttgctattggaagttctaggttacctccttccctgatgcctggggatggaatagaggatgaagagaatcagaacgaattattccaacaacaagcccaggctcttagtgaaactatgaaacaggcacgtcaccggctagcatcctttaaaaccgtgattaaaaaaaagggatcagtgtttccagatgatggaaggaaaagctttcttaccagagaggaagtgctttccaggaaaccagcatccactgggataaatacaggaataagaggagagttgcccattaaggtccatcaaggtcttttagctgctgtaccttaccagaattatatggaaaatcaggaacttgactatgaggaacctgactatgaggaatcttcatctcttgtaactgatgagaaagggaaagaagatttgtttgggagaggccagcaggaccagcaggctatccattctgaagataagaacaaacctttcagcagagttcagaaagtaaaattcaaaaatccattatttgttctgatggaagaggaagaacaaaagcagttacattttgagggccttcaggatattctgccagaagcccaggattattttctagaagcccaaggtgatttgctggaaacccagggtgatttgacaggaatccagagtgttaagccagatacccaggctgttgaaatgaaggttcaggttactgagccagaaggccaggccattgagccagaaggccagcctattaggacagaaactcagggtattatgctgaaagcccagagtattgagctagaagaagggagtattgtgttgaaaacccaggattttctacccacaaatcaggctcttctaacgaaaaaccaggatgttttactcaaagaccactgtgttctccctaaagaccagagtattctactcaaatatcaggaccaggacttcccacccagagaccagcatgttctccacaaagaccaagatattctgccataatatcaggaccagaattttctacctaaggaccagaattttttatctagagaccagcatgttctccccaaagaccaagatattctgccaaaatatcaggaccagaattttctacctaaggaccagaattttttgtctagagaccagcatgttctccccaaagaccagaatattctacctaaatatcaagaccaggattttctacctaaagaccaggactttttatctagagaccagcatgttctccccaaagactggaatattctacccaaatgtcaggaccaggattttctacccagagaccaaggtgttcttcccaaagaccaaaatattctacccatatgtcaggaccaggattttctacccagagaccaaggttatcttcctaaagaccaaaatattctacccatatgtcaggaccgggattttctacccagagacctgcatgttctctccaacgaccagaatattctacccaaatgtcaggaccaagattttctaccaaaatatcagaaagtacactttaaggagccatactctgatatgacagatgagaaagggagagaagacttttctctggcagactatcagtgtttgcctcccaaatcccaggaccaggatgacatcaaaaatcagcaacctgcatcttttatgagagaagaaagagtgagagaggaattgcctctggactatcatcaatatgttgtacctaaaatccaggaccaagactcccctagagaacagaacaagcatatcaaactaccctcatcttttgagaaatgggagattgcaagaggaaatactcctggagtgccattggcttatgataggtatcaatcaggattgagcactgaattccaagctccactggcatttcagtctgacgtggataaagaagaagataagaaagagcgtcaaaagcagtacctgagacatagacgacttttcatggatattgagagagaacaagttaaagaacaacaaaggcaaaaagaacaaaagaag

SEQ ID NO: 17686 - protein, 465 aa, Homo sapiens
MLGSMARKKPRNTSRLPLALNPLKSKDVLAVLAERNEAIVPVGAWVEPASPGSSEIPAYTSAYLIEEELKEQLRKKQEALKHFQKQVKYRVNQQIRLRKKQQLQKSYERAQKEGSIAMQSSATHLTSKRTSVFPNNLNVAIGSSRLPPSLMPGDGIEDEENQNELFQQQAQALSETMKQARHRLASFKTVIKKKGSVFPDDGRKSFLTREEVLSRKPASTGINTGIRGELPIKVHQGLLAAVPYQNYMENQELDYEEPDYEESSSLVTDEKGKEDLFGRGQQDQQAIHSEDKNKPFSRVQKVKFKNPLFVLMEEEEQKQLHFEGLQDILPEAQDYFLEAQGDLLETQGDLTGIQSVKPDTQAVEMKVQVTEPEGQAIEPEGQPIRTETQGIMLKAQSIELEEGSIVLKTQDFLPTNQALLTKNQDVLLKDHCVLPKDQSILLKYQDQDFPPRDQHVLHKDQDILP

SEQ ID NO: 17687 - DNA, 3050 bp, Homo sapiens
  CDS (64)..(2481)
gaaacagatattaacaaactaaaaccccagcaagaaccgggacgaacaatagaagatctaaaaatgtatgaacaccttttccctgagcttgttgatgattttcaggactatgatttaatctccaaagaaccaaagccttttgtatttgagggaaaagtacgtggtcctattgttgttcctacggcaggcgaggaaacatctgggaattctggcaatttaagaaaggttgtaatgaaggagaacatatcttctaaaggagatgaaggtgaaaagaagtctacctttgtggatctagcaaaagaagatattaaagataatgatagaacattacaacagcagccaggtgatcaaaatagaactatttcatcagtccatggtttaaacaatgatattgtaaaggccttggaccgaattacattgcagaatattccttctcaaacagccccaggttttactgcagaaatgaagaaggactgcagtcttcctcttactgtccttacctgtgctaaagcatgtccacacatggctacttgtggaaatgttctgtttgagggaagaacagttcagctagggaagctttgctgcactggagttgaaactgaagatgatgaagatactgagtcaaattcatcggtagaacaagcatcggttgaagtacctgatggaccaacactccatgacccagacctctatattgagattgtgaaaaatacgaagtctgtcccagaatattcagaggtggcttatcccgattattttggtcacattccgcctccattcaaagagcctattttagaaaggccttatggtgtacaaaggacaaaaattgctcaagatattgaaaggctaatacatcagagtgatatcatagatcgtgtggtatatgacttggataacccaaattacaccattccagaagagggagatattttgaaatttaactccaaatttgagtctgggaatctgcgcaaagtaattcaaattagaaaaaatgaatatgatcttattctgaactcagacataaacagcaatcattatcatcagtggttttactttgaagtcagtggaatgcgaccaggtgttgcttacaggtttaacatcattaactgtgaaaagtccaacagccagtttaattatggtatgcaaccactcatgtattcggttcaggaagcattaaatgccagaccatggtggattcgtatggggactgacatttgttactataaaaatcatttcccaagaagttcagttgctgcaggtgggcaaaagggaaaatcctactatacaattacatttactgtcaattttccacataaagatgatgtttgctactttgcttatcactatccatatacgtattcaactttacagatgcatcttcaaaaattggaatcagcacacaatcctcagcaaatctattttcggaaagatgtgttatgtgaaaccctgtctggaaacagctgccccttggtgactataacagcaatgccagagtctaattattatgaacatatctgccatttcagagatcgcccttacgttttcttgtctgctcgggtacatcctggagaaactaatgcaagttgggttatgaaaggaacgttggaatatctcatgagcaataaccccactgctcagagcttacgagaatcttatatttttaaaattgtccctatgttaaatccagatggtgtcatcaatggaaatcatcgctgttctttaagtggagaggatttgaataggcagtggcaaagtccaagtccggatttacatcctacaatttaccatgctaaggggctgttgcaatacttggctgcagtgaagcgtttacccttggtttattgtgattatcatggccattcccgaaagaagaatgtatttatgtatggttgcagcatcaaagagacagtgtggcataccaatgataatgcaacttcatgtgatgttgtggaggatacgggattcaggacattgcctaagatactgagccatatcgccccagcattttgcatgagcagctgtagcttcgtagtggaaaaatctaaagaatccacagcacgtgttgtagtttggagggaaataggagtacaaagaagttataccatggagagtactttatgtggctgtgatcagggaaaatacaagggtttacagattggtacccgagaactggaagagatgggagcaaaattttgtgttggtcttttacgtttgaaaagactgacctctccattggagtataatctgccttccagcctgcttgactttgaaaatgatttaattgaatcaagctgcaaagtaactagccctaccacttatgtcttggatgaagatgaacctcgattccttgaagaagttgattacagtgcagaaagtaatgatgagttagatattgagttggctgaaaatgtaggagattatgaaccttctgctcaagaagaagtactttctgactctgaattatcaagaacatacctaccttgagcccgctgccatctcttgttaactgcaaagaataaatgaaatatcttggtttttatttcccaggaagcttgagagaaatgagtttatacagagctgactcaaaaagacaaaaagtaacttgggccagtttggtttcaagataataaatgtgttattaattaatgataaaattggcgcttgttttattttcgatattcaatgcactttatgtagcattgaatgatcaaatattggatttacctttaaaaaaaaacctgagtatcattgcatgaatttttatctccctatggttatatcctgcatcaagtggataattttgaagtgtgttcagaatataaaattgaaattttagagttgttgaaaatcctgacttgttgaaaactaatatatatgtacatggatttctatagatgtgtttgtttagaagtgggtagatattgcagataagactgttcttcagaatcatgttaactattgggttgtgactgaagtagtgcagggtttgccttgaaaccattacattctacatttaccaaattaaacaaataaaaactgtattaaatgtt

SEQ ID NO: 17688 - protein, 806 aa, Homo sapiens [sequence omitted]

SEQ ID NO: 17689 - DNA, 2918 bp, Homo sapiens
  CDS (1)..(2178)
atgcaagaagcatcgactcagctggaagactctctcctggggaagatgctggagacgtgtggagatgctgagaatcagctggctctcgagctctcccagcacgaagtctttgttgagaaggagatcgtggaccctctgtacggcatagctgaggtggagattcccaacatccagaagcagaggaagcagcttgcaagattggtgttagactgggattcagtcagagccaggtggaaccaagctcacaaatcctcaggaaccaactttcaggggcttccatcaaaaatagatactctaaaggaagagatggatgaagctggaaataaagtagaacagtgcaaggatcaacttgcagcagacatgtacaactttatggccaaagaaggggagtatggcaaattctttgttacgttattagaagcccaagcagattaccatagaaaagcattagcagtcttagaaaagaccctccccgaaatgcgagcccatcaagataagtgggcggaaaaaccagcctttgggactcccctagcagaacacctgaagaggagcgggcgcgagattgcgctgcccattgaagcctgtgtcatgctgcttctggagacaggcatgaaggaggagggccttttccgaattggggctggggcctccaagttaaagaagctgaaagctgctttggactgttctacttctcacctggatgagttctattcagacccccatgctgtagcaggtgctttaaaatcctatttacgggaattgcctgaacctttgatgacttttaatctgtatgaagaatggacacaagttgcaagtgtgcaggatcaagacaaaaaacttcaagacttgtggagaacatgtcagaagttgccaccacaaaattttgttaactttagatatttgatcaagttccttgcaaagcttgctcagaccagcgatgtgaataaaatgactcccagcaacattgcgattgtgttaggccctaacttgttatgggccagaaatgaagggacacttgctgaaatggcagcagccacatccgtccatgtggttgcagtgattgaacccatcattcagcatgccgactggttcttccctgaagaggtggaatttaatgtatcagaagcatttgtacctctcaccaccccgagttctaatcactcattccacactggaaacgactctgactcggggaccctggagaggaagcggcctgctagcatggcggtgatggaaggagacttggtgaagaaggaaagtcctcccaaaccgaaggaccctgtatctgcagctgtgccagcaccagggagaaacaacagtcagatagcatctggccaaaatcagccccaggcagctgctggctcccaccagctctccatgggccaacctcacaatgctgcagggcccagcccgcatacactgcgccgagctgttaaaaaacccgctccagcacccccgaaaccgggcaacccacctcctggccaccccgggggccagagttcttcaggaacatctcagcatccacccagtctgtcaccaaagccacccacccgaagcccctctcctcccacccagcacacgggccagcctccaggccagccctccgccccctcccagctctcagcaccccggaggtactccagcagcttgtctccaatccaagctcccaatcacccaccgccgcagccccctacgcaggccacgccactgatgcacaccaaacccaatagccagggccctcccaaccccatggcattgcccagtgagcatggacttgagcagccatctcacacccctccccagactccaacgccccccagtactccgcccctaggaaaacagaaccccagtctgccagctcctcagaccctggcagggggtaaccctgaaactgcacagccacatgctggaaccttaccgagaccgagaccagtaccaaagccaaggaaccggcccagcgtgcccccacccccccaacctcctggtgtccactcagctggggacagcagcctcaccaacacagcaccaacagcttccaagatagtaacagactccaattccagggtttcagaaccgcatcgcagcatctttcctgaaatgcactcagactcagccagcaaagacgtgcctggccgcatcctgctggatatagacaatgataccgagagcactgccctgtgaagaaagccctttcccagccctccaccacttccaccctggcgagtggagcaggggcaggcgaacctctttctttgcagaccgaacagtgaaaagctttcagtggaggacaaaggagggcctcactgtgcgggacctggccttctgcacggcccaaggagaacctggaggccaccactaaagctgaatgacctgtgtcttgaagaagttggctttctttacatgggaaggaaatcatgccaaaaaaatccaaaacaaagaagtacctggagtggagagagtattcctgctgaaacgcgcataggaagcttttgtccctgctgttaatgcgggcagcacctacagcaacttggaatgagtaagaagcagtgcgttaactatctatttaataaaatgcgctcattatgcaagtcgcctactctctgctacctggacgttcattcttatgtattaggagggaggctgcgctccttcagacttgctgcagaatcattttgtatcatgtatggtctgtgtctccccagtcccctcagaaccatgcccatggatggtgactgctggctctgtcacctcatcaaactggatgtgacccatgccgcctcgttggattgtcggaatgtagacagaaatgtactgttcttttttttttttttaaacaatgtaattgctacttgataaggaccgaacattattctagtttcatgtttaatttgaattaaatatattctgtggtttatatg

SEQ ID NO: 17690 - protein, 726 aa, Homo sapiens
MQEASTQLEDSLLGKMLETCGDAENQLALELSQHEVFVEKEIVDPLYGIAEVEIPNIQKQRKQLARLVLDWDSVRARWNQAHKSSGTNFQGLPSKIDTLKEEMDEAGNKVEQCKDQLAADMYNFMAKEGEYGKFFVTLLEAQADYHRKALAVLEKTLPEMRAHQDKWAEKPAFGTPLAEHLKRSGREIALPIEACVMLLLETGMKEEGLFRIGAGASKLKKLKAALDCSTSHLDEFYSDPHAVAGALKSYLRELPEPLMTFNLYEEWTQVASVQDQDKKLQDLWRTCQKLPPQNFVNFRYLIKFLAKLAQTSDVNKMTPSNIAIVLGPNLLWARNEGTLAEMAAATSVHVVAVIEPIIQHADWFFPEEVEFNVSEAFVPLTTPSSNHSFHTGNDSDSGTLERKRPASMAVMEGDLVKKESPPKPKDPVSAAVPAPGRNNSQIASGQNQPQAAAGSHQLSMGQPHNAAGPSPHTLRRAVKKPAPAPPKPGNPPPGHPGGQSSSGTSQHPPSLSPKPPTRSPSPPTQHTGQPPGQPSAPSQLSAPRRYSSSLSPIQAPNHPPPQPPTQATPLMHTKPNSQGPPNPMALPSEHGLEQPSHTPPQTPTPPSTPPLGKQNPSLPAPQTLAGGNPETAQPHAGTLPRPRPVPKPRNRPSVPPPPQPPGVHSAGDSSLTNTAPTASKIVTDSNSRVSEPHRSIFPEMHSDSASKDVPGRILLDIDNDTESTAL

SEQ ID NO: 17691 - DNA, 2671 bp, Homo sapiens
  CDS (158)..(2164)
gtacttgggcagagctccccggggttcattgtcttcgcttcacaggatctgtttgagtcctgtccaccggatcctacggggggtaccttcgaaaaaaaacgggctatgctgctgttgcgtgtgggtaccctctcctgacgcctccgccgcccgggtcatgtggaccctcgtgggtcggggctgggggtgcgcacgcgctctcgcgccacgagccactggggccgcgcttctggtggccccggggccccggtccgcgccgacccttggggctgctccagagtcctgggctaccgacaggctctacagctccgcagaattcaaggaaaaacctgacatgtctaggtttcctgttgaaaatattagaaatttcagtattgttgcacacgtggatcatggcaaaagtactttaactgacaggctcctagaacttacagggacaattgataaaacaaagaataataagcaggttcttgataaattgcaagtggaacgagaaagaggaatcactgttaaagcacagacagcatctctcttttacaattgtgaaggaaagcagtaccttttaaatctcattgatacaccgggccatgttgattttagttatgaagtatccaggtcactttctgcttgccagggtgttttacttgtggttgatgcaaatgagggaattcaagcccaaactgtagcaaacttctttcttgccttcgaagcacagctatcggtaattccagttataaataagatagatctgaagaatgctgatcctgaaagggttgaaaaccaaattgagaaagtgtttgatattccaagtgatgaatgtattaagatttctgctaaacttggaacaaatgttgagagtgttcttcaggcaattattgaaagaatcccccctcctaaagtgcatcgcaaaaatcctctgagagctttggtatttgactccacctttgaccagtatagaggtgtgatagccaatgtagcattatttgacggagtggtttccaaaggagataaaattgtatctgcacatactcaaaagacatacgaagttaatgaagtaggagtcttgaatcctaatgagcagccaactcataaattatatgcaggacaggtgggctatctgattgctgggatgaaagatgtcactgaagcgcaaataggagatacattatgtttacataagcaaccagtggagcccttgcctgggtttaaatcagcgaaaccaatggtatttgcaggaatgtatcctctagaccaatctgaatataacaatctgaagagtgctatagaaaaactgactttaaatgattccagtgtgaccgttcatcgggatagtagccttgctctgggtgctggctggaggctaggatttcttggacttttgcacatggaagttttcaaccagcgaccggagcaagaatataatgcttctgttattttaacaacccctactgttccatataaagctgtactgtcatcatcaaaattgataaaggaacatagagaaaaagaaattacaattatcaatcctgcacaattccccgataaatcaaaagtaacagaatatttggagccagttgttttgggcactattatcacaccagatgaatacactggaaaaataatgatgctttgcgaggctcgaagagcagttcagaagaatatgatatttattgatcaaaatagagttatgcttaaatatctctttcctttgaatgaaattgtggtagatttttatgactctttgaaatccctatcttctggatatgctagttttgattacgaagatgcaggctaccagactgcagaacttgtaaaaatggatattctactgaatggaaatactgtagaggagctagtaactgttgtacacaaagacaaagctcattcaattggcaaagccatatgtgaacggctgaaggattctcttcctaggcaactgtttgagatagcaattcaagctgctattggaagtaaaatcattgcgagagaaacagtgaaagcctataggaaaaacgttttggcaaaatgttgtggtggtgatattacccgaaaaatgaagcttttgaagagacaagcagaagggaaaaaaaagctgaggaaaattggcaacgttgaagttccaaaagatgctttcataaaagttctgaaaacacaatcttctaaataattggtgggaaaacaaagaattttcattgcaatttgtaatatgctgacaacagaaagaaaattataaaatttgcttgttactttcagggtattcaggttcaaataacctactagtctttcgttgaaagggagtagttagtgggtaggcaagagcttagattttgaagccatgttgcctgttctcaaatatctgttccaaccactcactagtaaggtgaccgtggccagattaacctttgtttcctcttcagtaaaatcgagattatactactacctacataagttgttgttgtgaagattaaatgaggtaatacgttaaatattcagaggtgcaagacacatagtaagcactcaattgtaactacagttaagtccttaaatgccatcgaaaggttcttagaaactgactttaagcaaaatgacacgtagcacaatgttcttgaatgatgtcatttccttaagtggtttgtaacatcgatgaggaaaaaaaattggtttatgcgtc

SEQ ID NO: 17692 - protein, 669 aa, Homo sapiens
MWTLVGRGWGCARALAPRATGAALLVAPGPRSAPTLGAAPESWATDRLYSSAEFKEKPDMSRFPVENIRNFSIVAHVDHGKSTLTDRLLELTGTIDKTKNNKQVLDKLQVERERGITVKAQTASLFYNCEGKQYLLNLIDTPGHVDFSYEVSRSLSACQGVLLVVDANEGIQAQTVANFFLAFEAQLSVIPVINKIDLKNADPERVENQIEKVFDIPSDECIKISAKLGTNVESVLQAIIERIPPPKVHRKNPLRALVFDSTFDQYRGVIANVALFDGVVSKGDKIVSAHTQKTYEVNEVGVLNPNEQPTHKLYAGQVGYLIAGMKDVTEAQIGDTLCLHKQPVEPLPGFKSAKPMVFAGMYPLDQSEYNNLKSAIEKLTLNDSSVTVHRDSSLALGAGWRLGFLGLLHMEVFNQRPEQEYNASVILTTPTVPYKAVLSSSKLIKEHREKEITIINPAQFPDKSKVTEYLEPVVLGTIITPDEYTGKIMMLCEARRAVQKNMIFIDQNRVMLKYLFPLNEIVVDFYDSLKSLSSGYASFDYEDAGYQTAELVKMDILLNGNTVEELVTVVHKDKAHSIGKAICERLKDSLPRQLFEIAIQAAIGSKIIARETVKAYRKNVLAKCCGGDITRKMKLLKRQAEGKKKLRKIGNVEVPKDAFIKVLKTQSSK

SEQ ID NO: 17693 - DNA, 2867 bp, Homo sapiens
  CDS (2168)..(2488)
tgtttttatgttaaaccaaacatgtctcttcggaacacagtctgtatacaaataacatgcatgaggactttccatttaatctgtgattcagccacatgatgtttttgccaaatgatgtgatactttccaaagcaccttgagtgtgaaatgtcaacagaaatatcagcaagcttttatgttgcagagtattatggtacctctgaattagcctgtatagttctcttcctgctttaagcattacctggttagctcagacggcttgaggcagtcccttaataatagggatgcttttcatctctaaggatgtaagaggcaaacaaatcatgtcattctttaagtgggctatgctttgatagatgtgctctttaaaggtgtgagattggaatttagagttgttaaattgaaatgtttgcattgcaccaaaggagctcagttttcaaactttaatggaaccttgggtaaagggaaaaaatttttaatgaaatctggggttttatattttgattagcctaaaagtaaaaatacagctttatccattaagtgacttttaaaaatcagttttgccataccaaagaaattagattcttagtgtcacatgctatacttttgtctgtgcttgaaacgagcaatgccaacattgggagcaatgacagaggtttgcatcagtttgtcttggctttgttaaggacttctgccagaaatgtgctcgtggttgacaacccaggatcattgttcaagttcttatgcagacacctttgaaaacaattcagatcgtgtcacaagaatctggaattgaaaatatcatttattttttaatgcaagaatacccagatgtggtttcacttcagcagtagctatagtggttcacttatatacatttctgtttcactgaatgtaaattttgaatactgaatgtaaaaaaaaaactccagttatattgaaacagtcactaagactgcacatgtgttttgcagactttcttcctgaccatttgccacatgggtctctgataagattctgttggtttaatagtcaaaataatctttgcagtttgtgagcactgagtagcaggttctggagactaccatatacaaccagttgtctaattgtgatttttttattgatgtttagaagaatgtaaccgtagagttctgtgttaagttgatttatgctcaggacataagatcacaggctaatgcaatgtgtatgtttcaggctttaatcttctcaatttccctttttaagccgttgatggtgtttaagattaacatgacagtcttgtatttttaccagatactgtattatttttcctattgctgctgtaacacattaccatgaaggtggtggcttaaaataacacaaatttttcttaagttctgcagatcagaagtctaacacaggtctccctgggacaaaatcaaggcgcttgcagggctgtttctttttgaggctttagggaaaaatctatttccttttctagttttttaaggctgggaacccctccttccatcttcaaagccagccatgtagcatctctctgaagctccttccgttatcatttctctttgtccaaccccagctgatacaggttatctaggtttaaggattccagtgatcacattgagcccacctaaataatccaggataatctccccaactgaagttcctcaacttaatcacatctacagagttccttttgctatgtttggtaacatattcactggttccagggatttgggcatggacttctgtaggtggccagtattttgcccacaacaggtacattctttctgtggaattctgatccctgtaaaatgtctgtagcattaaagagattggaaatctgaggtcatgtgccccttggggatctttaaagattaaaagcatgaaaactttgacttgtagcctaccaaaattatacactaaactttctctccaaaatacttgtgaaacaatttatctttaaagtttctgaatatgtgcttcataaaataacatctcatgtttatcagcaagtgtcctaaatatttgcgtctaactttatggaatttattcagaaaaagaattgaaaactcttcttatagttaccctttctccttttctcttcagtggttatgttgctggggaagagttgggggaagacctcaaaacacaggaactcagagtgatgaacaggaccatgctcaagtttattctttgttttcttttaatgacatattcacaacattcacaactttctgcctttaaatctggttcctctcttcagcttcaccaagccactgaatgcttttcagttttattaaccctcacattccccatccttctcagcaagagcctctccttatgccatcagcatgtatatacatttcctaggaaatttgatctttcttgtcattcttttttggttccaatcggccttttcctggttctcaaagctctagtttcttctaatttctggatcatcgcaagtctggccctctttgaactttaaaacataatgtctaattccaccccaattttcagcatttcttcaactaaatcgataaagctgtctccattatgagaaaggccagaataatactccgagtaagcataagaaagctggtcattttacaacttctcccgactctaggaagtaatatgatgccatttgttgagcatctacagtgtgccaagcacatggttcatctctgcaaactgctgctacattctgtaaagcaagtattatccgcattttagggattaggaacagcttcctgatctcttgccaaaagtcacagctagtgagtggtttaggcaagatacaaaccctagttagttaatccttactcagaagtgtataggactatgatacattgtctcagctt

SEQ ID NO: 17694 - protein, 107 aa, Homo sapiens
MNRTMLKFILCFLLMTYSQHSQLSAFKSGSSLQLHQATECFSVLLTLTFPILLSKSLSLCHQHVYTFPRKFDLSCHSFLVPIGLFLVLKALVSSNFWIIASLALFEL

SEQ ID NO: 17695 - DNA, 3005 bp, Homo sapiens
  CDS (90)..(770)
gacgccgccgccaccgcctcctcagagcggggcccgggcccagccgccgccaccgctgccgccgccgagctccgccgccgccgagcaccatgggagacgctgggagcgagcgcagcaaagcgcccagcctgccgcctcgctgtccctgcggcttctgggggtccagcaagactatgaatctctgttccaaatgctttgctgattttcaaaagaaacagccagacgatgattccgctccaagtacaagtaacagccaatcagatttgttttccgaagagaccaccagtgacaacaacaatacctcgataaccacgccaactcttagtcccagccagcagccgcttccgacagaactgaatgtaacttcaccgagtaaagaggagtgtgggccatgcacagacacagctcatgtctcattaatcacaccaacaaaaagatcctgtggtacagattcacagtctgagaatgaggcttcaccagtaaaacggccacgactacttgagaatacggaacggtccgaggaaaccagtcgatctaaacagaagagtcgacgtcggtgcttccagtgccaaaccaaactggagctggtgcagcaggaattgggatcgtgtcgctgcggttatgtgttctgtatgttacatcgcctccccgagcagcacgactgcacattcgaccacatgggccgtggccgggaggaagccatcatgaaaatggtgaagctggaccggaaagtggggcgctcctgccagcgcatcggggaggggtgctcctgaaggccaggcatggccaccacgtgacgctgttcttagttcactaatgttagccttatttaggacaaagtcagccagacaccttgtactgggcacgcgtcagactgcagccagtccgtttcctttctttagccagccatcctggtactgtagtttaggggttgatggtggttgaaattgatttctggctggttactaaggtgcctgctagccattgtataaaattaaaacatgaagaatatttttttttttgagcatggctagtggatttaaaacaacacatacctgtcactgctggagtcaaacttataaaaagccttaagtggaaagtgttccagacggagactctgagttaatagaggagtagaagctggtgttaaagttcccacgacgcacatggctttgccagaaactctgtttaatgatcggcctttcacctcttcacttatccttagtcccagtagccaggatacctgatggccacgtgtgccttggccacgggaggctgctgagattggccacgtggctggactgggtggtggcctcactctcccacagagctggaaatggggggtgggggacagattcttacggaaatttttttacctgacttgctatgaaaaaactcatcacacaagaagagaaacagtaacctcactttgaaaattagctccactcaagactagtccacgaacgagacccgccttttctacacaggatccaaggtcacgagaagcagccagagtgccccgcctccgccggctctggtctgccattcgccagtgcagggatctggcacggaccagatgtggcgaatggcagcacagcgcggtggctgggtctgcacactggcctctgcagccagatttctatattgggagttttttaaaaagacatttcatagccaacaagaatcagtagaagtgctgggagcagcagctggggaagctgccgcccacgggctctgccccttccagctggagccgcccgtgcctccaggggccaagaggatgatgtcgtggcctccattctcgtttctatgcagccccatagtccaaggacacccagtccacatctaccatatagcaagtttagtaagggaaggcagcatacgtcccagggacagtgggtttggatctgtctagaacagcggtttgtggctgtggcccagctccgagagtgatatttgctctggtaggtgagggcctgagggtacatttctccacctgtgccccctcatgttcacagaggatttcagcagctgcaactgcgcacgccaggtggggaagggtgggggtgggcctggttgccccatgttaggaaatcactaccagtcaggtggggctggggctgggtggacaggatcaggattcccttgaaagcccaggcagggtgagcagtcccagtggtcctagtgccgcatcagatccaggtgggtgagggcaggaggcccctgcgaaggcagcgtggatctgcccacacataggctactggaatagtttaacccagcaactttcctttttataaaacaacaaatggttcaactctgtctgcaaattaacagctgaacacctgcaactgcaaatgttttttgatccgacgtactgaaataggaagtcatgctcttcccaccctccacccaccagagtggaacccgctgcaaaatccccagccttaattcttgcttcaggacccagaccggtgtcttgctctagggcaacccagggcagaggggccaggtctgcccagcgtttaccactgctgtcaagccacagcccttggccaccatacgggccatcctcagtgaggcagccccccataggcttccgccaagctctggtcccgaagaggctgtgcgagcccttcccggccctccccagggccccccgccccctcctctgcctgctgcgtggaggcagccatgggaaggagcccaggggagctggcctgggggagcgaagcccatgttcgcttcctgacttagagctggggggggtggggggtggggcttgttcccctgcagtatctgttctgtgaagtttgttaaatgtaaggaaagcttaaattcttgtatctttaaaagagaaaatcttatttaacccttttgtgttctagatttacttacacacatagcctagagctcagttttagttttaacattgtgaaaatattaaaagaatcttgtaactttattcttttttctcctgctgaaaaaaaaattaaaccaatcgtatg

SEQ ID NO: 17696 - protein, 227 aa, Homo sapiens
MGDAGSERSKAPSLPPRCPCGFWGSSKTMNLCSKCFADFQKKQPDDDSAPSTSNSQSDLFSEETTSDNNNTSITTPTLSPSQQPLPTELNVTSPSKEECGPCTDTAHVSLITPTKRSCGTDSQSENEASPVKRPRLLENTERSEETSRSKQKSRRRCFQCQTKLELVQQELGSCRCGYVFCMLHRLPEQHDCTFDHMGRGREEAIMKMVKLDRKVGRSCQRIGEGCS

SEQ ID NO: 17697 - DNA, 2079 bp, Homo sapiens
  CDS (74)..(682)
taagtttcctttgattctacagtttgggggttctcagcagttgcggctggtccgtattctgcgcagcaccgtgatggttcgcgttggtggaggatggatggccttggatgaatttttagtgaaaaatgatccctgccgagcacgaggtagaactaacattgaacttagagagaaattcatcctaccagagggagcatcccagggaatgacccccttccgctcacggggtcgaaggtccaaaccatcttcccgggcagcttcccctactcgttccagctccagtgctagtcagagtaaccacagctgtacatccatgccatcttctccagccaccccagccagtggaaccaagacttcacttcagttctctcgctgttatgacaaaccctggttggtaaacagtaaagctggcacccctatcagggacagccattctcctgacctccagctgcccacccccgaggttatcccatcatcaggtagcaagttgaaacgaccaacaccaacttttcattctagtcggacatcccttgctggtgataccagcaatagttcttccccggcctccacaggtgccaaaactaatcgggcaggtaagtacctgccccgtgacctacaagccaggctgagaatttggaaacaacagcctatgtggaatgtttcactgctcccaaggagcgggtaatgagagtggcacttagtgtgatgcccagaaagacagacctgcagatgctcaagtgacctttactttttctgtcattacagctagctttaagctttccttctgagatgagatgcttccacagccaaagctgggccatgcgttctcatcagaaatgatcacatttgagagaatgtaaaaggaaatgtgggtcttcctcagacaccagtccagtgttgggatgagcagcttgctagtaatttttccaacacgtcatacttactatggctgctgttgaaccaagaaaggcaggggaagatcacatctgttctcctgctactgttcctcatgggaacctaggaatcttccttcatttcctggctggctgcttcccctcattttgcctctatccatcctgcccatggattagcccggctggcaggctcacccacctgtgctgaggtggttgagcaaccttgcttgcctccactttggggccatggaaggtgacagtgctgctgatagagtggctttctaatccccaggaggcagcttctcaagtagaatcacaaagccagaaaaggcttcagcaacttctgtatggatgaggaaactggggtgcagaaaggctgtgagatttgcttaagatcacacaggatcagaaccctagcttctgctcacttgttcttccaccccatgccatctctattaagtctgctgttttattcttgaattccagaccctaaaaagtctgccagtcgccctgggagtcgggctgggagtcgagccgggagtcgagccagcagccggcgaggaagtgacgcttctgactttgacctcttagagacgcagtctgcttgttccgacacttcagaaagcagcgctgcagggggccaaggcaactccaggagagggctaaacaaaccttccaaaatcccaaccatgtctaagaagaccaccactgcctcccccaggactccaggtcccaagcgataacactgtctaagcacccccaagccactatccactttgaatcctgctccatacattgggtgtatatttattctgaacgggagaagttatattgttaaaagtgtaaaagaataattgtgttatgaagctgccttattttttttctttttgtaagttactattttcatgtgaatatttatgtagataaaatttgcctcctggtaaccctgtaatggatggggcccagaaatgaaatatttgagaaaaacaagtgaaaaggtcaagatacaaatgtgtattaaaaaaaaaaagcctattaatagggtttctgcgcggtgcagggttgtaaacctgctttatcttttaggattattcctaaatgcatcttctttataaacttgacttgctatctcagcaagataaattatattaaaaaaataagaatc

SEQ ID NO: 17698 - protein, 203 aa, Homo sapiens
MVRVGGGWMALDEFLVKNDPCRARGRTNIELREKFILPEGASQGMTPFRSRGRRSKPSSRAASPTRSSSSASQSNHSCTSMPSSPATPASGTKTSLQFSRCYDKPWLVNSKAGTPIRDSHSPDLQLPTPEVIPSSGSKLKRPTPTFHSSRTSLAGDTSNSSSPASTGAKTNRAGKYLPRDLQARLRIWKQQPMWNVSLLPRSG

SEQ ID NO: 17699 - DNA, 1630 bp, Homo sapiens
  CDS (529)..(1005)
acaggctcccgggccacgagaaaccggccgagcagtccgggccaagctccccggaaccctcggccgtcgcaacccccgacgccagggctgaagcgccgggcactgccgcctccctcggtcgcccgcccgcacgcccggagcggggaagcacgccgcctccctacgcaccagcatggcacctcgcacaagtagcgccgccaaagtttccccacgagggggctgagggacaaaagcccctcccgaaactcgcccgaacttcgagggcctccgacctgcacggccctacgcccaggcggcggccccgagcgccgggggcccgcacgggcacatgcagccctttgttttctgtccagccgggcgctgcctacgtgcagcatcagggatgtcggagcgtttcgcaggggccggacactggacgatcaccctgggtaggggtccggaccccgcgccccgaagagtccggagcctggccccccgaccctcccctcgggagcaggcccatttaatcaaagttttgcagtgtccttgatgagaaacgcccggagtatccgccccgcacgggcggagagttggcgactttcactctgctttttaaactggcaagacgccatcatcagcaaaccacattgtcctgccggccggacctgcccgacggcggccgcatcccacggcccacgcggggctggacattcggacaaggaccagggtcgcagcccgaagcacgtggtctgtcacgtagagcacaaaaagcagtgccctgcggagttcactgactcccgcggcgtacacaacgccgccgcctccatctccagccaagttggcttccctggccatcttacagcgcggacggccgcccataaacgggaagccctcgcggtgtcgcccacacctacgctacaggtgaacgcaccgggagcaaaacttcgggctccgaaagcaccccggacaccagaggctcttgggcgcggtccgaagagggcaggcgagtggaagacgggctgtttttaagcgaccgcgtgttgctctcattgtcgcatccgcatccctccggagttgagcaaacaacgccacgccgcgtgcgctccggcagagcccagcactgacccccaaaggccgatttaaagaccctcggccgccagctcggaagcggatggcaacttagtttccgagcgaatggcgtttattgtccaccctagtccgagggctgcagtcaactaaaccacgaggtttcacaacggcgcccgaccctgcccgcgcctcgcgcccacgcggacgcaccgaccccggccgctgcgcggtggccaacgagtcgctttcctctcgggcctttcggccgccgggctcctttccgcgagagaacactgcggcggagaaaagtcattgtcaccttcaacgtggatccctcaactccggcgactcctcaattatgcccaggctccactcacttccccgccccgagactttcggtttgcctcaaataccctccccaattaataaatacacactaaacacgagcgtaccaaagaacctggggtctgaagatcacgaaaacagcgctcccaacaatgccacctccaagacaaaacttcctgtgtgtatgtggaaggacggggggaggtgggtggaggtg

SEQ ID NO: 17700 - protein, 159 aa, Homo sapiens
MRNARSIRPARAESWRLSLCFLNWQDAIISKPHCPAGRTCPTAAASHGPRGAGHSDKDQGRSPKHVVCHVEHKKQCPAEFTDSRGVHNAAASISSQVGFPGHLTARTAAHKREALAVSPTPTLQVNAPGAKLRAPKAPRTPEALGRGPKRAGEWKTGCF

SEQ ID NO: 17701 - DNA, 2084 bp, Homo sapiens
  CDS (1253)..(2065)
gcaggccggccccaccctcctgacggtcaccctggtccctgaagctgcctggatatggtcgccatgcaggaagccgcccagcacctcctcggcacacacgacttcagcgccttccagtccgctggcagcccggtgccgagccccgtgcgaacgctgcgccgggtctccgtttccccaggccaagccagccccttggtcacccccgaggagagcaggtgaggaagggcccctgggctgtggccctgccctcaagtcacgtgctgattttagctccagcacctcccccagttttaaggcaaggcgaggccctcaacacacacctgcggcacccggccatcagggtcctgcgggccttccgagtgcccagcgacttccacgctcgtcacgcagccacgtcccggacctacctgtaccgcctggccactggctgtcaccggcgtgatgagctgccggtgtttgaacgcaacctatgctggactctcccggcagagtgagtgtggccctgacagcggggagggggcgggcaggccggccccaccctcctgacggtcaccctggtccctgaagctgcctggatatggtcgccatgcaggaagccgcccagcacctcctcggcacacacgacttcagcgccttccagtccgctggcagcccggtgccgagccccgtgcgaacgctgcgccgggtctccgtttccccaggctggggagcggagaacagggaaggctgcttgtctctgaaaaacccctgccatgcctgatggaagaatgttggcagctactggaaaggtctcactggtgccagtggttctggtggggtggtttctgctgcccccagcactgtcccgagggccacccaccaggtggcagcttctgaccagaacctcccctattggggtgagccctgaaggggggaagaacttctgccagccccagacttctgtggcagagcagcaggtacaggactgggggtctctggcacccgcaccagccacgttcccagaccctgcaccaggaccctaggtgagggcccagggcaagcccctctgggatggccaggctacctgcccagcctccagggtcctgctgcctccttgcccaagcattgtttctctggttttaagcccctccaatgggcctcactgggggcaggagatcagccagggcccctggtggccaagctagtgggaaccaggctcgtctttaggcccaccctgtcactctcccgtccaaggccacatagtaggctgaggatggcaaacactgccccacagacacctacaggtacgtgtttttccaggaagctgcggttctggaacctggagtttgagagccagtctttcctgtatagacaggtaggctctgttctggggccgtccccagggggtggggctgagggtgggcaggcccctgtgcagtcttggctctgggtcgtgggcggctctgggtcacaggtacggaggatgacggctgtgctggtgggtcacgggcggctctgggtcacaggtacggaggatgacggctgtgctggtgggtcacgggcggctctgggtcacaggtggctctgggtcacaggtacggaggatgacggctgtgctggtggccgtggggctgggggctttggcacctgcccaggtgaagacgattctggagagccaagatcccctgggcaagcaccagacacgtgtagccccagcccacggcttattcctcaagtcagtgctgtacgggaacctcggtgctgcctcctgcaccctgcaggggccacagttcgggagccacggatgaccctggacactcaagccaaagttaggccacaccaggcccaaccctgtgctggtcaagccagggcagtcacagctgcttggggcccacagcactgctgcctggtctccacagtagcctccctgcccgggtctcagcaccctggatgcccgtctctgtcccaggcgggatggggcacagtgcaggacacagccatgtacaccaagaagagagtaccaagtagtcttttgttcagcttttactggaaactgctgtctaggaccacctgccctaaccaggaataaaggcaagacagcctgg

SEQ ID NO: 17702 - protein, 271 aa, Homo sapiens [sequence omitted]

SEQ ID NO: 17703 - DNA, 1662 bp, Homo sapiens
  CDS (377)..(700)
aaaaaaaaaagagctccgtcctgacgcgccgcctcccgtgggctccggccggctaagccgcggcggacaactatgctgaaagccaagatcctcttcgtggggccttgcgagaccttgattccaaccactgcccggaggaggtagtggaggcgagcccggtgttaatgagccccgaaggcccaagagtggaaaaactgttttggccaactttctgacagaatcttctgacatcactgaatacagcccaacccaaggagtgaggatcctagaatttgagaacccgcatgttaccagcaacaacaaaggcacgggctgtgaattcgagctatgggactgtggtggcgatgctaagtttgagtcctgctggccggccctgatgaaggatgctcatggagtggtgatcgtcttcaatgctgacatcccaagccaccggaaggaaatggagatgtggtattcctgctttgtccaacagccgtccttacaggacacacagtgtatgctaattgcacaccacaaaccaggctctggagatgataaaggaagcctgtctttgtcgccacccttgaacaagctgaagctggtgcactcaaacctggaagatgaccctgaggagatccggatggaattcataaagtatttaaaaagcataatcaactccatgtctgagagcagagacagggaggagatgtcaattatgacctagccagccttcacctgggactgccacatccccagtgaaatcagcatgtttctcggtgcagatctgaaatcacatccagctcctgatgttttcttctccctctgactgcagaggaagtgttcctacctgcaggaaggcacctgtcacacagggcgttcactcagaccatctgtgctctgccctgagttcagttgagaaaatcctattatcaaatttggatttcctggccccagaacttcccaaagacctgtaaaatggagggatttaccacctcacatatgtccagttaaacagtttgtggacttgtaaccgtcgcagcccaatgaaacaacagtagtttaatcacgtgtattggcttgaatgtgattttcattccttgattcacccaacaaataccgactggctgagcacctgctgtgtgtgcactgctgttctagctgctgaccatagacagcataaatgaaaaagacagaaattcccaccttcgtggaactctccattttcctaaatgttaggttggtgcaaaactaatcgtggtttttgccatttttaatttttaatggcaaaagccactattacttttgcaccaacctaataggccgattcagaaacttgagtgcaatgtcttggatatgcaaaaaagaaaatcaaaacgcattcttcattctctataagagttctaggcggggcgtggtggctcacacttgtaatcccagcactttgggaggccaaggtgggcggatcatgaggtcaggagatcgagaccatcctgaccaacgtggtgaaaccccatctctactaaaaatagaaaaatcagctgggtgtggtgccgcgtgcctgtaatcccagctacttgggaggctgaggcataagaattgtttgagcctgggaggcagaggttgcagtgagccaagattgcgccactgtactccagcttgggcaacagagcaagactccatctc

SEQ ID NO: 17704 - protein, 108 aa, Homo sapiens
MKDAHGVVIVFNADIPSHRKEMEMWYSCFVQQPSLQDTQCMLIAHHKPGSGDDKGSLSLSPPLNKLKLVHSNLEDDPEEIRMEFIKYLKSIINSMSESRDREEMSIMT

SEQ ID NO: 17705 - DNA, 1707 bp, Homo sapiens
tttatattgtgtaataactcacgtactctgaagagagcttggtcaaacaataaaatacattgttactaacttggtttcttttctgtgtactttgcaaaaattctatttttaattttgttcatatgttgaatgtgcccctaattggcatcttaaagagaatagtaagcatctattaaccaaaaaagaactctaatagtaaaggaaagggaaatattggtggtatgtacccacaaaacccccaagtgccaagttaatggaatctctgctttccctttcagatgctagaaagccactgtaatgagttcttgcagtttagcatccagtctaagctactgcattgtttaaagggcagcatcaaggacactttctccaaactggaactctcttctttgtcaaatcttgtactttaaaattctacaattctgttacattgttgtttaaatcacagactgctcagatccattttactgcagtagtttccaagtgtgtaacttggctttagtatttatcagttgccagaaagaaacaggttgtcatttggaagtttttgtggttattttttcccatttttattcttcagataaaagcagtaccccaaaatagaaaatgaaaattttcatgaaacaaagagaactcccttgttaaaaccagcttattaactctgtattctgtcaaatgcatttttttctaacaactgaccatggatgttgtgaaggtgcattttaatttaaacatggaaaagatttttttcataattacatactagaatgtaaaattataattttgccatgacttaaagagcacagttgatatcccaaaggttttgatgctaagaagctacagttattctaaatgcactaaaatgtttgaggcaaatctaccttagaggcttttttggtatggtattttttaaaatatttagattttatttaaatttcctgtgagttattctgtatttgaaaagatgttcgtgtcttcccctctgtattgaatgtttcactcattttatttttaatcaaatattttatagaaatgagttgttgggaagagtttaacatgcactatttatagtactttgccgttaacaggcaatgttctgaaactaaatttatttttgttcagtgaacataagtttagatttttaaagttggtagataatttatctccactaatatttttttaagaaactgtgaagagattaactgggaataattttatttcagattttactaatgtagtatgtagctacaacttcttgaacttcaagttaaggctagacatttactttgaaaaaattccactgggtgtttccagggctatttcattttagaaataagtgtttgccattcttctgcaaaaactggacaaggggaatactacaaaaaatactcagagataaaatcctcatttcaagttctacaaaatatttatcaaatgaatgttaatttttttttaattccctgctaaagacgttttcattagtcttagagggtatatgctttctagaacttgtttttgttaacatgtgctttgatgtaaagaacatattttgtatgcaaaacataacttgcattatggttgtacaatacactatattgtttagggattccggaaagcagtttaatgcagaaataactatatctagtatgcagttcatattgtgaatgaagctttgcttttgtaataaataaataagactttctaatg

SEQ ID NO: 17706 - DNA, 2692 bp, Homo sapiens
  CDS (103)..(693)
agtcagaggttaacggaaaacggaagctggctggctgagaagaagcttccgttagtcctaccttgaagagaaaagagccagataaagagaaagattaaaagtatgagaaaatacagaagccactggtctcagggagacagagaaggataccaaagaagaagtaactattatgaggggccacacaccagccactcaagccctgcggaccggacacgtgaggaggtagtgacgccgacactgccagaacacactgctacaaggtcccagatggccacgtctctggattttaaaacttatgtagatcaggcatgtagagctgctgaggagtttgtcaatatttactatgagacaatggataaaagaagacgggcactaaccaggctgtatctggacaaggccaccttaatatggaatggaaatgctgtttcagggctggatgccctaaataatttttttgacacattgccttctagtgagttccaggtcaatatgttagattgccaaccagttcatgagcaagcaactcagtcccaaactacagttcttgttgtgaccagtggaactgtgaagtttgatggaaacaaacaacatttcttcaaccagaacttcctgctgactgctcagtccactcccaacaatactgtgtggaagattgcaagtgattgcttccgttttcaagattggtctagtagttaaaggggcaaaagtccattctcatttggtccattagttccagcaattgaaatttatgtgaattattttgattgtagaagcactataatatgtgctgaaactaaatttctttaatattttctattcctgtcagcaccttttctagcagctgccagtttggagcattgccctctaagagctttaaaactatttttttacatgccttatatacattccactaatgacattcttataataatattaaacacatgatcttggtactaacatactcactgtgaacccagcctattgcaaaaataaaatctttttataatattatctatgggatgtcagcacaatataacactctgggaagaagtggagttttttggttattaggttaattttctagtaaaacacgttgcctgttttcagttaacactggtaatgccattttaatatatggctttttcaaatcagttcagtgaaaatagtacagatttaggtttacataactactctgacatactggaattgcatatagagatgttcagtggtcgtttttcattttaagtaatttttgttttggcatttttttgtgtgaagtaaattaatcaactagagaggtgcaaaacgttctcagttgatatctgagtattgggtgcatttggtggcttaaaagcaaagcttcctaaaaagatttttcttggcagctccaggtctatacatttaggtaatgaatggtagtagaactaatagctttaacaggagaatagggaatgagaaatagaaatccaaggctgaagccaaaagtaaggagggtggccaaatggtaaactattggtacttgttttctacctccaaaaaatgtagcttatttttaggatttaaatcactaagtaaataagtatccttgccaagtgatcatgagtgtcatttttgttctaagactaatatttttagatctttttacttcacctcatacttatcaccaatgtatatctccatttattcaataacttactggggtaaaataacagcaataaacctaaccttttaacagggtctaacatgagagttggagtcaaagccattgttatcttttggtgacacccttaaattttaagtcttccagtcttccatgtgaactttaggcccaaagtttcttatgtatcacacatcccccaaataagtgattttttcccagtgctttgtactgtcaactgcattatctttaattatttaaaggtagaattatttaattttgtgatttgttcttccatatgacattgagcaaatagatctgtttcaaaatatgttcccgctatgtggataactcttctttttaaaaagaaaatagagaatagcaaatcttcatgataatcctcaaaagaacaaaatgcttaactttatctcttaatttctaaaggtaaataacctaggttcagcttttgcttaaacattaaatatcttttccattttttaatgtttgtaagctagatatgccagctttgtttctacattgcaaccaaaaactgtttcttttcacttaattataaaaccagtaattcatttactcttgcccaaaactatacactgtatttctgttatagtaacaaaatagagttatgtagaattgtatggaactcaaatttaaaccatgctttcttgtagtactgattgaaacttacacgttttattctactcatagtgagcttattcttattttggattgattttccaaaaccacagcttcagcagcaacaatcagaatgtccaaatgctgtcctttcccttacagagaagaacaatggtaactaaaagctgcatataactagcaataactacattgaacggtgtgcattgttcatgattgttgtgttttaagacttgtatataaactgctttttccaaactctgtataacttttaaatggctggaactactcgtataaggactagactgtatttttgacatgctcctatttttgtaacttgaaaaaataaaattttgccttgtg

SEQ ID NO: 17707 - protein, 197 aa, Homo sapiens
MRKYRSHWSQGDREGYQRRSNYYEGPHTSHSSPADRTREEVVTPTLPEHTATRSQMATSLDFKTYVDQACRAAEEFVNIYYETMDKRRRALTRLYLDKATLIWNGNAVSGLDALNNFFDTLPSSEFQVNMLDCQPVHEQATQSQTTVLVVTSGTVKFDGNKQHFFNQNFLLTAQSTPNNTVWKIASDCFRFQDWSSS

SEQ ID NO: 17708 - DNA, 2040 bp, Homo sapiens
  CDS (1519)..(1938)
ttcttgctcagaataccttcatgatttcttgctaaaattccaaaatctttagcttggcatttgggattttctacagtaggaaccctgtccatcacataaaccttaacgtcactacatgtgcttatgcaaaaagggctgcctgaatgagttgcttgaatgtatgtactatttgaataattacctgtttgccattgcttgctgtttatattacctggaatgccatccttttcttcttgagagctttagcacaaatccctcctcagtaaaaatagtggcttaagtttcctgagtgcttacgtctgtgaggcaccatgcctttaatttccactattgcattgaagcagtggttatagttatcagtcaagccttgtacattaaaatatacacacccaaatatatatacacaccttgtgacacaggtactgttatcatcaacttgcatttggaggatttgtccaagatcacatacctagtaagtagcaagagtgggtctctgtctcatgtaattccagagcccaggtgcttagtcatactccagtgccatagcacttatagctaacacttactagaggaccagttacatgtcagggactgctataagggcttacatatttgatcctttgaacaccctaatgaggtagcaactgcagtgatctctgttgtatatatgatgaaattgacgctttgagaagtaacttacccacagtctcatatctgcgaaacgggaaagccagaattagaacccaggcagtctgcttttggaattctactgtaagtctctttgataagctgtcaaattgtacagccacagagggaaaaatttactgtttgtccatctatttgtcattatataagggattgggtataaagaaataagcattatataggcgttatataaggacttggatataaagaaatgaagcaagaaaaaaaaatctcatcttctctaaactcatagagcttgcgttgtagtaccactgtctatacctgatcctcaagggcacagatggggtatttagttgttctgtattagtagtaccttgcgcgagtaagtatttaatgtgttggtgatgataattcattggcttttctgttaactcctgccaaggagactttgccctgatttaggcttattaataatttttttttcccagacaactcgtagccaggcgttcattctcttcccgctcatctttcctcttcccatttgaatcatgtttttgttgacatctagagtattttatcccattatgtactatggagcattcttctatttgtagggataggattaccaccctggagaattaatttttttcttttttcctcagtactatactggcaattgctggagaagattttgcaattgttgcttctgatactcgattgagtgaagggttttcaattcatacgcgggatagccccaaatgttacaaattaacagacaaaacagtcattggatgcagcggttttcatggagactgtcttacgctgacaaagattattgaagcaagactaaagatgtataagcattccaataataaggccatgactacgggggcaattgctgcaatgctgtctacaatcctgtattcaaggcgcttctttccatactatgtttacaacatcatcggtggacttgatgaagaaggaaagggggctgtatacagctttgatccagtagggtcttaccagagagactccttcaaggctggaggctcagcaagtgccatgctacagcccctgcttgacaaccaggttggttttaagaacatgcagaatgtggagcatgttccgctgtccttggacagagccatgcggctggtgaaagatgtcttcatttctgcggctgagagagatgtgtacactggggacgcactccggatctgcatagtgaccaaagagggcatcagggaggaaactgtttccttaaggaaggactgatctgtgtgctcttatcaccaatcagttcagacctggttgattttgtactttggaactgtaccttggatggttttgtttattaaaagagaaacctgaagt

SEQ ID NO: 17709 - protein, 140 aa, Homo sapiens [sequence omitted]

SEQ ID NO: 17710 - DNA, 1787 bp, Homo sapiens
  CDS (12)..(542)
acttaaacggaatggaacggaacgggaggccccggctggtgggcaggtcgcctgctgctgatacaggaagggacaaagggctcggacgattccggtctttccttagctgctctccttgcaagctctttcctccccatgggtctcttgatgagtccaacaagacgggcatggagcccgatctcacagatggggaagctgaggccagcggcagcttcccccagcacagaagagagctcctggcattccagcagggggtgactggaagaaaaccagggacctggtctaaccacctcactcttcagatggggaatagctggagatacaggaaatggcagagtacgatttctgcactggaggtttccccaggtgcccctgctggttggtggggaacacaggagccacgaccatccccacgagttggctgtcagttttatggattcccagaatatttaacagctgagtggatggcactggtcaaggccggcctgttccctcccacatctacccacaaggtatcttcctgggaagcagggaagacagtgtaggccctgccccgccagtgcatgagtgtctgggagtcaggactcctgtgtttgggtggccctgactccagtttgctctgtggccccaggcaagccactcaccctctctgggccatccatcaaacaagagataagatgctctccaggggctagcccttccttcggaccgtgagaaaaatctagggagggcacaggcatccatccatgaggacaggatggaggagggactacctaaacccctgtccatctctgacccccaagaggcctgtgaggcagtgggggcagcgcctggcccagccaccatcctctaggcagggtgctgccgtgggaagagagcactgtggtgaggtggtgagaccgcgtgccccgggtcaccctgaccggtccaattgcctgtcactcaccagaggcccaatcttgggcaagtgactcagcctcttggtgtgcgaaatggcccccatgaggcctcctcagcctggggggctccatggcagaagggttccaagaaggcaggagctggagctgttcttgccgctgctgggaggtcctgtccaccctctagcctccctctccctgatcccccaccactgcccattcccagtaaggcacctattctctttgccaccctgacaccaagtcactgttcagcttgtgggcaacagagccggaagcatggaaaaatctcatgctgctcccaaagccaagggagggctcaaagaaggctggtggaaaaaggcccagagctgtggccggacagagtaggccccgaacaaccacagagccgccttgacagaagccagggcacggtcctgagatgagcctcatccctggagggcagcaatggaccatacacgtgtctaagcccccatcaccagccggggacccagtgactcagagcctgctcttcctgaacccactcggcaggaagaaaactgaaggcccaagagccccagccacactgtgacctggaggtgacctggagggagacagggtgacagcaccaagctcagcctttcctccgaggcttcgcaggactgaatgaaggcaaacttcccaacaccccaagccatgggattgtccttcctggggccctgactgagctgtgacgggctgtgtggccctgggtgagttacttgccttccctgaggctcatctcagcacatataatagaaaatggagacaaaaggatgccctttgcatgggttttgggaaagattaagtcacatgtttataaaagtgcctggc

SEQ ID NO: 17711 - protein, 177 aa, Homo sapiens
MERNGRPRLVGRSPAADTGRDKGLGRFRSFLSCSPCKLFPPHGSLDESNKTGMEPDLTDGEAEASGSFPQHRRELLAFQQGVTGRKPGTWSNHLTLQMGNSWRYRKWQSTISALEVSPGAPAGWWGTQEPRPSPRVGCQFYGFPEYLTAEWMALVKAGLFPPTSTHKVSSWEAGKTV

SEQ ID NO: 17712 - DNA, 2656 bp, Homo sapiens
  CDS (229)..(540)
ttagtaattgttttataaatttgggagctccagtcttaggtgcataaatgtttaggattgtgatattttcctgttgccaaggctggagtgcagtggcacgatctcagctcactgcaacctccatctcccaggttcaagcgattctcctgcctcagcctccccgagtagctggaattacaggcgtgggccaccacgcccagctaatttttttttttatttttagtggagatggggtttcaccatggtggccagactgatctcgaactcctgacctcaaatgatccacctgcctcagcctcccaaagtgctgggattacaggcatgggccactgtgtccagccaaataaagtcagttttaatgaacataggttcatggtgtgccataggttaagtttttatacagttggtattaatcaacaggaaattataatgcaaactgcatatactcttaaaaacttttctggaactgagtggatcttgaaaataaaaatgattgttagatatttcaaagattattgtaaatttccaaattctgttttttaattctttacttttaatcataaagtataccatctatttgaaaacaggtataccacaatgtacctacttcatagtgttgctatataatgcgaagaacaatgcttaacacatcgtaagtatgcgatcaatgtcaccattgccttgatttgtttagcacctttaggcacaccaaagaatacagaggtatcatttgagttttctcattcagtataactcatagttctcctccttaaatagattatgttgaggaattaatgagcttctgccagctgaaagcttttgacagatagatgtttgtttcctgggcgatggggccatcacggtgcctaagtcagttacactaccatcttctagccttgaacattctgtgatctattctgaaagatttgacaatttctattctctaattttcttgcctagagtgtgacaggtgcacaataacttttcatttccatgctgcattatagggtaatctttttgaagacattttaaatgacaattagagatctatgtgagttaaaattcaccagtgttatcaatgtgaaaataactgaagtgacaataaaaacatacactatcgtgtttgtcttggtatccaatttgtcagttatcctgaagtaaattttttccacagcccacaatgcagttgttacatcagccatctttgcaccaaacccaagtttgatgttatctttggatgtgcaatctgaaaaatcagaagggaacgagaaaagtgaagatgctgaagttttggatgccacaccttctggtaaatctttacttgtcctatatttttttctagtcagcacttagtagcctcatttatctcatttgagtataataaggttttcactagtataaagaatatttcttttttcttttttcttgagacagggtcttgctctgtcacccaggctggagcgcagtgacgcagtcacacacagctcactgcagcctcaaccaccctggactcaggtgatccttccacctcagcctcccaagtagctgggactatgggcctacaccaccatgcccagctaatttttgtattttttgtagagatgggatttcaccgtgttgcccaggctggtctcaaacttctgggctcaagcaatgcacccacctcagcactttgggaggccaaggcagatggatcacgaggtcaggagatcgagaccatcctggctaacacggtgaaaccccgtctctgctgaaaatacaaaaaattagccgggcatggtggcgggtgcctgtagtcctagctactcgggatgctgaggcaagagaatggtgtgagcccgggaggcagagcttgcagtgagctgagatcgcgccactgcactccagcctgtgtgacagagcaagactccatctcaaaaaaagaaaagagaaatttggatgttcataactatgggtaaccattctctttagagaagtgcaaacaatatatgcaaatgtaaaacttctttattacctgtctctcctactagtctgtaatctctagaagacagagacttttcatgtcttatttattgctgtattgccagtgtctctcacaatgcttgcctacacatagtaggtgcttgatgaacatgtgctgactaaatgaattaaacccaaatgaagcagggctaatttttctacttgccacaagttaacagcttcttgagataggtggctatttacaagtttgtaatttcttgccatttgtagcatatatgctttgagaatgaatattaattccagttatatacaatgctcatattaggaagggagaagaaactgtcagcaagtaatattgagtgccaatcagttatataaaaatctgggccaggtgcggtggctcacgcctgtaatcccagcactttgggggaccaaggcaggcggattatgaggttgagagttcgagaccatcctggccaacatggtgaaaccccgtctctactgaaaaactgcaaaaattagctgggcgtggtagtgcacgcctgcagtcccagctactcaggaggctgaggctggagaatcgcttgaaccagggaggtggaggttgcagtgagccgagatcacgccactgcactccagcctggtgacagagggagactccatctcaaaaaag

SEQ ID NO: 17713 - protein, 104 aa, Homo sapiens [sequence omitted]

SEQ ID NO: 17714 - DNA, 1855 bp, Homo sapiens
  CDS (82)..(765)
ataaatgatgcttaattctttgtctacagattgctgctctctgaacactatagtcgtcgaatctcacaagcgtacggtctgatgaatgaactgttatctgagtcagtacagctaccaactctaccacagaaaccattgcctaacaaacccagccctactcagtcttccagttgtcaacactgcccttctccaagaggagagaatcaacatggtcacagttttctaataaatcgacctggaaaagtcaaatatatgtccaaaccgagttatatccataagaggaagtcttttgggcaacctcaaggctcaccttggccacatggaactgccactttcaccatacagaaaaaagctggtggagccaaagcagcagtaagaaaggctacgcagtctccagttaccttccaaaaaggctctaatgctccgtgtcatagtctgcagcatacaaaaaaacatggaagtgctgggcttgcacctcaaaccaagcaggtgtgtgtagagtatgaaagagaggagactgtggtgagtccctggacgataccttcagaaatccataagattcttcatgagagtcacaattcccttctacaagacttgtctccaactgaagaggaagagccagagcatccttttggggtgggcggtgtggacagcgtgtctgagagcactggcagcatcctcagcaagctggactggaatgccatcgaagacatggtggccagcgtggaggaccagggcctgtctgtccactgggccctggacctgtaagacctggatatcattgggtttccatgcacaggccagcacctcagtaatgtggttctgaaagattaacaggtttaagggacagaagcaatgaaagaagcaatgtgaattttccatttgctttcatattattacctggattagccattaccagaggaaaaataaacatttctcagtaactttgcctttatggggaaagggttgactattgatgtattatatgtttttgtatttgatgcatcattaggcataatttttaaaatgataagtacctttcaagccaagtttgcataacctactttcaataaaaaccctctatcttgcctcctcctttattaccctctgagttttgagaaacaaccatatacagatgaatctaataggaaaaaaaaaaatcttttcattgagaagaaaatcagtctcacctgagaactcaattatgaaccctattttaaaacacctatgcagggtttagcctaggagtgaaaagaaaaaccaactaccttttaccaaccctgaatctctaaataagcaaagtttcatggaggccaggagatcttctgtcttctgccctgtagcctgaagccttggaggaagaaacaggaatggatgctttgggcaggaaagtaagggaatatgactccggcctctagaaggctcatcttaaatttgtaagaaccatggtacagagacctgattagtttttggtattgtgctccaataatgtcatagttttaagagataatttttatgagaattgactaagaaccagtatccttcaactacttcatcaatgtttggtataatataaaagcacactatcatctgaaaaagctattaaatacccctctttttccaaatatctacctgtgtggagccaggttttacaacatgtattgcagcaagttgaatgcagaagcaggtatggtaattcagctgccttctatcaagctaaacattaaagagatttgtagaactataaaacaatgctactctccttaccaaattgttttagaaaatagctttataggctaacattattgttaattgtcatttaattgttttgtcatttaaaatattttaaattgtt

SEQ ID NO: 17715 - protein, 228 aa, Homo sapiens
MNELLSESVQLPTLPQKPLPNKPSPTQSSSCQHCPSPRGENQHGHSFLINRPGKVKYMSKPSYIHKRKSFGQPQGSPWPHGTATFTIQKKAGGAKAAVRKATQSPVTFQKGSNAPCHSLQHTKKHGSAGLAPQTKQVCVEYEREETVVSPWTIPSEIHKILHESHNSLLQDLSPTEEEEPEHPFGVGGVDSVSESTGSILSKLDWNAIEDMVASVEDQGLSVHWALDL

SEQ ID NO: 17716 - DNA, 1618 bp, Homo sapiens
gaaaatgcttgtgtcgcctttggtgggccatgtcctaattagtttcatctgcttccctgggaacttactaaggggcccagagcactgttggaagtctggttagagtccccagagagttactctaagttaaaatgagccactgaccttggctcaccttagaggaatttcctcgagaacaacagagataagaaaagaaccagcctggccaatccttcaacagctctagagccccttttctctgctggcaggggctttgtttaccagctcactgtttaggctaaatgttagggaccagatcactgcagttgaaaacaggcactccaggcttagtgacagtggcagcagaaacagtgttggctgcctttctgaccaccccactttcctgccctgagacagcaccccagggcaggtgcttcatattcagaccaggtaagcctcatttgcacaacagtcaaattgtttgttcctttaaaaaggacacaattagcctggcacggtgactcatgcttgtaatcccagcactttgggagggcaaggcaggcggatcacctgaggtcaggagtttgagaccagcctcaccaacatggaaaaaccccatctctactaaaaaaatacaaaattaaccaggggtgatggcacattcctgtaatcccagctactcgggaggccgaggcaggagaatcgcttgaacccgggaggcagaggttgaggtgagccaagattgcaccattgcactccagcctgggcaacaagagcaaaacttcatctaaaaaacagaaaatattaagatgattaccatgtgaaaacctttttaatattcaggatttggaaagtatagttgccccaggcatgtggttgttgccttaggtcctgcgaatattgctgaaaatcggattttccacattcactttcttccctgttttagggaagaaaatgatcatagacattcgattttccaaattggcgctcttattttcaatgctaattggattacttctcttccaaccctcctgcccatccatccatcccagtccccaggcatcttaaccttaccatctgagcttcagctgaaatctgtttataggcaacattgaaagtaccagattggggccaggtgtagcggcccacacctgtaatcccagcactttgggaggcggaggctagcggatcatgaggtcaggagttcaagaccagcctggccaacatggtgaaacccccatctctactaaagatataaaaaactagccgagcgtggtgttgcatgcctgtgatcccagctactcgggaggctgaggcgggggaatcgcttgaacctctgcctcccagattcaagcgattctggtgccttagcctcctgagtagctgggacttacaggcacgtaccactataccctgctaaaatttgtatttttagtagagacagggttttgccatattggccaggctagtcgtaatgtctctttttaacactgaatatgttaggtggtttttcttgatggatttagggttaacctagttaataataaattgtttccaggtaattatcaagttttgtcattttataaatctgaagagttaatattatcatcgatacaaataaagtgaaatctgactgagg

SEQ ID NO: 17717 - DNA, 1713 bp, Homo sapiens
ttcattgtacctcaaggttgtgatgaaattttaatgaattaagttgaatagctcaaaagtatatacttcgtaacactcagtttcagttacagtcactgactgatgtagttctgctggcacctgacagctctcagttactaagcttctgcgatatgctaggcactgtgctggatgataagacagcacccctgccctctagaagctcgggcagttaaaatggagcagagggaagcaacggagactcagaaaataactatacacactaagggagagcttggtctggggctggtgaataggaatctgttagggaagtgacagatgcaaagctggaaatgttaatcagatggctaaattcaggccaaaatttaaatatcttcaattttcaactcaagaaaggcatttggcagaaaccatgtttggaaaagaaattaaaatttacaagaatttttattaagcactttgcctagcaaaagatttttgttaaaaaaaaaaaaaaaaacttgtcatccctactttcagggagtagaatcctggaatttttgaagcatactgtaagatggtgattatatctcagaaggggttccgtggtgtctgtaccctctctgccacaggcaatactgagcaccataggcttgagtatgccatttaactgtttggttttgtttctatttgtcactttatacaatgtttgataatatctcctcattgaactgggctatttcagtcaaggttctccagagaaacagaaccaagagaacgtacatgtgtgcgtgtgtctgtgtgtgtgtatgcacatacacacacacatatatatagagagagagatttattggctgaatttcagaaattggcttgtgtgattgtagggcttggcaagtctgaaatttgtaggacaggctagcaggctggaaactcaggcaggatttctgtgttacagtcctgaagcagaaacctcagcttttgctcttaaggtcttcacttgattggatgagatctacgaatattactaagattaatctttacttaaaatcaggtaattttagatgttaatcacatctacaaaataccctcacagcaacatctagagtagtgtttgatggaacaactggggaccatagcccagccaagttgacacataatattcattgtcacatggtgtgaagacctatcaatcaatttttgttaaacaagtaaatcaggaaaaatattttttgtcattattacattaagaaaatttattatccaggtgacagtacatactggagtttttggaagaagtgaggagccatgacctaaaaaagcttgtgtttcctgccagcagcacatcttaaccaaagatgttccagctaagttaacccagaatattagacaggaaagaaatctgaaaacagatgatgcacttgcaaattgtgcaaggcttgttctgtaatgcaaataggatgtcttctttgaaatgtaaatgcactgagcctaagcatgaggaattttaatgtctaatgatgaagctatagagagaaatttcagttaatgaccaggtaggtataagatggtgtccttagataattctgatatcagaactgatgttaattgtagtttaagacaactctcctgagacaggagaaccgcttgaacccgggaggcagaggttggggtgagccgagatcgcgccattgcactccagcctggacaacgaaagcgaaactctgtcccagg

SEQ ID NO: 17718 - DNA, 1559 bp, Homo sapiens
  CDS (84)..(599)
cagagagcgttgagctgggaacagtgacaagtgcttatcaagttccttcactctcaacacggttgacaagaactgatggcattatggaacacatcacaaaaatacccaatgaagcagcacacagaggtaccataagaccagtcaaaggccctcagacatccacttcgcctgccagtcctaaaggactacacacaggagggacaaaaagaatggagaccaccaccacagctctgaagaccaccaccacagctctgaagaccacttccagagccaccttgaccaccagtgtctatactcccactttgggaacactgactcccctcaatgcatcaatgcaaatggccagcacaatccccacagaaatgatgatcacaaccccatatgttttccctgatgttccagaaacgacatcctcattggctaccagcctggggggaggtgggctgggctggctctgggagttctggaagctcccaagctttgtagctcaggccaacagagcccagggacagaggcagagccccagaggggtgacaccccctctgagtcccattcgcttcacctatcttctatggccgccccatagccatactgcccattagcgtggccgccagcattacagctcagaggcatcgccgctacaaagctttggtggcatcagagccgctcagtgtgcggctctatcgtctgggcttggcttaccttgctttcacaggcccactggcatacagtgccctctgcaacacagctgccaccctcagctatgtggcagaaacctttggctccttcttgaattggttcagcttcttcccccttcttggccgcctcatggagtttgtcctccttctgccttaccggatctggaggctactgatgggggagactggcttcaacagcagctgctttcaggagtgggcgaagctctatgagtttgttcacagttttcaggatgagaagcgtcagctggcttaccaggttttgggcctctcagaaggggcaacaaatgaagaaatacatcggagttaccaggagctagtgaaggtctggcacccagaccacaacctggaccagacagaggaggcacagaggcacttcctggagatccaggctgcgtatgaagtcctgagtcaacccaggaagccctggggatcccggaggtgaaaagaaacttccccctgaggactgactcttcctagcagagctgggcaacttgtcccaaatctagctttgcccacgaatggcatcccaacagagttaaagaaactgcttgcaggggctgggcgtggtggctcatgcctgtaatcccagcactttgggaggccgaggcgggcagatcacgaggtcaggagttcgagaccagcagcctggccaatatagtgaaacttcgtctctactaaaaatacaaaaaattagccaggagtggtggcaggcacctgtagtcccagctacttgggaggctgaggcaggagaatcacctgaacctgagaggcggaggttgcagtgagccgagatcacgccactgcactccagcctgggcaacaagagtgaaactccgtctc

SEQ ID NO: 17719 - protein, 172 aa, Homo sapiens
MEHITKIPNEAAHRGTIRPVKGPQTSTSPASPKGLHTGGTKRMETTTTALKTTTTALKTTSRATLTTSVYTPTLGTLTPLNASMQMASTIPTEMMITTPYVFPDVPETTSSLATSLGGGGLGWLWEFWKLPSFVAQANRAQGQRQSPRGVTPPLSPIRFTYLLWPPHSHTAH

SEQ ID NO: 17720 - DNA, 1886 bp, Homo sapiens
atcaataattgcaatcagcctgtcagaatacgtaaagggaatccatgtaattcacaggcgggagttgttatttctgtagtaaagacctgactgcagcatttacacatgataaataggaaatggcaaacctggggaagcaagtttgaactcaatctggaagtaatagcctaagcagcttgctcttcacactgtgtttcccatgtcacccttttcctcttaggtatcttgcttctccctctcatttcaatctcctccttccttctgttcctccatccttccatccctccctcctgtctttctctgacacaatgactcagctagtttaagagaatggtattattttgaagtctgaaaatgtttctgtgatattttgctttttactgatctttaaagcaactcacagaagtgtattagccttagatacgtaatcaccccttgagatatatagtcaacagtacacactgacatgttcatagtaaaaactgcctttatgtttcactgcattcaagcaagtagatatttgtttgtttcacgtattgcaaagcctatgttcttaagcatgtaccaaaatcacatttatttcattaatccatttactcattcaccagaatgtaacaaaatttagtgaatatctgctatgtgtcaggcacttttcttggctcttgatatacaatgatattcaaataaaactcatagtctggtaggggaggtaggagacaaatatgtactgatgttaatagatattcctgaaataaataaaggaattaggatggttaggaacgtccttccagaagaaatgcaaggctggccatgaaaggtgactatatcgtaataggcagaaggtggcagcgcaggtatgggtcgtaagaagaaccttataggaaaggaggtcaacttgccccagtgccatgagctcagcactacaacctggtgcaggacttcgaagtaatagaaagcgaggctgcaaaggtggacagggacctgaagacagagggccaggttagtgagagcagacttaccacgggcatagcttagcagttttaagaataggatcagattttcatttgataaaatcaccctgatgacaaggtggagagtggattagatgtgggtaacatcgaagataaagaagcaggtacagagactcataaaatatgcagatgagaggtagtggagaccagaatcaaaactgtgaggaataggaatgtttaaatatgtcccaagttacaattcagttacatatttcatcagccagcatgtcctgtgcacacacgacctgctcttactgctttccatgttctgtatgtggaaggagatcagtcaatcttgaactcatggcctcagtattttgtactttataatttatattttttcctatagaggcttttctatttatgtgtattccacttccccatatcactaaactgtctttttccacaggattcaattcttgaactagtaggagtgaagggcagtctgttgaaacctgtaatctcttaggcttgtattttctttgaacatagtttccacagaattcttccctgtaggggaaggcctgggcacttcttgatgtcagaacatgttgtctttagtttggaatctgccaaaacaaaagttaaatcaaaaatgttaattcctgtcaccccagcacttcgggaggccaaagcaggaggattgcttgagcccaggagtccgagactggcctgggtaacatagcgagacctcgtctctacattaaaatttaaaaattagctggatgtgctggcatgcactcatagtcccagctgctcaggaggctaaggcgggaggattgcttgagtctgggaggtcgaggctgcagtgagccactgcactccagcgagtgatggagtgagaccctgtctcag

SEQ ID NO: 17721 - DNA, 1667 bp, Homo sapiens
gtcgttttattctataatttttaattagtgacgttaaacatctttcctatcggccattttacatattttttccttatgagttgccttcacttatcttcagcaaaattatctattgagatatcttttttttcctgtaatttggaagtgctcttgatatgctgaaatgtctgcactgccacattttgccctatttgttcttcagtttgcggtttgcttgcagttgtgcttatggcgttcactgtatggaagtgttgttgttccatcaaaagcaaatctattgagtcttttttcttcatggctcctgccttcggtcataaactcttacaggtactacaatgaacactcgccactgtggttaccatggtgcagatgtcttctgtatccttccagaaaaccatttgaggagtgacttttgcaaaatgtaccagtctgccaaagtatgcagctgccaggagaaggtcctcatgggtctgcggctcctcgccgggctgcgggcgcaggcagctcaccaccgcggctaggccggccccggacatcgcggcggcgggcgcggcgagcggggatgcgcgggcgtcggggcggcagccgcaacggactctgccctcctcgtgcaggccggaggccccgcctgggcgcgcggcgctcggtccttcacgtgaccgctgcgggtgggcctgcgggcggaggacgggcgacggcggggcgggctcccaggctccggccccttccctggcggcgcgctgggcccagctcagggaagcggatccggcagggacggggagtgggacgcgcgaggggcagcaggggtaagagctcgggcgggtggccgcgtgggttaaaggtcaaaggtcacctccgcaaatggcaccaactgtgtagcctggcagtgggactttgtccagctttctgatcagtagaatagaaggatgccttcctccaagaccagcaaggtccatggcttcattcttgaagaccaggaacccaccggaaggaaccaactccagacacaagaggattgtccaagcccaagagtttgatacccttaatgctcagattgtagtccttaaatagcctattttacaagaagaagcagagatccttggagaaatggatgattccaggtctgtttggaggcatcacccagttgtttggaggcaaacttgtgcacagtagtgatctcctcggttcactctgagtcatcaattctggagctctcagtttgtggagaaattttctagaaattgagtgttaatttagtgttgcaggtagaacaggcaaagcagttcacgcaccaggccttattaagagcagagaccacatcaccttctataacacgaaacactgctcatggtacagctccccattactgttcacgatcgtctcagcgggcgcaaagccgcccttgcagcgctcgcaagtggcgctggccagggcgttggccatgttgaatttcgcataaaagtcacagaactccttgtagactttcacgtcactgtgcctgcgctgcagtttggaaacagccctctcgtcctcggtcccattggcctcgtggacagtgttaagggctgctcgggggatttctccgttctctgggataatgcaggggcgcgctcggcctgagaaggccatcgtgggtgcttgagagctctgagcacagggatgagaat

SEQ ID NO: 17722 - DNA, 1878 bp, Homo sapiens
taacaatgacacagttgactttggggactcggggaaagggtgggaagggagtgagggataaaagactacaaattgtgtgcagtgtgcactgctagagtgcactaaatctcacataccactaaataacttactcatgtaaccaaacaccacctgtttcccaaaaacctatggaaattaaaaaaaaaaagttaatctcatctggaaaataccttttcagcaacatgtcgtctggtatttggccaaatatctggttactgtgacctagtcaaggtgatgtgtaaagttatccatcacaaacagctagattcattccacctacacttcaagggatcgccttgaagaagtcagtatttttgcagagatgcgtctccacccaaaggtcctaggtacctttgagcaattgtgaaagccataacccctcaccccgaaatgacctgtcctcatgcatatagaatcttacaatcacaggggttatggatcctatttagagcctatattgaaatcttgaggacgtcagtagttctctagaatccctgttccaggcgcctctgttcctgagcagtgttatgtgaacagtgtcctctgtctgtggctctgtgtcctggctgagaaaggcagcgctgccttcagggaactgggcccattgctgggagtcagagccttacgtgctcactgtgccccacgtggcttagacagtaccggctacagcccttatcccgactccacgggtgtgagcacagaggctgagtcacctgcccgaagcagcacagcgagtaagtcacagaggggatttgaagccaggctcagagcccaggatttgaccagtgtctctgtgcccactcaagggaggaagagtatcctgagtaagagggaagctgcatgtggatcacggggaagttgctctgccctcacatcagctcctcatgtgtacagctccagatgggtgggtgttgtcggagaattgctcataggaagctacagttccttctccacagtctccccttctagatgctgatctttccagatgacaggcttcctaaaaaccaaccactgagtgagtgctttctgtccgagctggcagtctcttgcactaagcttaggacttctttgaatgtaggagaatcttgactctcatttcttcccaatttgtagctgaaccgtgtgaatggcacgtcatcaccacagtcccctctgagcacatcgggcagggtcgctgctgtggggccttatatccaggttcccagtgccggaagctttcctgtgctgggggaccctataaagccccagtctctcagtattgcctcaaatgctgctcatggaagatccaaatccggtgagtggtcctggccctcttcctgggggagagtttgtgagcagggaatggggcctgcggtggaggggcggggggtggggcaggctcctgaggctctgccccacacatcgtcagactccaggctcagtctccccgtgaggcgcttggagagctgtgttcccctgtggtaacaatcctaaaaggaaaacaagttatttttactgaactagaggtctctactgtgtggcttttcaaaacacaaatgattaattaaaactctgatccatgggccgggtgcagtggctcacgcctgtaatcccagcactttgggaggccaaggcgggtggatcacctgaggtcaggagttcaagaccagcctggccaacatggtgaaaccctgtctttactaaaactacgaaaattagccgggcgtggtggcgtgcacctgtaatcccagctactcaggaggctgaagcgggagaatcacttgaacctgggaggcggaggttgcagtgagatcgtgccactgtgcttcagcctgggcaacaagagtgaaacttcatctc

SEQ ID NO: 17723 - DNA, 1847 bp, Homo sapiens
tatgtagattcaaaccccattattagtagttttcttctaagtagacaacctcttctttacccagaacttctctttgtaaccgtttcatccatattaggctgtgtattttaaacaaacaaataaaaataagttgatatttatcttccttcttagtcaaaatgcttcttggaggttggggactctttctttgacgtgttctgtagagtatatttcagtttgtctttttagtaaagatggcaacatctcattggattaggaaaaattgaaaaccatatgttccatgtaaagaaatcatttattgtttcgatatttgtgccactcaaacactgaatgctttatttctgcaaaagcatattgattcgttttctgcagtgaatcttatatttttcaaccttcttaaacaatatattctgaacttgatttagtctttacatgatgatttcctgataatcattattgtattagtttcctagggctgccataatagaatatcataaattgggttgtttaaacaacagagatttattggatcacagttctggaagcaagaagtctgagatcaagctattagaagggatggttccttataagggttgtgggagggaatctgtttcatgcctcttgcttagtttctggagtttatggcaatcgttggaattccttgacctgtaaggcatctccctgatttctgccttcatctttaatatagcattctcccagtgtatgtgtgcccatgtccaaatttcccctttctctacaggcataagtcatacttgagtagagaaccaccttactccattacaactgcatcttaattagggaccctatttccaaatatggtcattttctgagatacttggggttagaaatttaacatatgaattttgggagggcacaattaaacccataataattatgaacactattttttgtgcagagctttaccacaatgatttctgcaggactcaataatagagatgtttgcaagctgtacatagttcttagctttgcatacttttatttctccctcacctcctctgtctcctcttcattctgagatagagccatcatttcttacagatatcattgtactttcttccgaaagtgttttcttcccatgtaatatgaatggagggtccagattactggtgttactgtgtattaaagaagaataaattggttccaaattaaagtctccttggtaagtaatgatgtatttgggcaacagcgtgtaccttatggcatttcttttcatttcccaagggctctattttccctcttctgggtttttgactatgttaacttgagataaccctataaatgaatataagattgctggatactaaggtaccaatatattattttctccttacagaaaactaaagaaatatatctcatagaaatactagaaattggtgatcttgtttactaattgctcaagattttgctcactgatataggaaaatcacagttcccttttgggtactataagatgtgaaattggatttttacagtgtctgttagacttccgtcattcaataaacataatactagagcagaattgagttgaaatcaaatgttgtgagtgggtaaggtaatgtgcacatccagttctcagcaggtggttctaagcaggatgcggggcctgcaccccaagctgctaacctatcaagggtagcccatgtggttctgagggcaccgtgctgatgagcacccactgtggttctgattttggcagccacggctgaatcaagtctttgatctttggagtgacttctgccacagtgagcatatctgtttgttttgcccctccctttggtcattattccaacctggcagtacaggac

SEQ ID NO: 17724 - DNA, 1959 bp, Homo sapiens
  CDS (1357)..(1929)
agaaaaaatgtgctgcgttctgaaaaataactccttagcttggtctgattgttttcagaccttaaaatataaacttgtttcacaagctttaatccatgtggatttttttttcttagagaaccacaaaacataaaaggagcaagtcggactgaatacctgtttccatagtgcccacagggtattcctcacattttctccatagaagatgctttttcccaaggctagaacgacctccaccatgatgaatttgctttttaggtcttaattatttcacttctttttagaaacttaggaagaagtggataatcctgaggtcacacaatctgtcctcccagaaatgaacaaaagtcatcaccttttctgcttgctacacaggcaacgattcccccatcagctgcccggaccctttggcctggcttggtgtgcaggcctgtctgtttgcttaaagtcagtgggttctggtgcagggagtgagaagtgggggaagtgaaagggaaagcatccgtgagaaagcggccacggttttccctccttgtgtgcccatggggcaccagctcatggtctttttcagtcatcccagtttgtacagacttagcttctgaactctaagaatgccaaagggaccgacgagactccccatcacagcgagctctgtccttacatgtatttgatgtgcatcagcggaggagaacactggcttggccctgctccgctgagtgtctgtgaaatacctctactttccctcccatatccagaacaaaatgatacttgacatccttccacaaaagtcagcctaaagaagttatggtatcatatgttaaactaagctttcaaaaaccttagtgaaatagcaagtgactgctttcaagcagcagtcgacatgtaaatgaaggtgttcttagaattcgcattttgccagctcagcgcacctccacaacgaatgaaatgctccgtatgatttgcacaaatgacatagacctccccaaaagttaactggctctccttcctcacacagttcatcataacccaaccccccacccccgggtcatgaaaatcacagaacttataaacacattgaaccctagatctcaggcttcctgacctaccgccagtggccccttgctggccaccctatagggtcctccttccctggcagccccccatgtgggagaaatacctgattctcccaatctgcagtgggagagctttgctgaattccatcccaaagtcaaacatgggcaagaggtgaggatttcacttttaccctcaagtccgatttgtctgtgattttaaactaactgtgtatgtattgatgtttggaagattgtttgaattttaaagtgataatagtacttaatgttatccagtattgttcatcgagacctgaagccgagtaacatccacttcaccgatggctacgagatcaaggaggacatcggggtgggctcctactcagtgtgcaagcgatgtgtgcataaagccacagacaccgagtatgccgtgaagatcattgataagagcaagagagacccctcggaagagattgagatcctcctgcggtacggccagcacccgaacatcatcaccctcaaggatgtctatgatgatggcaagtttgtgtacctggtaatggagctgatgcgtggtggggagctcctggaccgcatcctccggcagagatacttctcggagcgcgaagccagtgacgccctgtgcaccatcaccaagaccatggactacctccattcccagggggttgttcatcgagacctgtttagaggattcagctttgtggcctcaagcctgatccaggagccctcacagcaagatctgcacaaagtcccagttcacccaatcctgctttgtaattcatgtttgagatgggtggccactgtacagatatttattacgctttccagactttctgaatagatttttttgaataaacatggttttatg

SEQ ID NO: 17725 - protein, 191 aa, Homo sapiens
MLSSIVHRDLKPSNIHFTDGYEIKEDIGVGSYSVCKRCVHKATDTEYAVKIIDKSKRDPSEEIEILLRYGQHPNIITLKDVYDDGKFVYLVMELMRGGELLDRILRQRYFSEREASDALCTITKTMDYLHSQGVVHRDLFRGFSFVASSLIQEPSQQDLHKVPVHPILLCNSCLRWVATVQIFITLSRLSE

SEQ ID NO: 17726 - DNA, 2677 bp, Homo sapiens
  CDS (4)..(750)
gacatgtctgctagccaaggagcaccacgagtggccagcagccaccagagctgggagagaggcctgggacggccttgccctccagcctccagctggagccagccctgccgccaccttgacttcagacttacggcctccagagctgtgaggaacgaatccctgttgtccttaactgcccgggctgtggtgctttgccacagcagctccaggacattgagacaggtgacctcccagggccactgtttctcccaccctgcacttacttcaccagctggagtgaaggcagggaaccctgggtcccccaggagcagcagctgctgtgagcatcacagaaaagcagccccggagagcaggcggtccaggcaggggcttgtggtccgttcatctggctgcacagccgcgacctcattggcaggacgccccggggacaaggagcatccattagtaattggttttggttttgattttgttttcttgagatacggtcttgctctgtcgttcagcctggcatgcagtggcacaatcttggcttactgcagccttgatctcccaggctcaggtgatcatcccacctcggcctcccgaatagctgggactgcaggcacgcatcaccatgcctggctagtttgtatattttttagagatggggttttgcctggccgggcgcagtggctcacacctgtaatcccaaagcgctggggttacaggtgtgagccacagtacccggccccattggtaattgtaacaccttaggatgacaacattacagtaccaacgctacgacaactggcagtgtttatacacccttgtgtgctggagcctcaggaagctttgtaagatggtcttgggagctccttgctcctcccctgcatgatccctgtaacatggtccctcagcacggggaaacagactcagacctgaagtcacttgtctgttggacctggcactgtggcgagccctcagtggagcctggttggtatcagacatgccatgccctcagtgacacctcagacacgggccctgggcagacagcccccagatgcgcgtggatgcttacggggtcacagagccacgtttgaacccagaagaacaccagctttggtctagggtggccccctcacctgccttctctttttagctgctcaatagccatggggaatggagggtctgggtccagttagggacatggaggcatgggtgacctgtaccctcggagctgagccggtcctcagccttgcctgggctcaagcctggccctggcccgcagcacactggccatcttcagggtgcagccagcaccctgggctctcagggactgagggcagctgccctggcagtgggggtgccccagggctcccatccttctgcacggcccctcggcacccaggccgacctcctgctagaagacgtggccttgaagcccacagggttgatgggttatggtcaggagtcccagctgggcccaccagcctcctcaggaaggcgggtgaggttggtgtgagactgacggtgcctcctcatgtccccttggagcgccccaccccacatctcccggcctcgggtccttgcctggcccagcatgagaggtgcttcataggaacggagggaggacatgtcgggacagctcgatgctcggcctgctgctgctctgcacccccagggcctggctcaccctctctggacctgtctgcttccaaggaaggggaccctctgaggtcccacagaggccaccccagctgtgggtcgtgagcatctctgtcttgcagggacagcatcgtggccgagctggaccgagagatgagcaggagcgtggacgtgaccaacaccaccttcctgctcatggccgcctccatctatctccacgaccagaacccggatgccgccctgcgtgcgctgcaccagggggacagcctggagtggtgagtggcctccctgctctggggccagcccagggaggcaagtgccccctgccacatctccaggctgcgcacggcctcgctggctgtcgtcatgggagcagagaaaggtggtgctgaaatgaggccctggcctgctgtccaggctccagctcccctgcccagtgtgggaggcactcccatctgcgcaccaggctgcagatccaaggacacggtgcccaggctgcaaccctctgttcccaagggcagagcagaaagcggctttgtctctgctcggtttctgtgtccccaccccccacgaagccttctgtgtctcggccctgggcccagtctctcaggcctccccgggccccccataccggccctcctccagggccctctggggttggggtgctgaagccctgcaaggttggtgcccccctccaccctaggatgtgactccgggccatgtccagggcactggtcacagaaagtgtgtcagttcttccccgtgagctgtccctgcagtgcctgccttccactgtgagttgcaagctgggcatttcatggtcgctgtggatctgcgcccatcccacctccatccacagagggcttagaattgcagggcgagccaggcatggtgacatgcacctatgtttccagctacttgggaggcggaagcaggagtatcccttgagtctgggaggtggaggctgcagtgagccgtgatggtgccactgcactccagcctgggtggcagagccagaccctgactcacacac

SEQ ID NO: 17727 - protein, 249 aa, Homo sapiens
MSASQGAPRVASSHQSWERGLGRPCPPASSWSQPCRHLDFRLTASRAVRNESLLSLTARAVVLCHSSSRTLRQVTSQGHCFSHPALTSPAGVKAGNPGSPRSSSCCEHHRKAAPESRRSRQGLVVRSSGCTAATSLAGRPGDKEHPLVIGFGFDFVFLRYGLALSFSLACSGTILAYCSLDLPGSGDHPTSASRIAGTAGTHHHAWLVCIFFRDGVLPGRAQWLTPVIPKRWGYRCEPQYPAPLVIVTP

SEQ ID NO: 17728 - DNA, 1704 bp, Homo sapiens
acgcagcgcggttgctgggcacctcgactatcacctgaccgtagtaatatctcccgctacgcgcgttgtgaccaatgctgcatacaggagatgagggaggacggccagacacctggaagccggaaaatggtgaaaggcaggattgggaaccccacagaccgcagctcctcccaggagaaccccacacatgagtctggatcctcgccatgatcctcccgtggcccccacacaatctggggagacgcggggccgcgggcactgcgctgccgagagggctccggactgaggctgcagttgctgcgcagggacggctcaggatgcccggggtcccggctgctggcccagccccaccctgtggccgaggggacccagggacgagctgcgccagggagactcgggtccgcagaccccggaatcgctgctgacaggcccgggtcccaccacagcaggtcccaaccagcccctcctcccacccggccttgcacactcaccatttcccggctcccaggtgtcccgggtcctcccttggctccggagatcagtgctggtcaccaccggacagaagctgtggtggagccacctcggcctctggaaggctgaattcagtgggttaggggaacaggagccccttagacttgcggagcttggccccaccctcctggcggagcgcctgattggataattcacacgaccccgcccagtacccctaggataggaatcaagccccaccccctaggcccgggtttcaggagaagccacggaaaactcggaagtgtggagcaggattgacaggttctagcaacagccctcccacccccccgcccaggccaggcttccttctggagcttggacgtgaccccacactggggacatttgcatttaagaaaaacttggctccaggctttccacagtgggccctggcatcttcctatactcactgggccctttctgtttcttccttctggacgggggttcacaagtgtgagcaggcagttccacactccgtgtccaattgagccagtacctttgctggaagctactgggctggaacaggagggagagcccagatgtcttccagggatcaggaatttgggataagcggctggtggcatggccaaggcttcctcataccttatctcagtctacccattttcagggaagaaaatgaaatatgccaacaagggaacaaaaattaagtgcatggaaaaaagttatactacagcaatattctgtaaagaaatcaaaaggggccgggcgcgatggctcaccctataatcccagcactttgggaggccaaggtagggcagatcacatgaggtcaggagttcaaggaccatcctggctaacacagtgaaaccctgtctctactaaaaatacaaaaaattagccgggcgtggtggtgggcacctgtagtcctagctactcgggaggctgaggcaggagaatagcgtgaacctgggaggcggagcttgcagtgagccgagattgcactactgcactccagcctgggtgacagagcgagactccggctcaaaaaaaaaaaaaaattaaaaactggccaggcacattggcacacggctcacacctgtaatcccagcacttcgagaggccaaggcaggaagatcccttgagcccaggaaacctgtctgggcaatatagtaagacctatatagtaagaccttgtctctccaaaaaaaaaaaaag

SEQ ID NO: 17729 - DNA, 2183 bp, Homo sapiens
taaaattatgaaactcatagaagaaaacagggacaaatcttcatgacaaatatgtacaaatgaccaataagcacatgaagagtctcagcatccttagtcattgggaaaatgcaaatcaaaaacacagtgagctgtgacttcatgcttactacgatggctgtaattaaaaaacaggaaagggccgggcgcggtggcttaagcctgtaatcccagcactctgggaggccgaggcgggcggatcacgaggtcaggagatggagaccctcctggctaacacggtgaaaccccgtctctactaaaaatacaagaaaaattggctgggcgttgtggcgggtgcctgtggtcccagctacttgggaggctcaggcaggagaatggcgtgaacccgggaggtggagcttgcagtgagctgagattgtgccactgcactccagcctgggtgacagagtgagactccatctcaaaaaaaaaaacaaacaggaaaggtgactggtgctggcaaggatgtgcagaaattggagccctgcattgctggtgggaatgcaaaatgatgcagcttctgtgaaaaatactttggtgcttcttccaaaaaatttaaatagaattaccatatgacccagcactcctaggtatttcccgaaagattgaaaactgggggccgggcgcggtggctcatgcctgttatcccagcactttgggagaccgaggtgggcagatcacttgaggtcaggagttcgagaccagcctggccaacatggtgaaaccctgtctctactaaaaatacgaaaattagctggatgtggtggcaggtgcctgtaatcccagctactcaggaggctgaggcaggataatcgcttgaacctgggaggcggaggttgcagtgagccaagatcacaccactgcactccagcctgggtgacagaggaagactctctcaaaaaaaaaaaaaaaaacaaaactgggactcagatatttgtatgtcaacatttattgcagtattattcatagtagccaaaaggtggaaacaacttgggtccatcagcaaatgaatggagaaactaaatgtggtatatccataccagggaatactaatgagccattaaaaagaaatgaagggaagttacagtgagctgtgatcataccattacactacagtctgggcaacagagaaagaccctgtctcttttaatcccagctacttgggaggctgaggcaagataatcgcttgaacctgggaggaggaggttgcagtgagccaagatcgcaccactgtactccagcctgggtgacagagcaagactccatttaaaaagaaagaaagtccgggcgcagtggctcacgcttgtaatcccagcactttgggaggctgaagtgagtgaatcacctgaggtcaggagttccagaccagcctgggcaatgtggtgaaacctcatttctactaaaaatagaaaaattagccgagcatggtggctcacacctgtaatcccagctactctggaggctgaggcaggagaatcactggaacctgggagacagaggttgcagtaagcagagattgccccactgcactccagcctaggtgacagagcgagactccatctccaaaaaaaaaggagtgaagttccaatgtagtttaccttgaaagcattatgctaagttaaacaagccagacataaaaggacaaatactgtgattccatttacacgaaatatctagcataggccagttcatggaaccagaaagaagaggttagcaagggctggggagatgggcagttaatttcttaataggaacagagtttctatttggatgatgaaaaagtttggaaatagatggtagtgttggttgtacagcattatgaatgtaactgataccactggattgtacacttaaaaatggttaaaatgggtcgggcgcagtacgcctgtaatcccagcactttgggaggccgaggtggacggatcacaaggtcaggagattgagaccatcctggctaatgtggtgaaaacccatctctactaaaaatacaaaaaattggccgggtgaggtggcaggcgcctgtagtcccagctgctcgggaggctgaggcaggagaatgatgtgaacctgggaggcagagcttgcagtgagccgagattgcgccactgcactccagcctgagcgacagagcgagactccatctc

SEQ ID NO: 17730 - DNA, 1792 bp, Homo sapiens
  CDS (166)..(1791)
ttggatatcaacagggaaactagaaggtatcactgctcaggaaaagatcagattgttccttctttgaatacagagtcttctaatcctgtgcttaagaagttagaaaagctaaacactgagaaggaagaaaggcaaaaacagttgcagcaacagaatgaaaaagagatgatggaacagattcgccagcaaacagatattttagagaaggagcgcaaagccttcaagacaattgaaaagccaagaattggagagtgtttggtggcaccatcttcctatcagtcaaagcaaagagtagagaggccatcctctctcctcagcttaaatacctcaaataagggagaacttaatgtactggggtccctatcattaaaagatgcagctcttgcccaaaaagacagttcccctgctcacttacccccaaaggaccgacctgtcaccgtgttctttgaaagaaaaggaagtccatgccaatctagtactgtcaaggaattatccaagacagacagaatgggcacccagctgaatgtagcctgtaaactctcaaataatcgcatttcaaaaagagaacactttaggccaactcagtcttacagccacaattctgatgacctttccagagagggaaatgctaggcccattttcttcactccaaaggacaatatgagtattccccttgtcagcaaagaagccttaaacagtaaaaatcctcaactccataaagaagatgaaccagcatggaaacctgtgaagttagctgggccaggccaaagagagcaggttgccagaccggcccataaaaagaaagctcgaatggcgcggacgcgctccgatttcttgactagaggtacttttgccgatggggagggggatacagaggaagatgattacgatgacattattgagccccttctctcccttgaccaagcttctcactgtgagctagggcctgcacccagcctgggtcaggcctctcacagtgactccgaaatgacatcacagcgattttcgtcagttgatgaacaagcaaaacttcataagactatgtctcaaggagagattaccaagttggcagtgagacagaaggcttcagattcagatataagacctcagagagctaagatgagattctgggccaaagggaaacaaggggagaagaagactaccagagtgaaacctactacccagtcagaggtttcgccactctttgcaggcacagatgtgattccagctcatcagtttccagatgaattagctgcatatcacccaacacctcctttgagcccagaactgcccggcagttgccggaaggaattcaaagagaacaaagaaccttctccaaaggctaagcgcaagcgaagtgtgaagattagcaacgtggctttggattctatgcattggcaaaatgactctgtccagatcatagcaagtgtcagtgatttaaaaagcatggatgaatttcttctgaaaaaggtgaatgacctagataatgaagacagcaagaaggatacactagtggatgttgtatttaaaaaagccctgaaggaatttcggcagaatatcttcagcttttattcatctgcattggcgatggatgatgggaaaagcatacggtataaagacctctatgcactatttgaacagattctggaaaagacgatgaggcttgagcagcgtgattcactgggtgaatctccagtgagagtttgggtcaacacttttaaagtgtttttagatgaatatatgaatgaattcaagacttcagattgcacagccacaaaggtgccaaaaacag

SEQ ID NO: 17731 - protein, 542 aa, Homo sapiens
MMEQIRQQTDILEKERKAFKTIEKPRIGECLVAPSSYQSKQRVERPSSLLSLNTSNKGELNVLGSLSLKDAALAQKDSSPAHLPPKDRPVTVFFERKGSPCQSSTVKELSKTDRMGTQLNVACKLSNNRISKREHFRPTQSYSHNSDDLSREGNARPIFFTPKDNMSIPLVSKEALNSKNPQLHKEDEPAWKPVKLAGPGQREQVARPAHKKKARMARTRSDFLTRGTFADGEGDTEEDDYDDIIEPLLSLDQASHCELGPAPSLGQASHSDSEMTSQRFSSVDEQAKLHKTMSQGEITKLAVRQKASDSDIRPQRAKMRFWAKGKQGEKKTTRVKPTTQSEVSPLFAGTDVIPAHQFPDELAAYHPTPPLSPELPGSCRKEFKENKEPSPKAKRKRSVKISNVALDSMHWQNDSVQIIASVSDLKSMDEFLLKKVNDLDNEDSKKDTLVDVVFKKALKEFRQNIFSFYSSALAMDDGKSIRYKDLYALFEQILEKTMRLEQRDSLGESPVRVWVNTFKVFLDEYMNEFKTSDCTATKVPKT

SEQ ID NO: 17732 - DNA, 2951 bp, Homo sapiens
aaaagttatgcatactcataaaaattcaaacaatgctgaattgaaaaaggaaaagttagtggctctttatccactttatgtcccactgcccagagatcatcaccatgagcagtttggtgtatgacattccagatacgcacacatatcttcatacatacacacatacaaatatgtatacatataacaaaagactgtaaaatataataatatgatcatggacaacttgccatttggacttactccattctttttttttaattttattttcttggactcaggtcacaaatttattcttttaaaacactgcatagtactctacagaatgggagcactttgatttatttaaccaattccttattggattgtgttcaatgcttcaaatcaaaactttcaaaataaaatttacagggtgtcttggttgtgtttctatgtcaatacatagattgacgttatcttttatctttttttaaacagatgcagtgtacttcataatatgaatggaacacaatttctttaaacatgtgtctatcaaaaatcttccaatttttttttactcttatcagtaatgaacatcgttgcacataatctgtgtacaaaagtacgactgtttctcaaggttaaattcctagaaggaggataactggatcaaagggtatttacatgtaaaattggaaacatgttgccaaatgccccaggaggttaaactggtttattctttcactaagggcatatgttcccaacaccctcaccagttttactctccttttcaagtcttgcctgttggcaaatgaatggtataccattagtgttttgatctgcatttctctgatgatagtgatattgaccatctcttccaacttcttgtctgtttgaatactctcctttccaaatgtgtgagtggaaagagctttggttagcagtgagctctaggctttgttgaacttggagccagaacaatctgagtttcaggccagggtctacagaatgggagcacttcaatttatttaaccaattccttattgaattgtgtccaatgctgcaaataaaaactttaaaaatacaatttacagggtatcttggttgtatttgtatgtcagtttaacaaaatgacttgctcagggtctgcccttgaacaagttgtttctgctctttgaccctctgattctccacctgaaatggaaagtgcctgccccgagggcttaatgtgcgcaaaactcccctaaaggacacattgtggatgcttgaaacgtgacagttaggttttgaggggccaagaggctgggtcaatctgggttccactggtgtgagtgggctgtatctcaatgcagtgagctgcccatcccaggagggattcaagcacaagctgaacaaagacagggctcttacaggagtcccggtgagggtgatttataggggttccaaggactccaatattctgcggccctcggattctcccctctttggtcaagtccctcttcgtagggtccttgagttgggaagataagcatttgcttgagcccaagcagcatctaaatgcccccagggagctgtgaatgaagagctttgcaccatgctgagcgcactgaaggacagaatccagtggcccagcctccaacaatggccccttcacagcaggcctaattcccttccacaaatcctcctttacaattctgccaaacctcggcccgctgagatgcccatggtcacgtgatttggggccttctcattgtaggtttctttctgatgctgtcaccggcgtggctattgtcaccatcttgttcttcttcccgtcccaaaggccctctctcaagtggtggtttgacttcaaaggtaaggtggtcaaggctggggtctcggtgggctcagtgaggactgcggcatggagtgtggtcatcaagggcctggagccccccactgcactaaccacgtggtccttcctgcttctcctttcactgtctgagccattgccttgtctggggactgagggctgccccaggtggtagtccaggacaggggttagcaactacagtcttcagaccaaatccagcctgctatctgtttttgaacagcctgtgagctaagcacagttttcagatttttaaatggttgaaaaaaaaaccaaaagaaaaacattttactacatgtgaaagttacatgaaatctaaatttcagtgtccatgtatcaaattttgctttcccctaaggaatttgtggaaatttattttctttagttatataagtacctacacaatagcctcaattttgcctcttggcccacaaaagcaaaaaatgtttatttttcttgtcctttgcagaaaaatgaccccttggcccaaagcaggagttgcaccttggttgcccagggagccacacatggaaaacacaagctgggtttcaaccgtataggaagtgttggggactgaggaaaaactgcctaaaggcattcagattccatttttaaaaaatcactgagtacctctaaccaaaatgttgtagactgtggccttcagattgccagcttgcgactccctccggtgtccagcagatgtctaccagaaggtgacgccaacacctgaggctgccacctgggtcagttggatgagctcctccggagtcaggaaatagggactataatcaaactattttctattgttgagaaaaatagtgtcactcaggatagccccagccatggaagagtcagggtttgagtgtggggagtatagtgtatgtgtcctgtaggaagatgaggattttgcaagctccataaacagttctttctttcttcttcttcttttttttttaatggggtctcactctgtcacccaggctggggtgcagtagcaccatcacagctcagcgcagtctcgaactcttgggctccagtgaacctcccacctcagactcccaggaagctgggattacaggtgtgagccacctcgcttggctaattt

SEQ ID NO: 17733 - DNA, 2384 bp, Homo sapiens
  CDS (126)..(467)
aaacaagggaagcaagccgtccaaaatccagggttcctagagccgtatctcagaattttatgcacacaggttgcagttaagtcttgctcaaagttttctgggagaactaagaactttcattgttaatggaagtgtggcaattggagcaggtgacaaagaacaagccctttcgagtccccccttcattcactccacacatgggttgcctttggcgtctgggccacttggtctccaatggtagcagaacacagcaagaatccatgtgttctgcctggtggctgtgtgtggttggcctcctgggggcctgcgggctgggcatggacgccgtggaggacactccctgtgctagactggctggagcgagggcagatagagtggacagggcttggacattctggatgaagagccagtggcctcagggcagaaatgacaccagggtaactcatcaaaatgtgcctcccaggctctagaaaatccctggtagggtctgtgtggcctttgcaggagcatctggcccatctggaggtgggtttgaggggacggggccacaaggaaatggaaacagtagtggggttcacatgtgcgaacattcacagatgccaaagtaggcactcggcacaatccgcttaatagctctcatccagaccacgtgcaaccaatgatgaaggctaggatgggggatgcggtcagggcactagccttgaaaagggggacagggagaaccttcaaaaacaagtggaggaaaggcatcagcagggtgctttcaaccacattcttcctgttgttcttgaggaagtcctgtgtgtgtgcccgatgcctgtgttgcggaagttctcactgtgaactttacagcaatgctgaagcaggaattagcatgcctgattagtggtgatgggacccacgtctttctatccttttacctttaccttgtctttgtcattgtatttgcagtgagcctccttaggcagcatattaatgggtggggttatctttatccaatttcacaatttctatgtttgaattggcacatttataccgttacattttatgtaattatgtgtttggacttattctttgtttcctttccctcctctgttttttgttcatttcccctcccttagctaccttcttttggattattggaatattttttagtgttccatttaaatttactggctttgggccattgttttctaattttttattggtcgccctggagattacagtatacttaggatttttgacagtcttcttagagtctccgctctgccacttcatgtgaggtgtggtctcttcctccacatcccccaccccccattctatctttgtcatgttatcagatttacatgcattgaaaatcctaccaggtaatgtggcaattttgttttcaacagtatagattttttttttctttttggagatagagccttgctctgccacccaggctggagtgcagtggtgcaatcttggctcattgcaacctccgcctccctcccaggttcaagcgattttcgtgcctcagcttgccaagcagctgggactacaggtgcgcaccaccatgcccggcttttttgtgttttagtctctactcagtggtgtttcatcatgtttcccaggctggtctcaaactcctgagctcgggcggatcacttgaggtcaggagttcaagaccagtatggccagcatggtgagaccctgtctctgctagaaatgcaaaaattagctgggcgtgatgttgcttataatcacgggaggatgaggtgggagaatcactcgagcccaggaagtggaggttgcagtgagccgagatcacaccattgcactccagcctgagcaacagagtgagtgtccaccttggctcgtgggtgggaactcatgagcgcccactccaagctgtgtcctctcaaaaaaagtaaataaagtctgctggtgaggaattttacacatataaatacataaaatatttgatttgagtttatcccatctggagttggccaaactttttgattttcataagtttatatctttcactaaattagagaacttttctgccattatttcttcaaaataaatgttttatgtactaatatctttccattccccttctggaacttcaaatacaaaagtgatagatgttttgatattgtttcacagctctctgaagctttgttcatttttttaaaaaatcttttctcctgtttttcagattagataatttctattgatctctttgtaagtttactgactccttcctctgtaatcccagctactcaggaggctgaggcgggagaatcgcttgagcccggtaggcggagcttgcagtgagctgagatcccgccactgcactccagactgggcgacagagtctctgtctcaaaaaaaag

SEQ ID NO: 17734 - protein, 114 aa, Homo sapiens
MEVWQLEQVTKNKPFRVPPSFTPHMGCLWRLGHLVSNGSRTQQESMCSAWWLCVVGLLGACGLGMDAVEDTPCARLAGARADRVDRAWTFWMKSQWPQGRNDTRVTHQNVPPRL

SEQ ID NO: 17735 - DNA, 1868 bp, Homo sapiens
  CDS (110)..(460)
gtccggcagcgcctgcccaggtgtgctcggagcgtagctgtagcaacggggcgggccttggttcgcctggggcgtggtcgctgtctggggctcccacgtggttcgcctcatgggcctggagctgggcttctctcgcctcctgtcgtctggctgcaccgactttgcccacgccctcacgggagacgcagacactagggacccggggaggcgcccgggcggggccgccatgttggcagagagtcccagcgtcccgcgcctcggttccggaacccgcggcgcggggatggagctgggctgcccttgggcgccgtcctgggctggtgcccaccctggccgcgtggtcaccggcaagaagcccagggcctcacccaggcgtgggggccgggggaaggaccggaccctcccgaagtcgcggaccaggccgggcggcacccgggctggggtggctgctaccccgagctaagctggctgcgccgcatctcacggtccccggggcccgagcgctgcgcctggaccggcgccgagcgaggcggccaatcggccggctggacccacagtccccgcgccataggcgggtcggggctttcagacccggctcccagccctcgaactcggtaaccttggaggtcagcttgagatgactgcgcttcctgcacgcgttgtcctccccagaaacgcccaaaatggcaaagcggcgtccgtggccgcccgaggccctccctgcctgggttctccccagccgaacctcacgcccggcccctccttcattctctcctggccaggctgctcctgcccttgggcgaatccgctgcgtcccacggtcctgactgtggcatttctgcgtgtctggagagctcccccggcagcgacgtcctgcttagcacgtggctcgtctaactctgttcccctggcctcctgctcttctaggggtcatctttaggtttctgctggtctctgccccctgtgacacttgctggtacccaaatgaagtcgtttatgtcacactctaacaagaggccctgaagaagccctcacaaaaacattagcaacggagcgcctgcggcaaacccttctaacctttggtctttatggtttcaaagcagtttatgggaacttctcttttttaaaagattccccttggggccaggcgcggtggcttctgtaatcccaggactttgggaggccgaggcaggtggatcacttgaggtcaggagttcaagactagcctggccaacatggtgagacacccgtctctacaaaaaacacaaaaaaattagcagggcatggttggtggcaggcacctgtagtcccagctacacgggaggcttaggcaggagaattccttgaacccaggaggtggaggttgcagtgagccgagatggcaccactgcactccagcctgggcaacagagcaagactctgtctcaaaaaaaaaaaaaaaaaaaagaaatttcccgtgggcggggcacagtgactcatgcctgtagtaatcccagcacttttggaggccaaggtgggcagatcccctgagctcaggagtccaacctgggcaacatggtgaaacccctgtctctacaaaaaataaaaaaatgagtccagtgtggtggtgtgcacctgtggtcccagctactctggaggctgaggtgggaagaccacctaagccccaggaggtcaaggctgcagtgagccatgattgcaccactgcactccagcctgggcaacagagtgagatccagtctcaaaaaaaaaaaattccccctttcctcaatccccaccccacccccccaccatatgcctgtgacccactgaggcttgcatactctgcattgcaattatgtgttattcttgattaaattcatttattctgg

SEQ ID NO: 17736 - protein, 117 aa, Homo sapiens
MGLELGFSRLLSSGCTDFAHALTGDADTRDPGRRPGGAAMLAESPSVPRLGSGTRGAGMELGCPWAPSWAGAHPGRVVTGKKPRASPRRGGRGKDRTLPKSRTRPGGTRAGVAATPS

SEQ ID NO: 17737 - DNA, 1903 bp, Homo sapiens
  CDS (965)..(1753)
acatgacccggcggcagtagccgtggcagcagccgcggcggctccgcgagctcgccgggtgggctcagttcagcgcacgccggagccgagcgcagggggcggggaagggacctgctgcagctgcagccgcctgggcgctcctggagcgcgcggtgactcccccggtcggcccgctccatgcagctccgttgcggaagtgtagcggggggaggcggcggccaccgcggcactaagcacgagaggccggggctcggccccctgcagcactaggctctgggagccgcgcgcggcgcgtcccagtggcccgactcgccgtgcgcccggcgcccaccgcagcctgcatgccccgcgctgcgccttgcccggcccccgccgcctcctgctcgcaccgctgcagccgggcgccggagtaatatgctcactcgagtgaaatctgccgtggccaatttcatgggcggcatcatggctggcagctcaggctccgagcacggcggcggcagctgcggaggctcggacctgcccctgcgtttcccctacgggcggccagagttcctggggctgtctcaggacgaggtggagtgcagcgccgaccacatcgcccgccccatcctcatccccaaggagactcggcggctgccctgggccactggctacgcagaggttatcaatgccgggaagagcacacacaatgaagaccaagccagctgtgaggtgctcactgtgaagaagaaggcaggggccgtgacctcaaccccaaacaggaactcatccaagagacggtcctcccttcccaatggggaagggctgcagctgaaggagaactcggaatccgagggtgtttcctgccactattggtcgctgtttgacgggctcccccagcacgccccccacacgcttctttaccgagaagaagattccccatgagtgcctggtcatcggagcgcttgaaagtgcattcaaggaaatggacctacagatagaacgagagaggagttcatataatatatctggtggctgcacggccctcattgtgatttgccttttggggaagctgtatgttgcaaatgctggggatagcagggccataatcatcagaaatggagaaattatccccatgtcttcagaatttacccccgagacggagcgccagcgacttcagtacctggcattcatgcagcctcacttgctgggaaatgagttcacacatttggagtttccaaggagagtacagagaaaggagcttggaaagaagatgctctacagggactttaatatgacaggctgggcatacaaaaccattgaggatgaggacttgaagttcccccttatatatggagaaggcaagaaggcccgggtaatggcaactattggagtgaccaggggacttggggaccatgacctgaaggtgcatgactccaacatctacattaaaccattcctgtcttcagctccagaggtaagaatctacgatctttcaaaatatgatcatggatcagatgatgtgctgatcttggccactgatggactctgggacgttttatcaaatgaagaagtagcagaagcaatcactcagtttcttcctaactgtgatccagatgatcctcacaggtacacactggcagctcaggacctggcgatgcgtgcccggggtgtgctgaaggacagaggatggcggatatctaatgaccgactgggctcaggagacgacatttctgtatatgtcattcctttaatacatggaaacaagctgtcatgaaaatggcccaggggattgggaggacagaggggaagaaagctgggatgcctcttggacacagaacttccttagcagggtgttggaaagtcccaggcctgttctgtggaaggggaataaaaaacagattcaaggaatgtcaaaaacacg

SEQ ID NO: 17738 - protein, 263 aa, Homo sapiens
MDLQIERERSSYNISGGCTALIVICLLGKLYVANAGDSRAIIIRNGEIIPMSSEFTPETERQRLQYLAFMQPHLLGNEFTHLEFPRRVQRKELGKKMLYRDFNMTGWAYKTIEDEDLKFPLIYGEGKKARVMATIGVTRGLGDHDLKVHDSNIYIKPFLSSAPEVRIYDLSKYDHGSDDVLILATDGLWDVLSNEEVAEAITQFLPNCDPDDPHRYTLAAQDLAMRARGVLKDRGWRISNDRLGSGDDISVYVIPLIHGNKLS

SEQ ID NO: 17739 - DNA, 2736 bp, Homo sapiens
aaaactaatgactgagcacaaacctgttgaagatgcagttcttcttggtagcctaaataggattatcttggacctaagatagtgaccttgtttttttttcttaatttttccattgaaatacatggccttaaggaaatatgcaaaaaaaaaaaaaaatgaacctggaaaaaaaaggtcctggaccaggtggatgcctcatatattaagaaatccccgaggccgggtacagtggcttacgcctgtaatcccagcactttgggaggccaaggcgggcggatcacgaggtcaagagatcgagaccatcctggctaacacggtgaaaccctgtctctactaaaaatataaaaaatttggtgggcgcctgtagtcccagctacttgggaggctgaggtaggagaatggcgtgaacgcaggaggtggagcttgcggtgagtggagattgcgccaccgcactccagcctgagcgacacagcgagactccgtctcaaaaaaaaaaaaagaagaagaaaaagtatccccggtactattcaaatggaactttatcactaataaacacaagggaagaccatgccccatgttagcaatgcaaattattgctacagctgcctatgataatttggtctttagttgataatatacaagagaatgtggacttctaagtccccttgccttgcatcctctgtttcaaatgatttaatgtgttgtgtaggaaagcagataataaaacttaggagaatccttcccagatttacaagggtcatgaaggagatacttctataggtataaagtgtatgagtgttagaagatcattagcaggaacccaagtacgaaatggttatttgaataaacattctcagatttgagttagcctgtcttgagatctggctgggagcgtaggacacgtgctcccttttgttctgctcaggtagttcccaagtgtgggccgacaggttctttttccttgatgttcaggttcagcagactgtacaggatctttttggcagagccccaagtaaagctgtcaatcctgatgaggctgtggccattggagctgccattcagggaggtgtgttggccggcgatgtcacggatgtgctgctccttgatgtcactcccctgtctctgggtattgaaactctaggaggtgtctttaccaaacttattaataggaataccactattccaaccaagaagagccaggtaagagccatcacttcctaccttgtcacatgggttttaggttctatgacggatgtaattgcagccactttcatgagttttttctagaaaacttcatttttatctgttttacagtttagaatattaaacagttaactgtgggtggtgagaatcctgtgttttgttttttgtttttttgttaccagaaaagttcttacatgttagctggtagtgatgattataagaaggacatcagtagtctcctccacaggattaacataatttgctaaaagggatctcagtcatttgagactgaatttcctgtagtcttctgttctcaaagacagtaaaaagggtagtctggaccagacttaggggagtgttcttatcttatggatgaatgaagggggtggtatgagggtgccgagataccaagcagggctacttggacatggcttgttcttgaagtaggaattatttctggctgggcaccgtggctcatgcctgtaatcccagcactttgggaggctgtggcgagaggattacttgagctgaggagtttgagaccagcctgggtaacatggtgaagctccctctctccaaaaagttaaattagccaggcatggtgctgtgtacctgtagtcccagctactcaggaggctgaggtgggtggatcacttgagcatgggaggcagaggttgcaatgagctgaggtcatgccactgcactccagcctgggcgacagtatgaagtgaggtcttgtctcaaaaaaaaaaaaaaaattatttcctgacttacccaatcttgtgatgtttttccataaaactatggttgttggtatatttgtgccgtgatgtatttgtcaacacatcactctgaagaaaagtatgtggtgactttctgtgactgagcatgatacatcttctttctctgatcccgtttccccagatgagcatgtttcaacattttagttccttttgaggacttctgtcctaatgctgcgtctttgtacaatgcatttgcttagctgaaacagttgctattgtatgcccatttgctgtactaatcctacttctattccctataaagacatcagcctttgttctgaacataccgtaaattaggagtcttccagtcttggaatgtaaacctttggctttcattttttctatagaaatggagtaggttaatcacattgacaacccaggagggtttcttcttccctaggtattctctactgccgctgatggtcaaacgcaagtggaaattaaagtgtgtcagggtgaaagagagatggctggagacaacaaactccttggacagtttactttggtaggttattgtgaatcctgaatactatgcctccttcactgtaaagtgagataatattctaagccataaaaatattagtataaactgctggcatacacatacatactgagtagtcttgagaagaagggatgcaactagatacccatggcatcagtttttacctgaaagccttgctttttccttgtgccttaggaatttcctcagaaataaactcccctttccctc

SEQ ID NO: 17740 - DNA, 2041 bp, Homo sapiens
  CDS (61)..(579)
aaaccgagttctggagaacgccatcagctcgctgcttaaaattaaaccacaggttccattatgggtcgacttgatgggaaagtcatcatcctgacggccgctgctcaggggattggccaagcagctgccttagcttttgcaagagaaggtgccaaagtcatagccacagacattaatgagtccaaacttcaggaactggaaaagtacccgggtattcaaactcgtgtccttgatgtcacaaagaagaaacaaattgatcagtttgccaatgaagttgagagacttgatgttctctttaatgttgctggttttgtccatcatggaactgtcctggattgtgaggagaaagactgggacttctcgatgaatctcaatgtgcgcagcatgtacctgatgatcaaggcattccttcctaaaatgcttgctcagaaatctggcaatattatcaacatgtcttctgtggcttccagcgtcaaaggtgggtctgtctccttccgaggactgcgatgctcatacacgcacatcattaagagctctgcgtttgggaacaggcatagcagagattataatttcaagtattgaaatgatttcaaaactgcttttttcaaaattggtattaagttccttaaccacagatcttttgctctcgatgtgagccagtggtaaaattaaattaaaatgtggggtatttttgccctcccttttattctttctaatggacatggaaatgaacatcaaactgggagaaagaaccatttaacatttaattaatttaaaatagtgtattgagcaccggtatgtgctctggccataaaagaatccacagtccaaaactaggagcaaggcagcaaacatcatcttctccagtgtgatgatatataacagaggtttgtacaaagcgctgtcaaaatacagggaaataactgcctgtgagtttgtggaatgcttcacaaagacagttgatctgagccatcagcaagaagtcaagttgaaggacaaggacagcagtacaaaatgtggattatgtcacaatctggcatagttggatctgtgagtttaaaatgaaatagttactgctgagataccatttcttctctttgcaaggatacacatattcaacatacacaagagaggaatgtaaagaagtgcctaggcctcctgttttattgttttgttttgttattaatcttcattttcttttggaatctgcctaagagttatggcaactgatgatgagaaactaagactaccaatgttaagtaagttcagcatttcaattaagtctcaattaagttgtgcctatactgatattatttccctagatccagaaactgactctattgaaggaaaaaaatctgatatcaatctttttaaaaggggaggaatgtgggagaaagcatgaaaatggctactgggaaaacttatttgtgttacctttctgaaggaaaatacattttttattccttcaattgttgaacctttcctccaccctcaggagttgtgaacagatgtgtgtacagcacaaccaaggcagccgtgattggcctcacaaaaatctgtggctgcagatttcatccagcagggcatcaggtgcaactgtgtgtgcccaggaacagttgatacgccatctctacaagaaagaatacaagccagaggaaatcctgaagaggcacggaatgatttcctgaagagacaaaagacgggaagattcgcaactgcagaagaaatagccatgctctgcgtgtatttggcttctgatgaatctgcttatgtaactggtaaccctgtcatcattgatggaggctggagcttgtgattttaggatctccatggtgggaaggaaggcaggcccttcctatccacagtgaacctggttacgaagaaaactcaccaatcatctccttcctgttaatcacatgttaatgaaaataagctctttttaatgatgtcactgtttgcaagagtctgattctttaagtatattaatctctttgtaatctcttctgaaatcattgtaaagaaataaaaatattgaactcat

SEQ ID NO: 17741 - protein, 173 aa, Homo sapiens
MGRLDGKVIILTAAAQGIGQAAALAFAREGAKVIATDINESKLQELEKYPGIQTRVLDVTKKKQIDQFANEVERLDVLFNVAGFVHHGTVLDCEEKDWDFSMNLNVRSMYLMIKAFLPKMLAQKSGNIINMSSVASSVKGGSVSFRGLRCSYTHIIKSSAFGNRHSRDYNFKY

SEQ ID NO: 17742 - DNA, 2099 bp, Homo sapiens
  CDS (1110)..(1589)
gaagaaaaaggggtgcccaaacaagtcaccttaaaatttgatgcctgtgctgtcattaatagtaataagttaggaataaagtgtggttctcttaattagaaaagaggctatatggcagaaaataagtacatctgtcataaattaggactgtgtggaaataaatgtaaatactggtcttgtgtcatttaggccacttggattaaaaaaaatgaaaaggatccagtccaccttcagaaaggaaaaaaatggcccttcctgtgctaagggacaatgtaaccccttagagctagtaataaccaatccccttgatcctcgctggaaaaaagagtagcgtgtgaccttaggaatcaatggggctggactgaatccccgagtaaatatcttggttcgaggagaagtttacaaatgctctcttgagccagtgtttcaaactttctatgatgaactaaatgtgccaataacagaatttccaggaaaaacaagaaatttgtttttgcaattagccgagcatgtagcccagtctctcactgtcacttcatgttatgtatgtggaggaactgtaatagcagatcaatggccatgggaagcccgagaattagtacctacagacccagttcctgatgaattcccagctcaaaagaatcaccctgataatttctgggtcctaaaagcctcaatcattagacaatactatatagcaagagtggagaaggacttcacccttcctgtaggaagactacatggtggagttcaaaccacacagagaaaaatccattcagtaaatttccaaagttgcagaccgtttaggcccacccagaatcccaccgggactggacagcccccactgggctatactggatatgtggacatagagcctacactaagctgcctgacaagtagttgtgttattggcactattaaaccatctttcttcctactgtccataaaaacaggagaactcctgggcttccctgtctatgcttcccgtgaaaagcatagctataagaaattgaaacaatgataaatggccccctgagagaatcatacagtattatgggcctgctacttaggcacaagatggctcgtggggataccggatccccatttatatgatcaaccgaatcatacggttacaagctgtcttaaaaataatcactgcaaccggcagagccttgactattctggcccagcaagaaactcagatgagaaatgctatctatcaaaatagattagctctcgactacttgctagcagctgaaggagaggtctgtaggaaatttaaccttactaattgctgcctacacatagataaccaagggcaagtagttgaagacatagttagagatatgacaaaagtggcacatgtgcccgtgcaagtgtggcatggatttgatcctggggccatgtttagaaaatggttcccagcgctaggaggatttaaaactcttataataagagttataatagtaataggaacctacttactgctccctcgtttgctacctgtacttcttcaaatgataaaaagcttcatcgctaccttagtgtaccaaaatgcatcagcacaagtgtactatataaatcactattgatctgtctagcaagaagacatgggtagtaaacatgaaacaactcctgctattgagtgagagtctcaaagtgggggaataagggaggagaccacccctcatattgtcttatgcccaatttctgcctccaaagaaagaaaaagtaaaaactaaaaggcagaaatgaaatccacaagcagacagcccgggcgccacaccctgggactggtagttgaaaatcaatcccggacctaatcggttatgttatctatagattacagacattgtatagaaaagcattgtgaaaatctcattcctgttttgttccaatctaattactggtgcgtgcagcccccagtcacgtacccacgtacctcctgcttgctcaatcgatcacgaccctctcacgcacacccccttagacttgcgagtccttaaaagggacaggaattgctcactcggggcgggggctcggctcttgagacaggagtcttgctgatgcctccggcctaataaaccccttccttcttt

SEQ ID NO: 17743 - protein, 160 aa, Homo sapiens [sequence omitted]

SEQ ID NO: 17744 - DNA, 1784 bp, Homo sapiens
  CDS (17)..(481)
aacaccctcctggaggatgctggtgagaggcagggaccaggggtccggctcccggctcgggcctatcgttaggcgctgggcccccaggccctctcctttgcagagtctcgctgcctccctcgacgcagagccttcaagcgccgcagtccccgacggcttccccgcgggccccactgtctccccaagacgcctggcgaggccgccggggctggaggaggcgctgagcgcgctggggctgcagggagaacgcgagtacgccggggacatcttcgccgaagtcatggagtacctgggtctggctggtgacacactttatctggcggttcacctgcttgattcctacctgagcgctggccgcgtgcgtctacatcgcctgcagctgctgggcgtggcttgcctgtttgtggcgtgcaaaatggaagagtgcgtgcttcccgaggaaactgaggtccggaacttggggcctttccagggcagggagtaaagagcccggatccaagactccttcacctccccccgcatcccccatctgcagcccgccttcctctgcctcctgagcgcggactccttctcacgggcggagctgctgcgcgccgagcgtcgcatcctgagccgcctggatttccggctgcaccaccccggcccgctgctgtgcctcgggctgctggccgcgctggcagggagcagcccccaggtgatgttacttgccacctacttcctggagctgtctttgctggaggccgaggcggcgggatgggagccgggtcgtcgtgcggctgcggctctgagcctggcgcaccgcttgctcgacggggcgggctccaggctccagccagaactttacaggtgtagtcttggcggaggaagtgtatggggtcaccgcagcttcagggacttaccttcctggtcatttttacggtctcggagaatgagagacaattattgaggaggaggtggcacctagacttgatttttctgggtgtgggagagaatggggtgggaggacccccattagtccagatctggggtctcttaaccttgccccagagtggaagatagtctcccaggcccagaagatgctcctattgccttccagggctgagaacgaaggatcacccaggcctcgagtcctccatctctgtatctggtggtggatggggtgttcctttagctgctagggccgctaaccatgctaccaggtggcagggcgaaccatggtttccctcagcctgtgcacccagcatagagaggatggctgcccatcctcagctcccctccttgcttcctcgagtgttctgactccgcactagccgcgccctgtaggaagaatagggtgtccacctctccccggtgctcgcctagtcactccagttgaagacgggacgcgtgcccgatctcaagagagcccccgacccgtccgtggggaaccacatcgacgcttcttctcagcctccagtctccagttccaaggatgggtcatctccaaccacttgccctgcctcagtttctccatctccctgctgcagccccgaggaactgggcaccctcgagccgtgcatggcccgcgctgcgctccgaggtcccgcgccgggtcgcgccgcagtcttcctcaagtatgcgcggccccagcgccagggggccagccttgccgccgcctgcctgctccgccgcctccagtctgagcctccctgagtactgggactcagtcacaaaaaaatcaacaacaaaaaacaaaaccctcccagtgtgtgtccgtctctcatctcaataaaagaatttatttt

SEQ ID NO: 17745 - protein, 155 aa, Homo sapiens
MLVRGRDQGSGSRLGPIVRRWAPRPSPLQSLAASLDAEPSSAAVPDGFPAGPTVSPRRLARPPGLEEALSALGLQGEREYAGDIFAEVMEYLGLAGDTLYLAVHLLDSYLSAGRVRLHRLQLLGVACLFVACKMEECVLPEETEVRNLGPFQGRE

SEQ ID NO: 17746 - DNA, 1831 bp, Homo sapiens
gtaccaacttaatatatgttatagactaaatgtttatgtcctcccaaacttcatattttggaagccagacatggtgactcacacctgtaaacctaacactttgggaggcctagttgggaggattgcttgagtccgggagttcggaaccggcctggacaacatggtgagaccccgtctctacaaaaaaaaaaaaaaaatttttaattagccaggtgtggtggcatgcacctgtagtcccagctactcaggaggcttgcctgagcccagaggtttgagactgcagtgagccatgatattgccagcctgggtgacagagcaagaccttgtctcaagaaaaaaaaaaaaaaattgccaattgcgatggctcacgcctgtaatcccagcactaggaggccgaggtgggtgaatcacctgaggtcaggagttttgagaccagcctggccaacgtggcaaaaccccgtctctactaaaaatgcaaaaattaccgggacgtgttggtgagcacctgtaatccctgctactcgggaggctgaggcaagagaatctcttgaacccagggggtggaggttgcactgagccgagatcatgccattgtacttcacctgggcaacaagagggaaactgtctccaaaaaaaaaaaatttggagggctgggcacggtggctcacacctgtaatcccagcactttgggaggccaaggcggtggatcacaaagtcaggagttcaagaccagcctggccaacatagtgaaaccctgtctctactaaaaatacaaaaattagccaggcatggtggcacacgcctgtagtcccagctactggggaggctgaggcaggagaattgctttgaacccgggaggcagaggttgtgagctgagatcgcgtcagtacactccagcctgggcaacaatgcgagattgcatctcaaaaaaataaataaatatttggagtcccataataaataaatatttggagtccaatgtgatagtatctggagatggggcctttggaggtaatatgggttagataggtcatgacggtagggccctcattatgggattagtggcgttataagaagaagagagaaatcttcctcctcaagagcagaggaaaagccatataagaatacagtgagacggccacttccaaaccagaaagggagcccccaccaggaaccaaattggctggcaccttgatcttggacttcccatgctccagaactgtgagaaataaatttctattatttaagcccatggtagttttatggcatcctaagctaagacagcgcgtctctagtttcccacagattcataaaggtccatacaaaaatgttataactgttaatagtgtcctgtccttgaatttaacagcaaccaacatattgtttgcatagttcttgcaccatttggaaacagtgacctttaggtgttgcaggtaactattgggaaatccttcaatttgtttaacatttccatattttgatttgcatcttgggagttgcttggaatttgggatcctcttctgtctcttgagttgaaatcagaggctgcttgccgggcaaggtggctcacgcctgtaatcccagcactttgggaggcccaggcagacagatcaccagatgtcgggagttagaaaccagcctgcccaacatggcaaaactccgtctctactaaaaatacaaaaattagtcgggcgtgctggtgcatgcctgtaatcctagctgcttgggtgctgagtcaggagaattgcttgaacccgggaggtggaggttgcagtgagccaagatcgtgtcactgcactccagccggggcaacagagcaagactctgcctc

SEQ ID NO: 17747 - DNA, 1869 bp, Homo sapiens
tggaaaacctaaaaagaagggaaatactttctgggtagtgtcagatacattatcctaggggaatgtcagtgaggccctccaacagctattccacttgattgttgcatgagctaatggccataaaactccttagaaaagcacaaagcaaaactaaagaagagtatttactagtgttggatatatttgtaaaagtgagattacaaatcatgtatctggctatttttttcttaaacatgttccttcaagaatttttctgttcgttcattttaaatatttattaaatgttctgatttcttatgttcactgctagctaattaacaaggatggaatttttcttgccttggttatatctaaaagattgtaaaaactttgagaaagcaatgttgccctctttccacaggagtattttggtagctgtaagagaatgcacattgcaaatgactcaaatgtggtaaaatgttggtttcataattctgaaatggcctcttccccaaaagtgacagtaacaccctagctccaggctcaaccacatccagcacatagccaacatttaacagatgttgacaaaatagttaataataatattattaaggaaccagccagagtttcatgcttattaaatactttttcaaccagaaggtctgcaaaggttgatttctgaatatgacgttagctctctctagacctattaatttacgacatttcaaatcagaggtaaaccagcagacctattatttttcaatgataaactataaacagttttttgaagtcaactatttccttttcctttaaaattggacagaatttcatcaggaagctcagaacaatccaatttatataatgccttccttcattatgctaattttcttcatcttcatctacttgaagtaatatttaagattggcacttcagagctgtaaatggatcttagatgataattacttcaacattcttattttataaacgaagaccctctggagaagctaaatgtttttcttgaggtcagatcgccagataatcaagaaccagtatacttcaatttgtattttatatcctatagttgtgggtagaaaatgttcattaaattagtgtagatatgttttttaaaatattagcaatgatacatgatattcattcaataatacttattaacatcctaaattccaggcattttgctagggattggaagtacatacataatgaatattattatttgtatgttagcacgggcctcatggcctgctcctggggaatataaacaagccaatggaaagtgataatacagaaaggtggggctggtgtaggggtgaagtcaggatgctttgggagagcatggaaggtcaccgaatccagtgctgaggaactaatgaagggtttctgaagaacgtgatgagatcaatgctgatgagtcacttagaagtagcaattagttaggcaaagggaagtgaatgtggaggaggaacaagcattccaggcaagaagaacaccctatcgaaaagcctggaagcaaaacattagtgaggctacctttcataaattgctttctgtaagtcatgccattgtgtagtcttaattgctttctctcaccagggaaggtgtgggaaggacttgtgaaatacatattcgaggaaaaactatgcacaaggccgtgcatttaaaaataaactccctaaggctggggtgaaacctgctacggtctgcgcaagttgactgttaatgaatttgattctcaggtgtgagtgattaaaagaacactgatcatgtcattttctttttggtcactaattccctccctcccttctctttcttttcttttttcttttcttttctttttctttctttcttcccgacagagaaagactccatctc

SEQ ID NO: 17748 - DNA, 2627 bp, Homo sapiens
  CDS (7)..(1368)
gagacaatgtgcccagtgcccgctgcagctaccagcaacgtccatatggtgaagaagattagcatcacagagcgaagctgcgatggagcagcaggcctcccagaagttcctgccgaatcgtcttcgtcacccccggggtccgaggtagcctcccttacacagcctgagaagagcacaggccgagtgcccacccaggagcccacccacagggagcccaccaggcaagcagcctcccaagagtccgaggaggccgggggcaccggcgggcccccggcaggcgtgcgatctatcatgaaacggaaagaggaggttgcagaccccacggcccaccggaggagcctccagttcgtgggggtcaacggcgggtatgagtcgtcatccgaggactccagcacagcagagaacatctcagacaacgacagcacagagaacgaggccccagagccgagggagagggttccgagtgtggccgaagccccccagctcaggcctgcagggacggcagcggccaagaccagccggcaggagtgtcagctgtctcgagaatctcagcacatacccactgctgagggggcatcaggatcaaacacggaggaggagatcaggatggagctaagccctgacctcatctcagcctgcttggccctggaaaagtacctggacaatcccaacgccctcacagagcgggagctgaaagtggcctacaccacagtgctgcaggagtggctgcgcctggcctgccgcagcgacgcacaccccgagctggtgcggcggcacctggtcacgttccgggccatgtctgcgcggctgctggactacgtggtcaacatcgccgacagcaacggcaacacagccctgcactactccgtgtctcatgccaacttccccgtggtgcagcagctgctcgacagcggtgtctgcaaggtggacaaacagaaccgtgctggctacagccctattatgctcaccgccctggccaccctgaagacccaggacgacatcgagactgtccttcagctcttccggcttggcaacatcaatgccaaagccagccaggcaggacagacggccctgatgctggccgtcagccacgggcgggtggacgttgtcaaagccctgctggcctgtgaggcagatgtcaacgtgcaagatgatgacggctccacggccctcatgtgcgcctgtgagcacggccacaaggagatcgcggggctgctgctggccgtgcccagctgtgacatctcactcacagatcgcgatgggagcacagctctgatggtggccttggacgcagggcagagtgagattgcgtccatgctgtattcccgcatgaacatcaagtgctcggtgagtctcaatccggccgggtaggcacgggatgggtgggtctctgaaaggacagagatttgttgtttttgtttttgaggcagagtctcactctgtcgcccagggtggagtgcggtggcacgatctgggctcattgcaacctccgcctcccggcttcaagccattctgctgcctcagcctcctgagtagctgggatagcaggtgtggtggcgcatgcctttaatctcagctattctggaggcttaggcgggagaatcacttgaacccaggaggtggaggttgcagtgagccagagatcatgacattgggcaacaagagcaaaactctgtctcaaagaaaaaaaaaaaaaaaaaaaaacaaggacgtgggatggcgagtgatggggaagctattggagtccctcagagaagagatgacatttgagtcaacacctggagaagttagggagtgaatcacatggtcttccgggcagcaggaacaagcagtgcaaaggccctgaggcaggggtgtgtctgacgtgtttaaggagcattcaggccagactcactggttcacgcctgtaatcccagcactttgggatgccatggcgggcagatcacctgaggtcaggagttcgagaccagcctggccaacatggtgaagccctgtctctactaaaaatacaaaaattagctgggtgtggtggtgggcacctgtaatcccagatactcgggaggctgaggcatgagaattgcttgaacctgggaggcagaggttgcagtgagctgagatcgcgccactgcactccagcctgggtgacagagtgagattccgcctcaaaaaaaaaaaaaaattagctgggcctggtggtgcatgcctatagtcccagctactcgggaggctaaggcaggaggattgcttgagcccagatagtcaaggctactgtgagctatgattggaccactatactccagcctggcaacagagcaagaccctgtctttaagcaaaaaaaaatctaggccgggcacggtggctcacgcctgtaatctcaacactttgggaggccaagatgggcggatcacctgaggtcaggagtttgagaccagactgaccaacatggagaaaccccatctctactaaaaacgcaaaattagccgggcgtggtggcgcctgcctgtaatcccagctactaaggaggctgaggcaggagaatcacttgaacccgggaggcagaggttgcagtgagctgagatcatgccattgcactccagcctaggcaacaagagtgaaactctgtctc

SEQ ID NO: 17749 - protein, 454 aa, Homo sapiens
MCPVPAAATSNVHMVKKISITERSCDGAAGLPEVPAESSSSPPGSEVASLTQPEKSTGRVPTQEPTHREPTRQAASQESEEAGGTGGPPAGVRSIMKRKEEVADPTAHRRSLQFVGVNGGYESSSEDSSTAENISDNDSTENEAPEPRERVPSVAEAPQLRPAGTAAAKTSRQECQLSRESQHIPTAEGASGSNTEEEIRMELSPDLISACLALEKYLDNPNALTERELKVAYTTVLQEWLRLACRSDAHPELVRRHLVTFRAMSARLLDYVVNIADSNGNTALHYSVSHANFPVVQQLLDSGVCKVDKQNRAGYSPIMLTALATLKTQDDIETVLQLFRLGNINAKASQAGQTALMLAVSHGRVDVVKALLACEADVNVQDDDGSTALMCACEHGHKEIAGLLLAVPSCDISLTDRDGSTALMVALDAGQSEIASMLYSRMNIKCSVSLNPAG

SEQ ID NO: 17750 - DNA, 2067 bp, Homo sapiens
attgatcggcagaaagctaacttccccccaaggctagaaaccagagttgttaaattcttgttttccttatacacatacggtcttaactgctggtgattaatcttgattacatcatgcagtctcttttctgaaagaccaaagcatatcgccaccttaaagttctcagtttattttttgcaagcttatttagttcttcctcctttgtgtcattgcatcatccgcggaacaagctctcagtccttacgcagtctcggtgcagtctaggtggaggtagctgtggtgtgggcaggcggaggatcagggtcttgtctcccatgttcagctgcatggctttcttcatatgaggctttctctttccatttttttcattttgttttgtttgtttgtttgttttgagacagagtctcgctctgttgcccaggctggagtgcagtggcacgatctcggctcactgcaacctgcgcctcctgggttcaaacgattctcctgcctcagcctcccaagtagctgggattacaggtgtgtgccactacccctggctagtttttctattttttagtaaagatggggttttgccacgttggccaggctggtctcaaactcctggcctcaagtgatccgcccacctcagcctccaaagtgctggttctttgtatgaagctttccagcttttacctgagcagttgattttcaaagtgggcatgcagcgtcatttctgactacacaaaggaactgccctgtaacagctgacagggcccagaacccccccatgcacctgttgtgaaacagggtccagcgtcacctgtatggagcagtgggtggcttgttgtacattttaaaatgtgcgcttgatgtgtttgtgagttgtaacccctacacacttttgcttagtttaacaaaaggaacagtgtagttcgtcctcaggcccccgtgctaattgctgccctgtctctccagactactccagtggttttggcggcaagtatggcgtgcaggccgaccgagtagacaagagcgcggtgggcttcgactaccagggcaagacggagaagcacgagtcacagagaggtggggcggaccccacggtctgtaatcacgcgtttgctccagaaacacccacgagggcattttctctctgcacacgtgattgttgtagattttttaactgaaaatgtttggtgttcttttcgtaccagtgtatgtgggcttttcctaattcgaatggctgcacagttccccatcgtatgaggattccatagtccatgtaaccattccttttttgaatgtggaatttaggttatttatttatttatttatttatttttggtagagatgaggtcttgccgtgttgcccggactggtcttgatctccgtggtctcaagcaatcctccccaaccttggtttccttaagtgctgggattacaggtgtgacctgtaaatttttttttttttttcttttagacggagtctcgctccgttgcccaggctggagtgtagtggcgtgatctctgctcactgcaacctccacctccctggttcaagcaattctcgtgcttcagcctcccggctagccgggattacaagcacacgccaccacgcccagctaatttttgtatttttagtagagacggagttctgccatgttgcccaggctggtcttgaattcctgacctcaggtgatcgccctgccttggcctcccaaagtgctgggattacaggtgtgagccactgcgcccagctgaaacttgactgcagggaacattcttgtacctgtgttttgttcacaagtgattattcaaaagaatcaactcctagacatggaattgctgggtcgaaggctattgaatgtaaaatttccatagatactgccaagttgtccttggaggctgtgctgagttcttccttccccactgcatagcctgtacaccatcactcagagcgtttcccagggctgcagaggccgtggcctgcctgtttccctgtgcctcttgtttggcctgcacatttaaatttttaaaaatatttgccaacatttgaaaagtgagagcttgactatttaaaaactc

SEQ ID NO: 17751 - DNA, 1649 bp, Homo sapiens
  CDS (144)..(470)
gtcatgttttccaagggtgatttatattcctaggggatttgggtggttctcgcttctcaaaacccatatcaaatgactttgcctgtgactttttacaaaaattcttattctaatacctctctgtgcccttcccaagcacacagatgatgttcagtaaatgccagacctctttcctcccatttcccatgtgccctgcctccctcacagccagtctgctctccttctttcctcccttcctctctttgccctcttcatccctctttcctttcccactatattctcatttgtgcaatttcccagttaaggtcagtgtcaccctgacttctctttctttttttaatcatcatctgtctttcttgacatttcacatcctgaataatttccttcagagaatcagttctttaagacatcagaacatgagtcaccctgcgaggtaccaccagactaacaccagggaccagcacccattctagcaaaacactgcctaagcagcctgaactgcgctagtttctttaatgagggttgtagcacagaaagttgctttcttttttttttaaagaaaggaaatcctctagcccaactaagctttcctgttaaacaagtgctttgagagacccattcagagtacttttcactagaaggacctttattgtgttttgtgagaaggaaggacaggcacaaacatgctgttagaatgtgccatggagaaagataagcccacaggttcgagtggagtaactttaccctttgtgtaaagattcagcaaagattctcagaaatgagcgggaatgttttcagtgctatgggatgagctctgtcgtttcctgatgaacacacttctcagcatgtgttctgggaaacactagtttttgtatttttggagttttcttgttgtttgtttgtttgttttgaggcaggagaatctcttgaacccaggagacggaagttgcagtgagctgagatcgcatcattggactccagcctcagcgagaacagcattgaatttccctttgtatgaactgtcttttcatgtcctttagccattctctcttcaattgtttctatggtttttttttctttttgatgttggactttttatctacttgttttccttgtttgctgcagtgtgtaccaaccagtgcagcttcttggttgttggtgggtctgtaagcaagcgttcggagccagcacagagaggatgagaggagggctgcactcatctgctcttccagatggcactgatcaaaggacgtggtgatcatgggaacactctggagagcacgtagccatatttagatatattgacaacacaaccatttagtagactcagggtgactttaagccacatgtcacatggcagctgttaaaatcatctctgtacatgtacatggatagttctgatggcacacccttgttagctttgtagcttttagctaaagggccatatggtgaaggtgcattttttgcatttcttatttcttctcttttctttgtcaatatatccattctagaaaatgagatgagccaggcacagtgtggtgcatgcctgtaatcccagctactctgaaggctgaggcaggaggatcacttgagcccaggaatttgaggccagcctaggcactgggcaacatagtgagactccgtctctt

SEQ ID NO: 17752 - protein, 109 aa, Homo sapiens
MMFSKCQTSFLPFPMCPASLTASLLSFFPPFLSLPSSSLFPFPLYSHLCNFPVKVSVTLTSLSFFNHHLSFLTFHILNNFLQRISSLRHQNMSHPARYHQTNTRDQHPF

SEQ ID NO: 17753 - DNA, 2414 bp, Homo sapiens
gaaaaacatgggtagtagaaatgtatagaaaatgtatgaggtctcttaaccattgtgttaaacttgcattaagcttcttttttagcaatatcgatgtcagtgttacctcttctttcctttttatttattctttttgagacagagtctcattctgtcgcccagactggttggagtgcgatgatgcgatcgcggctaactgcaaccgctgcctcccgggtacaagtgattctcgtgccttgggctcccgagtagctgggatttttagtggagaacaggtttcaccatattggccaggctggtcttgaactcgcaacctcaggtgatccacccacctcagcctccccaaggtgttgggattacaggcatgagccaccgtacctggccccttttgttgttttgaggggcaggcagtaagaagcagggatttcttcaaatgctagtaagcacaaagagagggagaagtttttgtaagtaacgaacagggccgggcatggtggcgtgagaggccgaggtgggcggatcacgaggtcaggagttcgagaccagcctgaccaacatggtgaaacccccgtctccactagaaatacaaaaattagccgggcatggtggtgcacgcctgtaatccagctagtcgggaggctgaggcaggagaatcgcttgaacctgggaggtggaggttgcagggagctgagatcacgccactgcactccagcctgggcgacagagtaagactcccgtctcaaaaaaaaaaaaaaaaaaagaacagttgatcattaaggccattaatgtgcatggacagtttgttgcccaggttggagtgtgatgacgacgcaatctcggtaaatataaacctactctgtaacctccacctcctgggctcaggcggttctcgtgcttcagcctcccgagtagctgggatcacaggcatgcgccactaagcccagctaatttttgtatttttagtggagacggggtttcaccatgttggccaggctggtcttgaactcctggcctcaagtgatgcgcctgcctgggcctcccaaagtgctgggattacaggtgtgagccactgcacctggcccaataggcacatttttttaataagtagtttgttgattagaacgaagagcacttgccgtaagtgcatgtcattgttttcaactgttatggctaagtcagttaacctcatcaacaattttttcttctgtaaattgaggacaatttttgcttttatgaatgaagtcttaaccagcaggaagaaatataaacaaaggaacatatttttaatttaatgaagcaaaattccatacatcattttgaaaatagtgtttctttccctgataggcctgttctgcatcattcttttagcttccttctgccctgtttatcacttggtcccacttttatatttttcctcttcggtccagaatttcttatttagtttcttgtattttgcctactccctcccttctccatgattcagcctagtctttccgtcctctgtggacttgggtgtgccttcctctgggccacctcgtcttttgctgctgttagccctcccgcctgcgcacctgccacttcaccctcgcctgtggtccacttacgttccactcagcccggtcagtcctgctttgttcttctccaccgccttggtctcccgtgtgtcttatctagctctggttccttctcgtctccacatttattttgttttcttcctgtgcttgttagtccttgtgcacttggtccttgagctctttttctattaataggtattactagatggatttgttgtctgcctttacatagaacacacatccttactgtgcatttcctgggtagccaggatgaatcaattattattaacttcccttcgaacattgagcttcctctgttttctgtttctaagaattagattagtattctagaagactaatactactttaaagacagtcaaaacagtcatacgctgccatttcagccctttatttaagagtttgtgacatttatcactcccttgaaagattaaagaacacccaaagcaagtttggggtggaggtggggaaggcaggaagagaaaggtaagtgctataaaaggactcattgttaatttctagaaattggactgagatctgaaagcataagccttaacattttttagataaacggtccctgaaaagaataaaaagtatcagtacttccgttaactagctttagtattgggtcatttgtagtttacattctcctttaagttttaagaccttcagtagttaacaaagcagacagagactggccaggcacggtggctcacacctgtaataccagcactttgggaggctgagttgggtggatcacaaggtcaggagattgaagccatcctggccaacatggtgaaaccccgtctctactaaaaatac

SEQ ID NO: 17754 - DNA, 1836 bp, Homo sapiens
  CDS (725)..(1741)
agccgctgtggatggggagtggaggcggaggggagcggagcccggagcgtcgtggaaagcattggacacatttccaccatgctaatggcattttaaatatatttggcaattttcccaattttttactgaagaaaactgtaagtttatacttgaggactgaagtgtgactctgccgattatcaggctttcaagatgaatctggaaaaactcagcaagcctgaactcctgacactatttagtattcttgaaggagagcttgaagcaagggaccttgttatagtggcctacagagccctccatccagggatttatcccccaccctcatagacaactctgccgccaagcagctggcccgaaacacagtcactcaggtgctctccagattcactagccaacaagggccaatcaagccagtctctcccaacagctctccctttggcacagactatcgaaatctagccaacactgccaatccaagaggtgacacaagccattcacctactccagggaaagtgtccagtcccctgagccccctgtctccaggaatcaagtccccaaccatgccagagctgagagaggaaaccctccacccatcccacccaagaaacctggcctcaccccttctccatctgctgagagcaggcaccgaaaggtgatcctagaccttgaggaagaaaggcagcggcatgcacaggatacggctgaaggagatgatgtcacctacatgctagagaaggaaagagagaggctgactcaacagttggaatttgaaaaatcccaagtgaaaaagtttgaaaaagaacagaagaagctctctagtcagctggaagaggagcgctcccgccacaagcagctctcatccatgctagtgcttgagtgcaagaaagccaccaacaaggcagccgaggaaggacagaaggcaggagagctgagcctgaaattggagaaggagaagagccgggtgagtaaactggaagaagagttggcagctgagagaaagagaggcttgcagactgaggcccaggtagagaagcagttatcagagtttgacatcgaaagggaacaactgagagcaaaactgaaccgagaagagaaccggaccaaaaccctgaaagaagaaatggaaagtttaaagaagatagtgaaggacctagaggcttcccaccagcacagtagccctaatgagcaattgaagaaaccagtaaccgtgtccaaaggcacagcaactgagcctctcatgctaatgtctgtgttttgccaaacagagagttttccagcagaaagaacccatgggagcaacatagccaagatgacaaacactgggctgcctggtcctgccactcctgcttactcatatgcaaaaaccaatggccattgtgacccagagatacaaactaccagggagctgactgcaggcaacaatgtagaaaaccaagtgcctccacgggaaaaatctgtggcattggcccaagagaaaccagtggagaatggtgggtgtcctgtggggattgagactccagtcccaatgcccagtcccctctcttccagtgggagctcactgtctcccagcagcactgcctcctcctctctaacatcctctccttgctcttcgccggtactcactaagcgtttattggggtcatcagctagcagccctggctaccagtcatcgtaccaagtagggatcaaccaacggttccatgcagctcgccacaaatttcagtcctctgccctggacctgtgacattctggactatttctgtgtttatttgtggccgagtgtaacaaccatataataaatcacctcttccgctgttttagctgaagaattaaatc

SEQ ID NO: 17755 - protein, 339 aa, Homo sapiens
MLEKERERLTQQLEFEKSQVKKFEKEQKKLSSQLEEERSRHKQLSSMLVLECKKATNKAAEEGQKAGELSLKLEKEKSRVSKLEEELAAERKRGLQTEAQVEKQLSEFDIEREQLRAKLNREENRTKTLKEEMESLKKIVKDLEASHQHSSPNEQLKKPVTVSKGTATEPLMLMSVFCQTESFPAERTHGSNIAKMTNTGLPGPATPAYSYAKTNGHCDPEIQTTRELTAGNNVENQVPPREKSVALAQEKPVENGGCPVGIETPVPMPSPLSSSGSSLSPSSTASSSLTSSPCSSPVLTKRLLGSSASSPGYQSSYQVGINQRFHAARHKFQSSALDL

SEQ ID NO: 17756 - DNA, 1847 bp, Homo sapiens
  CDS (24)..(1622)
acaacaagtttggaatcaagaccatgttggagacagaagaaggaatcctactgctggtcagagccatggatcctgctgttcccaacatgatgattgatgcagctaagctgctttctgctctttgtattctaccgcagccagaggacatgaatgaaagggttttggaggcaatgacagaaagagctgagatggatgaagtggaacgtttccagccgctgctggatggattaaaaagtggaaccactattgcactgaaggttggatgcctacagctgatcaatgctctcatcacaccagcggaggaacttgacttccgagttcacatcagaagtgaactgatgcgtttggggctacatcaggtgttgcaggaccttcgagagattgaaaatgaagatatgagagtgcaactaaatgtgtttgatgaacaaggggaagaggattcctatgacctgaagggacggctggatgacattcgcatggagatggatgactttaatgaagtctttcagattctcttaaacacagtgaaggattcaaaggcagagccacacttcctttccatcctgcagcacttactcttggtccgaaatgactatgaggccagacctcagtactataagttgattgaagaatgtatttcccagatagttctgcacaagaacggggctgatcctgacttcaagtgccggcacctccagattgagattgagggattaattgatcaaatgattgataagacaaaggtggagaaatctgaagccaaagctgcagagctggaaaagaagttggactcagagttaacagcccgacatgagctacaggtggaaatgaaaaagatggaaagtgactttgagcagaagcttcaagatcttcagggagaaaaagatgcactgcattctgaaaagcagcaaattgccacagagaaacaggacctggaagcagaggtgtcccagctcacaggagaggttgccaagctgacaaaggaactggaagatgccaagaaagaaatggcttccctctctgcggcagctattactgtacctccttctgttcctagtcgtgctcctgttccccctgcccctcctttacctggtgactctggcactattattccaccaccacctgctcctggggatagtaccactcctcctcctcctcctcctcctcctcctcctccacctcctttgcctgggggtgtttgcatctcctcacccccttctttacctggaggtactgctatctctccaccccctcctttgtctggggatgctaccatccctccaccccctcctttgcctgagggtgttggcatcccttcaccctcttctttgcctggaggtactgccatccccccacctcctcctttgcctgggagtgctagaatcccccaccaccacctcctttgcctgggagtgctggaattccccccccacctcctcccttgcctggagaagcaggaatgccacctcctcctccccctcttcctggtggtcctggaatccctccacctcctccatttcccggaggccctggcattcctccacctccacccggaatgggtatgcctccacctcccccatttggatttggagttcctgcagccccagttctgccatttggattaacccccaaaaagctttataagccagaggtgcagctccggaggccaaactggtccaagcttgtggctgaggacctctcccaggactgcttctggacaaaggtgaaggaggaccgctttgagaacaatgaacttttcgccaaacttacccttaccttctctgcccagaccaagacttccaaagccaagaaggatcaagaaggtggagaagaaaagaaatctgtgc

SEQ ID NO: 17757 - protein, 533 aa, Homo sapiens
MLETEEGILLLVRAMDPAVPNMMIDAAKLLSALCILPQPEDMNERVLEAMTERAEMDEVERFQPLLDGLKSGTTIALKVGCLQLINALITPAEELDFRVHIRSELMRLGLHQVLQDLREIENEDMRVQLNVFDEQGEEDSYDLKGRLDDIRMEMDDFNEVFQILLNTVKDSKAEPHFLSILQHLLLVRNDYEARPQYYKLIEECISQIVLHKNGADPDFKCRHLQIEIEGLIDQMIDKTKVEKSEAKAAELEKKLDSELTARHELQVEMKKMESDFEQKLQDLQGEKDALHSEKQQIATEKQDLEAEVSQLTGEVAKLTKELEDAKKEMASLSAAAITVPPSVPSRAPVPPAPPLPGDSGTIIPPPPAPGDSTTPPPPPPPPPPPPPLPGGVCISSPPSLPGGTAISPPPPLSGDATIPPPPPLPEGVGIPSPSSLPGGTAIPPPPPLPGSARIPHHHLLCLGVLEFPPHLLPCLEKQECHLLLPLFLVVLESLHLLHFPEALAFLHLHPEWVCLHLPHLDLEFLQPQFCHLD

SEQ ID NO: 17758 - DNA, 1962 bp, Homo sapiens
atgtatttgggtaaaaattgcttcttttagaaaatgcaaaggtttatttgtcttaataaattgaatactaggtgttgtaaggaagtgagaccagaaggacaagctaaattatgcattcttacttgagggatcggaatggatggggcggagttctcttcaggctagccttctgggaaaagtggatgtctttttcagagattcatcataccttgacctgtacctcttctctgccctccacttccctgccctggagtccgtttctggagactagaaatgtatctaaattgggggaacagaatgaatgaattaatgaatgagagttcctttgctttaaccattcctggatgcctgcaaagtaaggaataatgcagtttttatgtatctgattttataaggggttactctttcaagagtaacaaaaaaatgcaaactgtaatgaaactacattgtatttctaagtgtgaaaacgacaggctgccccgtttttactaattgcatttgcattttaaggtactactgaaggtcagatcaaagttgaaatgcaaaaatactaattagagaataatgtgaataaaatgggaatcttcttggtattttatgtgtattgtaagtagcagttaaattatttttttaaaagcaatttcagttttaatcactgaacaaaagaaacaggcaacattcacttctgtagtatggtttccacctatctctaacaccactattaaggtacaccagtgttaaggtacattaataactacacaaaattttatttaaagagaacacttagcagcctatgatagttttcaataaaatgttgcctctctttcggattctcactaacttttgttactattctaaaagtttgaatttgctggggtgtttattctgaggatcatttaaccattgttctatttggcataaccctatttaatggtgcttagagctgaattacctacagaaactgtttctggtttaaacaattagcacaaattggcctaagtattcatgagcccatgtttctgtgaagtaattattaaaccaacttaatgattcttatgtaaggtacactttttattttaatacattggtagtctctatgacttgtagcaatgttttacaaatgtttaaaatgctaaacttaattttccaagcttttcttgacaattagatacctatcctgtagttactgaaaatctgggtagtaaatctacccaattaaaatggcactttataaaagggaatagagaagagatgggactatttctatatttaaatgctgctggctattcctttgtatataaatgaaaaataccattcattaaaattaagtactcgtttaagtatggttcttaattacatttcattcatttatattagagtaaatggcttcataactactttaaaatttaacccacaagcatattaaatctgtttgttataagattggaaacaatttttgagagggactaatttaaacaagtcctcctttagtcttttgggtcgcgtagttgctgaaacctaagtacctgcagcctacaggataaggaagttcacagcctgcggggtgaatgaacccatgtgtgaactgcacagagcaattcatagaaaatgcatagaaatttgtaacactttggtcacatctgtctctagatggtcattgaatttgtttaaagatggatgaaaggccaggcatggtggctcatgcctgtaatcccagcactttgggaggccgaggcaggtggatcacttgaggccaggagtttgaaaccagcctggccaacatggtgaaaacctgtctctactaaaaatacaaaaattagccgagcgtggtggtgcgtgcctgtagtcccagctacttaggaggctgaggcatgagaatcacttaaacctgagaggtggaggttgcagttgagccaagatcacgacactgcactccagcctgggcaacggagactctgtctc

SEQ ID NO: 17759 - DNA, 2485 bp, Homo sapiens
  CDS (37)..(2130)
gctgatgttcgttgttctgtctttaagtgtctgccaatgattttggacaacaaactgagccacccattgttagagcagctccttccagctctcagatacagtctccacgacaattcggagaaagtgagggtagcttttgtggacatgctgttgaagatcaaagctgtgagggctgctaagttttggaaaatatgtcccatggagcacattctggttcgtctggaaactgattctcgacctgtgtctcggcgcctggtgagcctcatctttaattctttcctgcctgtgaatcagccggaggaggtctggtgcgagcgctgtgtcaccctggtgcagatgaaccacgccgctgccaggaggttctatcagtacgcccacgaacacaccgcctgcaccaacatagcaaagctgattcacgttattcgtcattgcttaaatgcctgtatccagagggcagtgagagagcctccagaggacgaggaggaagaggacggaagggagaaggagaatgtgactgttctggacaaaacactgtcagtaaacgatgttgcatgcatggcaggtttactagaaatcattgtgattctctggaaaagtattgacagaagtatggaaaataataaagaggccaaactttacacgattaacaagtttgcctctgtgcttccagagtatctgaaagtatttaaggatgatcgctgcaagatccctttattcatgctaatgtcctttatgccggcctctgctgtccccccattcagctgtggtgtgatttccacgctgagaagccgggaggagggcgctgtggacaagagctactgcactttgttggattgcctctgctcctgggggcaggtggggcacattctggagcttgttgacaactggctgcccacagagcatgcccaggccaagagcaacacagcttctaaaggtagggtgcagatccatgacacacgcccagtcaaacctgaattggcattggtctacattgagtatctgctgactcatccaaagaaccgcgagtgcttgctctctgctcctcggaagaaacttaaccatcttttgaaagcccttgaaacgtcaaaggcagatctggagtcacttctgcagacaccgggtgggaagcctcgtggcttcagtgaagcagctgccccgcgagcctttggtctccactgtcgcctgagcatccatcttcagcacaagttctgctcagaaggaaaggtgtatttgtccatgttggaagacactggcttttggttagaaagcaaaattttatcttttattcaagatcaagaagaagactacctgaagcttcatagggtcatttatcagcaaattatccagacctacctgactgtgtgtaaagatgttgttatggtaggccttggtgaccatcagtttcagatgcaactcttacagcggagtcttggaatcatgcaaacagtgaagggatttttttatgtttcattacttcttgacattctgaaagagataactggaagttccttgattcagaaaacagattcagatgaagaagttgcaatgctgttggacacagtccagaaagtatttcagaaaatgttggaatgtattgcacggagcttcaggaagcagccggaagaaggcctgcggctgctttattctgttcagaggcctcttcatgagttcattactgctgttcagtctcggcacacagacacccctgtgcaccggggtgtactttctactctgatcgctgggcctgtggttgagataagtcaccagctacggaaggtttctgacgtagaagagcttacccctccagagcatctttctgatcttccaccattttcaaggtgtttaataggaataataataaagtcttcgaatgtggtcaggtcatttttggatgaattaaaggcatgtgtggcttctaatgatattgaaggcattgtgtgcctcacggctgctgtgcatattatcctggttattaatgcaggtaaacataaaagctcaaaagtgagggaggttgcagccactgttcacagaaaactaaagacattcatggaaattactttggaagaggatagcattgaaagatttctctatgaatcatcatcaagaactctgggagaacttttgaattcataaccaagccaacatctccagacatgtaaaaatagggaaaagtgattcaaattgaaatgcctgtgtattttcctattgtttttaatgttaataacccatataatagggaaagggtgggatttttttgtgggaatgtgggaaggtgggggttatggaggagataactcaaaacttcttcaattttgcctagtgcctgcgtaaataatatatttaatataaaggactccaggtatgaatggtgtagaaatccatgattccaagaaaaaacacttttctagcaaacctggttgtttttaaaatgacttttatatatgtaatattgcttggaaactatgagtaataaagcaatgacaac

SEQ ID NO: 17760 - protein, 698 aa, Homo sapiens
MILDNKLSHPLLEQLLPALRYSLHDNSEKVRVAFVDMLLKIKAVRAAKFWKICPMEHILVRLETDSRPVSRRLVSLIFNSFLPVNQPEEVWCERCVTLVQMNHAAARRFYQYAHEHTACTNIAKLIHVIRHCLNACIQRAVREPPEDEEEEDGREKENVTVLDKTLSVNDVACMAGLLEIIVILWKSIDRSMENNKEAKLYTINKFASVLPEYLKVFKDDRCKIPLFMLMSFMPASAVPPFSCGVISTLRSREEGAVDKSYCTLLDCLCSWGQVGHILELVDNWLPTEHAQAKSNTASKGRVQIHDTRPVKPELALVYIEYLLTHPKNRECLLSAPRKKLNHLLKALETSKADLESLLQTPGGKPRGFSEAAAPRAFGLHCRLSIHLQHKFCSEGKVYLSMLEDTGFWLESKILSFIQDQEEDYLKLHRVIYQQIIQTYLTVCKDVVMVGLGDHQFQMQLLQRSLGIMQTVKGFFYVSLLLDILKEITGSSLIQKTDSDEEVAMLLDTVQKVFQKMLECIARSFRKQPEEGLRLLYSVQRPLHEFITAVQSRHTDTPVHRGVLSTLIAGPVVEISHQLRKVSDVEELTPPEHLSDLPPFSRCLIGIIIKSSNVVRSFLDELKACVASNDIEGIVCLTAAVHIILVINAGKHKSSKVREVAATVHRKLKTFMEITLEEDSIERFLYESSSRTLGELLNS

SEQ ID NO: 17761 - DNA, 2350 bp, Homo sapiens
agattaacggccgtcccgaatatgcagcagaggcacaggtctcccctactcatttcaaaatatattagccttgctctaattagatattaaattttaattccgttaaacttttttcttaagtgcacaaagcatcgtactccctggaggcaaacacatcgggctgcttcagcgttagcgggatgcttagcattttgaatattgtggcaaaaaaattaaaagttcacttattaatatttatcagcagtatcataatttccatcctcttatttcagaatttcacttgaggcaaaaataccacaagtgtaattactctagcacagctattaatgtgctggatgataggccactgcgtcacatgaccttctattgttcatgggtttaaagagaaagcagggctttgtatttctttttcttcttttaaagtcgactgtagcatcttggcttttgtctggggtggggaggatctggggtctggttcactttgtaaaagtaaaccatgtctgtttaaacaatagaggtgtttaagaagactctttagttttcctgcagattgttcaagattacatgataatcacacggagtatttatttcctactgacaaaccaagtacttgttacatcaccaatggtaccaggagatgaagacgcgggttttgagcaggagcgagattaccacccaaaaaggagctacctgaggcagcccagcttctagcaaactttttacatgttgcacatttcagttcttaaatgaaggctactccagtgtcatttcattaaagtacctgggtgtagtactcaagtcccccctcaagagttcataagtaagcagtatccttttggccagtggtcctgtttttgcccctacccagactgttcgagaagcatattctatagataaatctgacatttgtcatccaataccattgcagtcctctgcagcatacattctcaatgggggctgtatcacccctagattggttctgagatactgcaatgtcttgtgtccttccaaaggaccataatacttgagcaaatatgaacatttcttggggtgagggcagaaagagagaaacaaaagtctaaaaagggacaataatgaaaaaacagttgagacctttagtatgatgggaacaggatgaggaaggaggagatactgacaggagccctgggtcttgctctgcattaaacagatatttatggacattaaacagatatttatggagcacgactctgtaccctacaggcccagaatagtcttaaggctcctgggaattgatgataggccatttacccagtttcagtttagaggcagattcactggccttagcatttcagtaattatatttatttatttttagcctgaaccagatttaataggagaaactactttctgcgtttcttttaattacttgtagtttacacagtaactttagaagagtaaatgaaagcatgcttcgatgctgccactgtaaataccattcattagtaacttattttccctggagtcttgtgaagtgtgaatttaaagcctgctctatctggaatatggaatagtattaagattacaagcacattttatattcatgagccggaaaggcaaaaaaaaaaaaaaagtgatcctccatcctctgaattctcttaactatgtgactaatttcaattagtatgctttgtcattacggaactgttcaggtttcatctctgaacatttgcttttggcatcttcttcagtagcccaaaactgtcctgccgttttccaagaacactttccgtccataatgaggcaaggggaataaattgatacaaattcatgatttgagaagtggattgtttccctctcttctacgagtttggatccctgatcagtagacagacacataagacaactttctactgtgcaaattaaataaggattctgccagcaggccttcctttccattaccgcctatttccatttttcaagacaagtaaaaataatagtggaacaatatcttcaaaaaaattactagagcaacataatgcatgatatacaatatataaaataggacagcagaatccactacagaaataaaacatgggacttgggacagattgcattatgctctgaaaagtgaagtaactaagggtaaccgtaaagcttcgtatttatagactgcctttcccctgaggatctcagagtggttaatgttccaggagcgagggtgcttatggacttctgcaccattacttaagcaacttcattttttggcagaggtgccagcttgatatgaaaccacatgctgtgcaaggaccatttatataattaactccatttttgtaacacacctgcttctaagtggacatcaactacc

SEQ ID NO: 17762 - DNA, 1894 bp, Homo sapiens
aggattttcattttcatttatggcacccgttgtgtttgagaacatggaccaatttatggattagttttaaacccccagtctgtcacactcaatgaacaattctaagttggagagaatccatatgaaaggattagaatgtgccacagtggagcttacacatgactgtttcaactaaatattgcccagctgcctctcctgcagtattatttttttttttttgctacttagttaaattgctagtgtctctaatttcacacattgtcagagctttttttattttgtaaatatactgccacaataaatgtatgtgatgtttcatttattcaagatggggtctgataaactgtaggactaggagactaagaagagaagtcaattttgagtagaatgtgcatctttcaaataatattgctgggcccttctttggataccttgtttgactgtactcataaaatagccagagagtgactgttaagaccgtacacacttaatgggttttcaagaagatgggattgttttttcttggccatataatataaatgtataataaatttgctctctttgtaattaaaattaagagacagtagctcagctaggccttttaaatgtctatataacccaacaccaccataagtccagctcaattttttgtgacctgtttttctcatgggctagctcaaagattttttttttttaaggcagcagcaagatgaggttttaaaaaggctttgttagggcaattagacattttcatttttcaagctgattatagcatttatcacttacattgaaatttagtatttgcattttgcctctacgcttagaatgttacccaacaatatggtcaccacacaagttgattcacagggtgtgtttgcacatttctccagttttctgattaagataccctaataaatcctgcctcacagagttgcactcacttcagagccagggtgtctgtggtttctgcatgaagtcataacgcaattatgaaggagaattagattctgtcatcgtggtctcccgcagggagcacaaagttacttctaaagaatgttttcttaattctttacttgaaaataacctctgttcaagtagcataccagatgctcttagagaaatggagtcagtgactccccagacacaccatcaatcttgctctgaactttgtagccagcctgtgtttctcctgcagtctcctaccccgttgctgctccgggttttgccatttccagctgcagtaatcgtgtgtgtgacttgaacatgtgtttgctgttaaccattttagaatgtgttttttcttctcaacatccccctttcctccccttttgggtgcagttgatggatttcccatccccagaacggggaagcaagatgcactgtggattttccttcatttattttctagtgctcacctaggagcagacgcctagcttcacttggtttaatttcatcttaaagctgacatgatgttgtgatgtaggaagacagtaaattggggtcactggttaatgctgatattatttttgatgactctaacccttaggtcttactccaccccccgcccttctatcatttgtacttaagtatttacctggtgaaaataaagcttatgccgggcacggtgcctcacgcctgtaatcccagcactttgggaggccaaggcagtggatcacctgaggtctggagtttgagaccagcctgaccaacatggggaagccccgtctccactaaaaatacaaaattagccaggcgtggtggcacatgccagtaatcccagctactcgggaggctgaggcaggagaatcgcttgaatgcaggaaccggaggttgcggtgagccaagatcacgccgttgctctccagcctgggcaacaagagcgaaactccatctc

SEQ ID NO: 17763 - DNA, 1837 bp, Homo sapiens
agacgagacgtctctccggagcgggggcgagagcggtcacccacccgcaggagagacggctcccccagccggcggagacggtctctggagagactcctggagcagaggaggtcccccgagcgcaggagagggggctcgcccgagcgcagggccaagtccaccgaccggaggcgcgcacgctcccccgagcgcaggagagagcggtccctggacaaaaggaacagagaggacagagccagccaccgagaaagggaagaggcgaatctgaaacaggatgccggcagaagttccagacatcccccggagcagagaaggcgaccttacaaagaatgtagcaccgacctcagtatctgagacgctgagtcacattccaacctttaccgtgtcaaaggttctaagaggaaagtcacaaacctgaaattatttagtttcttacctaatgaagcatctgacacctgatgatcctatgaataacaacaaacattttatgcatttgaaatcttataagaaaaaatatatatgaaaagtattgtgcctgatgtatcatattaaagaaagtatttttaaatgcatacttttttggaaattatttgccaaatgctggcccaaagggatataaattttgtttctacgtaacctgtagaatcgtcaagaattgttcccgttttggggcaatctttttctctcctggttaaatggggctgttgatcattttctctacgtaagggaatttattgattaagtttaattaatttgatatagactgtcatgtggtgatgtagtgctatactgtagtcggaagtttttcttaaaagcaaagagcaaaaatgcaaagttttatttgtaaaagctgaggacccttggggatggattaggtttgccgatgatcctaaaagtaagcaaactgtatgacaagactactattgcaaatgaaggatatttatagctaaactgcgcagcacaaagaaggtttatattgtgagttatagttggttcagaaaacagtttgtactctccctggcccaggaaggcacacagacaaaaatgtcggccacttttactcaaatacagcccaagcacagacagtcaggttcgtgatcatcaccaacatctgataaaatctcattgaaggcaatgccatcacagctttgctcaattactacgaggaagagacaacaagcatctttcgtgttgtctcgtctgattggaggctgaatagtagatggaatggggggacagtgtgcctggtgtgaggaagacgtaagatccccaatttggaaagcatgcccccctcccttttagtagaagcccatggttgccctttgccaaactggggaggaggcaatgagccttggtggaaggaacctctctgttgatatttaaagaagtgagggctgtgggtattcattgctagaaatgccaatttcactttgaaaccatagtccaagtctctaggttggtagaagggaaaggaaggaagtggtcccagtgattctagatctggttgggaaacttctgcctcatgactctgtcctttgagtcctttggacagcagcacaaaacataacaatttttatttttaaacagacccattctttttgatcccacaggagctgtggttgggtcggccgtagccccgggatgtggtttaagtggattactgcctagctgagccaaaatgtttgcttgtacctgttggaccactacagcaaaccgctgcttacagtgcattgtgtatttctgtagtactgttttgcattttccatagagacagaaaactttgcaagtcaatcactgttgttcccatggtactgtaagaaaaaaaaaaaggaaaaag

SEQ ID NO: 17764 - DNA, 2346 bp, Homo sapiens
cacacagctgggacgtgaccccgcctcttgggggtggtcgcgtgttgctcagtgctgaagtggggttctcattccggcccccctggagatgaccccggaggaggccacagccaaccatgacagtgctggggctctggctgccttctccacccaccccacccctcactcaggtcgtgttttcaggagctcaaggctggagtgtcttgacagtaaggggaggggagcggaggcggaggcgcctcaggcagcctctccccctccttcctggaccccccaaccccgggcccgccagccctggcttgggcttactgggtgaccgagagcccgcggggcaagcgggaggtgcctaggcctctccccatccccctcttctccgcacgtgggacccttagcccgtggccagtcccctggtcaccacgattgcgcgacctccctttccctggggccttttgtgccccgagttccgcccacccgcaccctctgcgcagagcgccctccccacgccagtcgaccccacaccccacactccccacgcgccgcctcccggaagccctcctggacgcctcccgtggatgggcccaccgcgcccacgggggctttaggggaaggtgctttgggcgttttttgcgccatgtctcctcggggccggcggttgcctcgggacggttctcgcctcctcccacagccccggtgtctgggacgcacccggcagccccgctgctgccgccttgtggcgcgcccggcccagccggtggcttctgtggtcgccgggggctgagcgcgcggctgggccctgagtcccccaggccgccccgatcctctgtccccgccgccggccccgctgcagtcccaacccgggcctgcccgggaggagcgcaggggcggcgatgaccagtcccgaaaggggctcagagggcagcgaggaggtttcacgccggtgcggggcgccgtcgaggtgggggcaccgcgaaggtggaggcggggtcgcgccggaagccccgagtcgagcgcacacggcgggcgcccctggcaagtgggactcctccggccccgaggcctgaactcagcccggagaccgcgcccaccagcgccggtgtccccggaggggccccgctagttccctgagcagaggtcctgcggcttcccggagggtgtcctgttctctcccccgcctcgcatccattctcgccctggtggttggtgtctgtggtcgggggcgagggccgtctagtggagacggggattcaggccgcttgaaagtctgggatctctgggcggatggcagcggctccgcggagctcgagctcggcgcgcaggtcctgggcccagggcgggagcgctagcgagagggctgccccgtcctgcccagagggtcctgaggactcccgctgctcctggagtcttggggaggggtccggctccacggggtgggggtgggggctaccaggaaacctttgcctcctggggctgtgcaggaccggctagccagcgctgggaaccagggctgagttcagcccagctctgtccaccccaaccccagggctaggggaaggagctgggagaaggagccccacctctcccaggcgagtatctgtcccaggagcccacacagagggacacccagctctggtctggccttcgtgttggcttcaaggtggtaacagagagagctgcagagtgggggtgtgtttgccagtccctgcatgggtgaatgttggggtgcccactgctccccaggcaggacccccaggactgtcagctccccttcccacagagcacccacctggaggtgtcacctgccggcaagcgtgggccattcatccacctgtcagtcaacaacacccgctgagcatcggcttgtatcaaaaggtccagacctaaggggaaattttatctctttctttctttctttcttttttttttgacacagagttttgctcttgttgcccaggctggagtgcaatgacacgatctcggttcactgcaacctctgcctcctgggttcaagcgattctcctgcctcagcctcccgagtagctgggattacaggcgcccgccatcacgcccaggtaatttttttgtattgttggtagagacggtgattcactatgttggccaggctagtcacgaactcctgacctcgtgatccgcccacctcggcctcccaaagtgctgggattacaggtgtgagccaccgtgcccggcctctttttatttattcctaaaatattaccttgaggccaaattctgcgcttaaggagaatgtgcaccaagtgctggggtgggggctggttataaacgaggccacaaatcatgcttgttaataaattgtgtggttcaaatctg

SEQ ID NO: 17765 - DNA, 1898 bp, Homo sapiens
  CDS (1255)..(1878)
ttttaaaaaaataattgcgcccccccgccccgtgccttggagatagtaagaattggagcagagcactgggacttcaattcacgcatggaaagagatctttgttagttggaggaaggagaacttgcctgagcttcgggcctttgttttgtttttgtgagagggacgtgtctcctaaatgaatgtttgctccagcgttgcacctcaaataagtcacctaaatatccacgccctctttatccaccccctctttactcgtgtgactagaatagttttcatttttcttctcaagggaatggctaaacagctcctatctgggcgtttgatggactgtcattcaagaatgagtgaagttgaggtgcctataagcaactcagaaattgttgtggccacgcttgggggaaatagagccctacactcaggtgatgagaggagacctcagaggtgaccgatccagggccttgctccctgcgccaccccagctcgtacctccagtggaacttggctgggcttatcaagagctcctttcattcattgcaacttcatttgttagaaagcttctctgtgtatttagtaggcattgtctccaacatgtaccactggtctggcttttgttaggcccattaatagtgtacatgtgacagcctttcaagtataggtgctccccggcttacggtggggtcgcatcccagtaaacacatcgttaaacctgaagtcgaaccatccgaagtcggagaccatctgtatttgaaaaaagtccctttgcattgcttgtaagagttctggttttcaaggtgagaaatctgtttgtgtgtttgtttgatcattctgcccaaaggagatgtggctttgggtccttttccccactcatcttccacaatgaattactttgtccatattaccctaaagaagtgacatccaagttggaatgtgatcttccgtatgtcgcctcccaaaaccccactaccatagcttcatgcttgtgttgacacagccacaatcacaactcaggtgtcagttctgagaccttcccatgcctgtcgccactcagcaagtgttcttcatgtgccctggcagttcgcattgtaaggagcagccaggttgttatggactgttgctagttaccacagagtagtgaattatattaaggattaattacagcagacaatgtgcacagtatcatcgagtgcagcgttctaaaaatgattctacacttttactttgaaaaattcttttttttccagccagcgccgagcgatgggcatctctcgggacaactggcacaagcgccgcaaaaccgggggcaagagaaagccctaccacaagaagcggaagtatgagttggggcgcccagctgccaacaccaagattggcccccgccgcatccacacagtccgtgtgcggggaggtaacaagaaataccgtgccctgaggttggacgtggggaatttctcctggggctcagagtgttgtactcgtaaaacaaggatcatcgatgttgtctacaatgcatctaataacgagctggttcgtaccaagaccctggtgaagaattgcatcgtgctcatcgacagcacaccgtaccgacagtggtacgagtcccactatgcgctgcccctgggccgcaagaagggagccaagctgactcctgaggaagaagagattttaaacaaaaaacgatctaaaaaaattcagaagaaatacgatgaaaggaaaaagaatgccaaaatcagcagtctcctggaggagcagttccagcagggcaagcttcttgcgtgcatcgcttcaaggccgggacagtgtggccgagcagatggctatgtgctagagggcaaagagttggagttctatcttaggaaaatcaaggcccgcagaggcaaataaatccttgttttgtcttc

SEQ ID NO: 17766 - protein, 208 aa, Homo sapiens
MGISRDNWHKRRKTGGKRKPYHKKRKYELGRPAANTKIGPRRIHTVRVRGGNKKYRALRLDVGNFSWGSECCTRKTRIIDVVYNASNNELVRTKTLVKNCIVLIDSTPYRQWYESHYALPLGRKKGAKLTPEEEEILNKKRSKKIQKKYDERKKNAKISSLLEEQFQQGKLLACIASRPGQCGRADGYVLEGKELEFYLRKIKARRGK

SEQ ID NO: 17767 - DNA, 1865 bp, Homo sapiens
ttagctgtcagtaacaagcttcctcgagtctcacagtcacaggattgtcttagttctttgcagttggctctatgtacacaagaacatgctgcccatagacacagcgctcccttcaggatctaattcactgcctctgctctcgctgcagagacagaaaaaaaagtgatgtctgctctttgtttgctgttatattcccaactagtatacataagtaatagccaaccattcaatgcatcaggcactatgctaaacccatatgactcaaatattaagcaataggcttaagatcacctactcaggaaataacaggcttcaaaccttgagtcgctctgtgcaaaagctcctacttttaacctgtattccacacttgctgtttggttggattttctgcaattccttcctaataaggagtcataaaaatgcctaagcagtaagtatggagaatcactagcaatctttgaacagcagctcatgaaaagcctttcgttgtgaaagaaaaccaggaagcacttgtttcctggggatatgatttaggagaaaaaaatgcatttgtttgtagcagtgaaagttcttgtttctatatcctcctaaaatatatatattattgaattaatgaaagtccagctttgatcctatctttgagagggttattttatgtcttatatttttcaaaccatttactcctctggtgccagatctgttaactttcttttaaaaataagacaaaaacctaatgaaaactgaaagcccattgctaccatgaaaaactttgctgaaaataaaaggaaactttctgtaattttgggggaaggttaaaatgaaaatctagttttccttatcaggcaagtatagcaagattaataatttctttggcaaatttccaagaaaataagggaatgggaaaccttcaatatggagcttctttcaagcagtacggttggggaagggcagagaagtatcctctagggattgctgtcatgcagcttacctttagccttgaatttcatacaaggcagagttcaaagtaagtgattacttgtactaaatgtactcacttagtacgttttggggacaggcataaagagccagtgaccaaaatggctgaagtgatttggcagggaatgatactctcctctgatttggggtagtaaatacaccaggtttcccagctgagtcactgtagggatggcttcttcccagatactacagggaagatctgttacctttgtttataagacaaaagacactttcaaagggcaggccttttcatgtagaagagtcaggtccataactcggtagcatttaatttgaaaggttacccacattgagctcataccagtgtgaaacttccatggcattatcttttaaatccctaagattaaaaccccacacaaatgcactcaaagcaacccaacatcagtatcctgcagtttctatgggccctttctgcagcctttactcatggaagacaagggatctgggtttgtttaggaaacattttgtgagcattgtccaagccctaagtatggttggcctaagctttgctgaagctaagatcagtctgtttatgtttgcttaaaataggaacttaaaggactaaaatgtcatcgttatttatcctgattatagcctaatggtattttattttctctacagcaatatgactgctaaaagaaccaacccaggacagagccacaatcttcctctatttcattgtaatttatatatttcacttgtattcatttgtaaaactttgtattagtgtaacatactccccacagtctacttttacaaacgcctgtaaagactggcatcttcacaggatgtcagtgtttaaatttagtaaacttcttttttgtttgttt

SEQ ID NO: 17768 - DNA, 2455 bp, Homo sapiens
tgtttgcaaataaaccattctgataaattatttttgttgcttaaaataagaggaggaaccgctgtgtgttagcaagaatgtccatacctgatatgaaagagtcatgttggcttcagttcctactgccctgtggacttcccattccctccttacttgagtcaaccatccactcagtactttccacaaatctaataatgaggtgctctctgtaggtaaatcctttcactatggcttgtcctcaaacctcccaagaaaaggttcaactgctcaatctcttaacctttttaattccattcccttgcaggtatcccggccctgcataacaagatgatcccaactcaaggaaaggggtttagcagtgttggatcttggcgtatgtgggatttaaccaggcagaaaggcagacaagagtaagattctaggcagagagagcaaatgcgtcgagcatgggtatgaacatgtgagggatagagaataattctgcaggaagtttgctggatggaagggccttatagggttagaaaagctggtgtcagattgtcaaggactttgaatgtcatggggcttctcttccaggaacacatgggatcaggcttagattaacccaaatgtaattgtcagagcccagagatatttcatggtccagtcctagcactgtgcagctgccaaaagtcaaagccattcaaatctgtactgaaaactgtggaaaagcaaaggagcacttaagtctctttccccatgtcttgcattctcactctcttttgcttcaaagatctgtctttacctgcccctgtccccagtcctaacaaaaagcactcccctaaatcaactcttaagttcctctcccttctcactcctttcttagtctcctctttctgtaagaagttcttgctcctgttgttaatggaagttaattaaagtagtatttcaccttgtaaggctgtaattcttggcacttgttatcctcattttctacatccaaagaccatggaccagaatatctcttaggaggtaagggagagtgaggctatcagccaaagaaaaagtctccagggggaaggggagaatcacttataatttaatactttgtggaaaaaacatctctgccatctatggccctccaataacaatggaagacagaatcaacaggtgagaaccttgggacaaaaataagttacaaagctgttgtaatccaggtaagagctattaagtttccaaacgaaggctgactgtgaggataagtgatactgatttcagaaatctttaaaaagtagaaccaacaagccttgaggtctaactctgttcaacattaaagggaagagtgagtctaagaagacttcaggtttctagcttggccaaaccaattgagctttaagtgaaatgtgcgatatggtaacagagaaggaaaaagacataacgatagatttgagctgctggtgggaaattctggtttagtgcccagctggctgtacaggctggttggactttaggagggaggtttgagctggaaaataaagatggagagttgtctttcagttttagatcatcagtggggtcataagggtagatggagtttacctgggaaaattaagtagctattcgatttggcttattattatgttaaaataatacttctctagtgaagtacttaatatgccagatactgtgccaagcattttatatacatcctctcttttactaagccctcatagggcaggtattttgattccaatcatactgattggaactcctaagaaggtatcttgcttaaggtcccacaacgaataggtggcagatccagggtaattcaggtctgtcagaacagtgattcttaattttttccctcctcagactccaggagtcacatgaagttatgcatcctgtctgaccgaggcacaggacaccacatttttatattccgcttccaggatatcacaaacctgaagcccatcctccatggcccagagagaaaacccaggacaaaaccttggagaagactattttcatgaagacaaatggagaaggagcagtagagtaaaaagagagcaaatccagctgcctgtacaatccatgccaccgaatgccgtaagtgagacgtaaaagttacgatactgaagagacgtaacctgaccaaggccacagagctggaaaaagaagcaaagccaagccgtttttctcatgcactgctcacaacaagcccctccttccactgactcatgaaaaacacactcataatgcccagcccgcaccctaatgaacagccctcttaagagtggtcatcagacttcaatttcacagactagaattgagaaatggaacaaaaccttgggataccagccttccattttggtagggatcatttaaaaaatggtagggatcatttaaaaaatgtgttggtgtctgaaacttactttgaagtggttaaaaaacataaaatgtatagattgtaacaagc

SEQ ID NO: 17769 - DNA, 1753 bp, Homo sapiens
gtgtgctccacttaaatgagaaaagcaacgagcaataagcccagggtgaagatttggttacataccctgcttctcaggttttgcttaagtttagcgcccaccaggaagaaagaaaacgattatctgcctccttgacttttgcatcatttgtctttcttctgatgaaagtgggactaatcactgagttagggtttccttatttttagtctacaccatgttgctttatcctaaaaggataaatatgggctgtgtgatggttgaccacctttcttcttccttctatgaaggtctgaaagggcacaagacaggtaaaaaggaaacagcttttctttagtaactaagttgctagatttttgatctcatggccctgagctacacgtgaatgactttgacctgtaatctgaaataagatagacttcagagttcacctctcccaccatttcactccaaaggtgagataaggtagagttgctaaaggtacagtatgaagggcatgtggcattttagtgttgacagtatgccagctctaagacctgcttcttccatctccaaccattcctggactctgcaggtgacacgagccactgtgctcctggatgcttcagaacctgtgcagatctctgtcttcactcctactatggcatctcctagcatgttctacactgagctccactgggccttgcatgtcagtatcccgaattctgaatgaagcttggaacatgggaggtgcatccactaacaacatgaagaatgaagacatgtattgactacctttgacaaaagtatgtcaaaagcaatacatcttactagtggagcgaagacactgcatgctgacaaaggtgatctcagatgtgaggtcgatggtgcgccatgcaatcagcttgctgagtgagcctacttatgccccatcccgggggcctagggtaagaaaagtgccaagcgaggctgaggatcagactaaagctggaaggtgtcaaggcacaggctgagtcatcagaacaccttccctgaattgtgtcaaacaagtgtacatgtgctcaagtgtatctggattctgatttggctgcacagtcactgttttccagatgtttgcagaagaaatatgagctggaggagactcactgaaagctggaactagaaggatgcacactgctcatccaagccaattcacttattttaccaatgataaaactgagtctcagagaagtcatacgcttgcccaaagacacagcttgtggtggaggagtcaacaccagaactctggtccaggactgcaaaaaaacacttaacatgtgctaataatgaggataaaagatacttcaaattctgggagttctataatgtttgagcacatataccattgaatccttttaataacccatcgcttacacagatgaggaaaccaaggctcatagaaataaagtgctttgccaaaaggcacaaaactggtcagtaataaatctgatctccaggttcccagtccagaactttctgcagcactatctttttgttccctttaactaccagaagctttaacccaaaatgaggcttcaactataaaagctatttaagaccttatggctgcgtatctctgccctaagttttctcttgatccttattttatattctaatgtttaaaacttgttccccaaatttttaaagtttgcattcattttatttcaataagccacgccaaaatctgtgtgtcataagctatctatacgtaaataaatgaacgaatgaatgagcaaac

SEQ ID NO: 17770 - DNA, 1808 bp, Homo sapiens
atttttattttacagacgggaaagactgagtaaatgtgagaaaattagctgaatagccactactttttttctggcataacctacccctgcttaagaacttccacgggcctttgattggggtttttaaccactttaacaaaccatgtaaccctgagagctatgcttgttggacaacatggtgtaatgtaccacaggctgtagagccagatactggggtttgaatccttattcaacatgggaacataggagctatatgacattaaacaactgtcttgtcttcactaaatttctatcaactcatttgtattgtggggataatagagcctgcttttacagggtaagtgagataaaatgaataaagtgtctagacaatatcatagcatagtaggtattcaatcctggtgagatcctgtttataaggcccactactttgtcttatcaggcagaataacaaaggaacaatatttaaaaagcaactagctcaaatctgtccccagaaggaaaaacatatcttgtccttggtccttaaaaaatttcctctgtcactgtctagaatcagcacctaagaacacaggcgtttagtgttgactggaataaaatggaatcgggtgctggtgcagggagattgagcagggatgaagagagaaaatcacagagtggaaaggatcaggtttggagagttcaatggggggctgccaggacataagcctaatatgtgtgggacaaggaaacccctctgaaactcataaaatggtattgtaatacccatctatgaggtggttaggagaattaataagtaagtagaactgtgctttgcgaattgtaaagtgaatttatatataaggtgtcaagatgaaagggaaaaactaagaaataagttgcccaaagatatcattaggaccaggagaccattataaagtatatccaggccgggcacggtggctcatgcctgtaatcccagcactttgggtggccgaagcagacggatcacaaggtcaggagttcgagaccagcctggccaacatggagaaaccctgtctctactaaaaatacaaaaaattagccaggcatggtggtgcatgcctctagtcccagctactcgggaggctgaggcaggagaattgcttgaacccgggaggctggagtgcagtggcatcatcttggttcactgtagcttctgcctctcaggtccaagcaatcctcccacctcagcctcccgagtaactggaactacagggatgcaccaccacacccagctgattttttaattttttttgtagagatgggattttgccatgttgcccaggctggttttgaactcctgggcccaagccatctgcccacctcagcttcccaaagggctgggattacaggcttgagccactgcacccagcctgttgatcatgttcattaatctgtttgaactccatatattaaggaaattagtcctttgtcaaatatgttgcaaatattccctccgatttgtcacttactttcattttgttggtggtttttctgttttgttgttgtttttctgtgggttttttttttttttttttgccatggacatgtttttagtacttatgtagtagtcagatgtattactcattttttctgtgctctggatcttatgctttgaatggctttttgtgaattccaatattttaaaaataatttacccctagcttcagttcttacatttaaatatttgttccttctggaattttagtgaatgtggacaaggttatgcttcagttgccttaactagttgccttggcatcattaataagttttcttttcctctactg

SEQ ID NO: 17771 - DNA, 1915 bp, Homo sapiens
  CDS (202)..(1317)
agttcactcggcagcggcgccgggcggagggggagagcgcgggccgcgcgggcgggaagcgaagaggcgggcgggccagcgaggagcgcggagagaaaaggcgcgagcggccaggagggctcaggccgagacaccttgcagctgccgccgccgccaccgagccgccgctgtgctcactgatccgcctccagggccaccgccatgtcgagccgcggtgggaagaagaagtccaccaagacgtccaggtctgccaaagcaggagtcatctttcccgtggggcggatgctgcggtacatcaagaaaggccaccccaagtacaggattggagtgggggcacccgtgtacatggccgccgtcctggaatacctgacagcggagattctggagctggctggcaatgcagcgagagacaacaagaagggacgggtcacaccccggcacatcctgctggctgtggccaatgatgaagagctgaatcagctgctaaaaggagtcaccatagccagtgggggtgtgttacccaacatccaccccgagttgctagcgaagaagcggggatccaaaggaaagttggaagccatcatcacaccacccccagccaaaaaggccaagtctccatcccagaagaagcctgtatctaaaaaagcaggaggcaagaaaggggcccggaaatccaagaagaagcagggtgaagtcagtaaggcagccagcgccgacagcacaaccgagggcacacctgccgacggcttcacagtcttctccaccaagagcctcttccttggccagaagctgaaccttattcacagtgaaatcagtaatttagccggctctgaggtggaggccataatcaatcctaccaatgctgacattgaccttaaagatgacctaggaaacacgctggagaagaaaggtggcaaggagtttgtggaagctgtcctggaactccggaaaaagaacgggcccttggaagtagctggagctgctgtcagcgcaggccatggcctgcctgccaagtttgtgatccactgtaatagtccagtttggggtgcagacaagtgtgaagaacttctggaaaagacagtgaaaaactgcttggccctggctgatgataagaagctgaaatccattgcatttccatccatcggcagcggcaggaacggttttccaaagcagacagcagctcagctgattctgaaggccatctccagttacttcgtgtctacaatgtcctcttccatcaaaacggtgtacttcgtgctttttgacagcgagagtataggcatctatgtgcaggaaatggccaagctggacgccaactaggctgagcaatgacagaaccagctgcaccatgtaccccaccttcagtttaaaagaaaaaaaaaatccccttcactcctactgggaggtgggacccctttcattttcagttttgctcatctagggaaaataaggctttggtttccagtttaattgtttttgaccttctaaaatgtttttatgttagcactgatagttggcattactgttgttaagcactgtgttccagaccgtgtctgacttagtgtaacctaggagattttatagttttattttaatgaaaccctgattgacgcacagcagtggggagaacagcgtcttttacctgtcaccgaagccaggaagccccgtttgtaagcgtgtgttgtggtgctttattgtacatcctccagtggcgttctttttactctaatgttcttttggtttcccccctcagaagaatcatgaatttgcaacagacctaatttttggttactttttgtcttattgatggatttgaaaatgaaagatttaataaggcaaagcagaatctgttgtccttaattatatttgcaatttggaatttgtgtgagttgatttagtaaaatgttaaaccgtt

SEQ ID NO: 17772 - protein, 372 aa, Homo sapiens [sequence omitted]

SEQ ID NO: 17773 - DNA, 2654 bp, Homo sapiens
aagtttatagaaaatgcttgttttatagttggttgttattgagatgagagtccctcaaggaactccctatgctttagggagctttttgttttaaacctactggttagacttgtgggttttaatgttttcagctgtggttgtaagaaacacattttaaattgcacctagtatagacatacatgtaaaacaaacaaaatttttacgaagtagtacttgtattaagagtgatgtactctgctatcttctatttcatttttttaaagttgatattgctgccttaaattgattttttcaaccactaatgagtcaggacccactatttaaaaaatactggtgtgttctcttgctgttacgaattaacccaaaacttagtggtttaaagcaataaacttgtgtttatctcatgtaggttctgtgggtcaggaatctgggagtagcttacttaggtggttctgggtcagggtttttcatgtggctccgcgctctgctccagccaaacttctgcagaccatgtgcagccgaggcgaggaaacttctctccacctattggggctggaggcctgagtcacaagccccttgtttacataaagtgtttaggtagcacaagtccttgagatgctcggggtagagatggagagccactgctcgtatccttctgccggcttctgcttgagatctcttggcctttacccttgtcccttgacttttcgtgtttgttttaatctttaagacttgaaatggagtggcctttagaaccggggagatactgtaaaccagcagtatctttgtgtcaccaatggtaactgaaagtcatgctgaagtacagattcctgtagcgtgcacagaggcagaggtgcttcctttaccttgcagatgagttgagcggcgtaagatgtttctgttagggttgaatttcatggttatttcagcaacgattttcgtttttgaagttttggcccccccaaaaatgaaagtctgcaacgcatgtttgttaagagaacagtttattctcctgttaggttttggtctttgaggtatggattccagagttggctattctgttagatttagaggtgtggaaaatcttttaacggggagatcctgaaacacggaaacatggcagggaagttagaatttcctgatggtcatttttaacattttaaagtttactttttggttgttgccatttttctagaatccgtgtcttttttggggaaatacagtcctttgaggactagaatttaatgatttctttacacatctaggattttttgagatttagaaaggatatggctttattcctaaggaagtggaggcagcagtttctaggatactctggtttcaaggcatgctaacttggttgtgatgtctaacccattttggtttacacagtctgaccactagcacaatgcctggcacatagtttacaaatcatttaaggcaagcttaccatcttaagacaatttaatacatagaagtgtccctcctaaaaatctgagtttgatttagaaatccagttatacctgcaggtactgatgactaattccttctttgaagacaaaatagcagctgtgtagcttcagtggctctcaaatggataatagattcagtgtatactcgctttgaactttcctgttttttgatcagctagataaatgactttagtgggtaaatgtctgcctccaaaaccaaattctgaccctgatctaagtattctactgcaccgctgtcactggaatatcaaagttggccttcagactggtgcctggttccttggattggcttgagtattgaggtctgtctcatcttactagggaactaaaatgatgttgattgttttgtagagaattgtaattagagatctgtaggttcttaattcttttggaattccattctgaaaattttcaaccttatggtgttggtggagtgctcatgtgaagagtgaaactgacttaagaataaaagaaaaagtgggcaaaactaatgctaaacttgagaccattgggcagaaatttgcctgtgtgtgtagagtaattggtcttgagtcaaagtaactatgcttatttttaacatcactgaatattttctagcgttacactctatataggcttgtagaaataaacccaggggtaagcccagaaattgaatatcagtcctaaagaaagcctatcaagagcatcctattctctttaagagctgctattcgaatttaggactgggctggtttgctgctcattctctcgaggcataggcagccacacttgaattttgccaagtatgcagataattccaacttgtagtcaggatcatcaggtaatagcattataaggggagctgtacagactgtatactttctacagtttgttgaaatagaaacatttatatggatacatacatctgcaaaggttagggagaaaacggtagccctggcagagaagagctagttagtgtatttcaggatagggccaagggaagctgtcatttctctactaagtctcattgtggaaaagccacaaatgtccctagtacagtaataaggaaaaaaaggctgagcgtggtggctcacacctgtagtcccaggactttcggaaggattgcttgagcccaggagttgcagatcggccaggacaatgtaagaaaaccccatgtattag

SEQ ID NO: 17774 - DNA, 2271 bp, Homo sapiens
  CDS (97)..(1050)
gaggctgagaccggtgcgccgcgcgctagtggccgctcttccgcgggctagcgggcggtgggggcgccagcagcgcggaaggcgggcacgcgggccatggctccctgggcggaggccgagcactcggcgctgaacccgctgcgcgcggtgtggctcacgctgaccgccgccttcctgctgaccctactgctgcagctcctgccgcccggcctgctcccgggctgcgcgatcttccaggacctgatccgctatgggaaaaccaagtgtggggagccgtcgcgccccgccgcctgccgagcctttgatgtccccaagagatatttttcccacttttatatcatctcagtgctgtggaatggcttcctgctttggtgccttactcaatctctgttcctgggagcaccttttccaagctggcttcatggtttgctcagaattctcggggcggcacagttccagggaggggagctggcactgtctgcattcttagtgctagtatttctgtggctgcacagcttacgaagactcttcgagtgcctctacgtcagtgtcttctccaatgtcatgattcacgtcgtgcagtactgttttggacttgtctattatgtccttgttggcctaactgtgctgagccaagtgccaatggatggcaggaatgcctacataacagggaaaaatctattgatgcaagcacggtggttccatattcttgggatgatgatgttcatctggtcatctgcccatcagtataagtgccatgttattctcggcaatctcaggaaaaataaagcaggagtggtcattcactgtaaccacaggatcccatttggagactggtttgaatatgtttcttcccctaactacttagcagagctgatgatctacgtttccatggccgtcacctttgggttccacaacttaacttggtggctagtggtgacaaatgtcttctttaatcaggccctgtctgcctttctcagccaccaattctacaaaagcaaatttgtctcttacccgaagcataggaaagctttcctaccatttttgttttaagttaacctcagtcatgaagaatgcaaaccaggtgatggtttcaatgcctaaggacagtgaagtctggagcccaaagtacagtttcagcaaagctgtttgaaactctccattccatttctataccccacaagttttcactgaatgagcatggcagtgccactcaagaaaatgaatctccaaagtatcttcaaagaataaatactaatggcagatctgcgatttctgggtccactttctgagatgctttctaaaaccaaccaactgataaaaagtagatgagacttctccaagctgcttcacaagcaaactaaccgaaaaactgaaaatatacaaacagcttcacacacacacacacacacacacacacacacacacacacaaaggaagatcatcaatggctgcggtagcctagtaggaatggactatataataatatagcaggtgctcaataactgtttgttgcatttcagtaaaagcagaataacctttcaaaataataacaggctgggtgcaatggctcacacctgttaatcccagcacttcgggaggccaaggtgggcagttcgcttgggcccaagagttcgagaccagcctgggcaacatggtgaaaccctatctccgtgaaaaaatatgaaaattagccaagagtggtggcacatgcctgtagtcccagatacttgggagtgggctgggatgggagaatcgcttgagcccaggaggtcaagggtacagtgagccgaggtcatgccactgcactccagcctggcctgggcaacagagcaagaccctgtctcaaaataataataatatataattttacaccaaaagtttcaggaaaaaacgagtttgttggagttagtttatactttcacatatcaccacaaagatctccagttaaataactatcaatatccatttccattcatctccccctcaaatcatagcctaacagaacactttgaaagctcttttatttaatatttttttacatcctttgaagggagtgcttcaaaaatgaaagcatcagaagataaaatatttttatatttatgcatagcaagccttcatgaacggaagtgacacactctggattgaataatactgtagcctcattcatatgtagttattcaaattggattaatgtctgtgtgagtttatttgaactagcagaaagtatctgaagatattcaggaatagagtttatacttaaaatagctt

SEQ ID NO: 17775 - protein, 318 aa, Homo sapiens
MAPWAEAEHSALNPLRAVWLTLTAAFLLTLLLQLLPPGLLPGCAIFQDLIRYGKTKCGEPSRPAACRAFDVPKRYFSHFYIISVLWNGFLLWCLTQSLFLGAPFPSWLHGLLRILGAAQFQGGELALSAFLVLVFLWLHSLRRLFECLYVSVFSNVMIHVVQYCFGLVYYVLVGLTVLSQVPMDGRNAYITGKNLLMQARWFHILGMMMFIWSSAHQYKCHVILGNLRKNKAGVVIHCNHRIPFGDWFEYVSSPNYLAELMIYVSMAVTFGFHNLTWWLVVTNVFFNQALSAFLSHQFYKSKFVSYPKHRKAFLPFLF

SEQ ID NO: 17776 - DNA, 2478 bp, Homo sapiens
  CDS (27)..(1127)
gaggccgcagcagtcgccgcgcgaacatggcggccgaaatccactccaggccgcagagcagccgcccggtgctgctgagcaagatcgaggggcaccaggacgccgtcacggccgcgctgctcatccccaaggaggacggcgtgatcacggccagccaggataatggagctgtaatggaatttcacgtttctgaagattttaataaaatgaactttatcaagacctacccagctcatcagaaccgggtgtctgcgattatcttcagcttggccacagagtgggtgatcagtaccggccacgacaagtgtgtgagctggatgtgcacgcggagcgggaacatgctcgggaggcacttcttcacgtcctgggcttcgtgtctgcaatatgactttgacactcagtatgctttcgttggtgattattctgggcagatcaccctgctgaagcttgaacagaacacgtgttcagtcatcacaaccctcaaaggacatgaaggtagtgtcgcctgcctctggtgggaccctattcagcggttactcttctcaggagcatctgacaacagcatcatcatgtgggacatcggaggaaggaaaggccggacgctgttacttcagggccatcatgacaaggtgcagtcgctgtgctaccttcagctcaccaggcagctcgtctcctgttcctcggacggcggaattgcagtgtggaacatggatgttagcagagaagaggctcctcagtggttggaaagtgattcttgtcagaaatgtgagcagccatttttctggaacataaagcagatgtgggacaccaagacgctggggctaagacaacatcactgcaggaaatgcgggcaggctgtctgcgggaagtgcagcagcaagcgctcaagttacccagtcatgggcttcgagttccaagtccgggtttgtgattcttgttacgactccatcaaagatgaagatcggacttctctagcgacctttcatgaaggaaaacataacatttcccacatgtccatggacattgccaggggactgatggtgacctgtgggaccgaccgcattgtaaagatctgggacatgacacctgtggtgggctgcagtctggcgactgggttttctccgcactgatctgagagctgggcggcgtccacacctaagaacagcagctccaccaaatgaagtccctctcacgcagctccacagcgctgtctcgtgaatggacagtagccacttacaaacaaatcaacatttttaaaaagaaaatgtaaaggtgtgttttggggcatttgtgggacttacccatggggactaatatggaaaaggtctgtccatagtggttccctgaagactggaattacttcagcaaaacttccccatgaacagctaatgtgtagtgaaagaatgagctagcaaatgagttttagcggggacaaaaaatcaaacaaaaaagtgaatgcttagaaccttctcaaagcagtcacaagtacagacacttcacttagcctagggggccttccagggttcttgtggctgttgtcagagcaggagctgggggagggaagacttgttctctcttccttgaggggtggcattaggaacttacgaaaccagagacctttccctatgacttggcagtatgtgaatatcctctacacttagttattgataaacttcttaaagagatctgttattttcaggtagtgccataatctgcacttagcattggcttgcttcagttgtttctcttcccagccagtatgccacaggtgaactttcggggttgtcattaagtaagttgtgaaatttctgtaataacaaaggcagtccgcattcttccctttcccccaaattcctagggcaaaacttttttatggtgctgttaacatgggagtcacacaagccgcctgactttttctcattgccattagtaatgactgatggaaaacccagccaccactgtgatgcgaaatgatcagtctgttgcctgaaacagcccagtcctcttaactgaaacagcattctacttcttgttccaagatgagcctctgcaatattctggcaatttaatataccccctacaaaagcactccacagcttttacactattttgactttgagttataactagtattattcatgttttcataaaaagaagttagtgacccagagctataatcatccatcaagtcttccacaataattcccaactcataaattgctttcctaacaactagcaaaagctattgttcataatggcatttctaaagcttttgggcactgtgtaccaggatgaggaagagaagaaatgaggagcctgtcttttaatattccagtatttgtgtgtttgattttttttgacaacagtacatatatctatttctctagggatatggaagtaagtggagaagggcctacctttttaaaggacaaatataaaaatagcaacagtatctttgctaatcttactaatagatat

SEQ ID NO: 17777 - protein, 367 aa, Homo sapiens
MAAEIHSRPQSSRPVLLSKIEGHQDAVTAALLIPKEDGVITASQDNGAVMEFHVSEDFNKMNFIKTYPAHQNRVSAIIFSLATEWVISTGHDKCVSWMCTRSGNMLGRHFFTSWASCLQYDFDTQYAFVGDYSGQITLLKLEQNTCSVITTLKGHEGSVACLWWDPIQRLLFSGASDNSIIMWDIGGRKGRTLLLQGHHDKVQSLCYLQLTRQLVSCSSDGGIAVWNMDVSREEAPQWLESDSCQKCEQPFFWNIKQMWDTKTLGLRQHHCRKCGQAVCGKCSSKRSSYPVMGFEFQVRVCDSCYDSIKDEDRTSLATFHEGKHNISHMSMDIARGLMVTCGTDRIVKIWDMTPVVGCSLATGFSPH

SEQ ID NO: 17778 - DNA, 1851 bp, Homo sapiens
  CDS (164)..(937)
gcggaagctcggcagtgcgcgtgcgcccgcacccgcactccaaattagaaaggggacgtctagtgggttgcccgggaggggtggcgggagcggtcctggaaataatctgtcctctgtcgccgggaactggcgaggtagttccttcgcggtggagagacctggaatggccaaatatcaaggtgaagttcatagtttgaaactggatgatgattcagttatagaaggagtaagcgaccaagtacttgtggcagttgtggtcagtttcgctttgattgctaccctggtatatgcacttttcagaaatgtacatcaaaacattcacccagaaaaccaggagctagtaagggtacttcgagaacagcttcaaacagaacaggatgcacctgctgccactcgacagcagttctacactgacatgtactgtcccatctgcctgcaccaagcctccttcccggtggagaccaactgtggacatcttttttgtggtgcctgcattattgcttactggcgatatggttcatggcttggggcaatcagttgtccaatctgtagacaaacggtaaccttactcctaacagtatttggtgaagatgatcagtctcaggatgttctgagattgcatcaggatattaatgattataaccggagattctcagggcaacccagatctattatggagagaattatggatctacccactttactgaggcatgcattcagggaaatgttttcagtcgggggccttttctggatgtttcgcatcaggataatactttgtttaatgggagcttttttctatcttatatcacctctagattttgtacctgaagccttgtttggaattctaggctttctagatgatttctttgtcatctttttattgcttatctacatctctattatgtatcgagaagtgataacccaaaggctaactagatgaaaaagaaaacaaaactgagtttactaggatatctgagctaatgtagaacatcaaacagaaggacccatggcagtataaagcaatgaagcaatggagtattatctcacaaatataaaaccactataagacaaacatttgattatcatttgacaaatacctaggtataactggaattttcatgtttgaagttctaatattaagtttagaattataatgatctacagttgtatcttgattctatgttgtctggaaaaaatatggaattatataaaaagggatgcttttatatatttttcttttccccagaattacttagattaattagatgtatagtaaaatattgttaaatgtcagtttatccatcttatccttctcagcaggtacctatatgataatatatagctgtgaaactcatctaaatatttttgttccaataaaatattatatactattggggaaaattcagtatttcttttagtgctagctaagttttgtgcatttggagcagttctgccttttcattctggtataattaattatttgctatcagctgaaactgaaagaagaaacttgaacttcatacttcgatatcatattctagtttacagaacacattttaatcaatagaagaattaagatgaaaaacatggccgggcggggtggctcacgcctgtaatcctagcactttgggaggctgaggcgggtagatcacaaggtcaggagatcaggaccatcctggctaacatggtgaaaccccgtctctactaaaaatacaaaaaattagccaggcgtggtggcaggcgcctgtagtcccagctactcgggaggctgaggcagaagaatggcgtaaacccaggaggtggattgcgccactgcactccagcctgggcaacagagtgagactccctctc

SEQ ID NO: 17779 - protein, 258 aa, Homo sapiens
MAKYQGEVHSLKLDDDSVIEGVSDQVLVAVVVSFALIATLVYALFRNVHQNIHPENQELVRVLREQLQTEQDAPAATRQQFYTDMYCPICLHQASFPVETNCGHLFCGACIIAYWRYGSWLGAISCPICRQTVTLLLTVFGEDDQSQDVLRLHQDINDYNRRFSGQPRSIMERIMDLPTLLRHAFREMFSVGGLFWMFRIRIILCLMGAFFYLISPLDFVPEALFGILGFLDDFFVIFLLLIYISIMYREVITQRLTR

SEQ ID NO: 17780 - DNA, 2187 bp, Homo sapiens
cagctggagctttgccgcatctgcgttgctgtgcccgcgctcttcgggcgaggaagtcccttctggtggagggagaaaagggttacatgagttagattaccatggcagctcgagccaggctctccacttccgtgagccttcctctaagtgagatcgggggggagataatgaaggccacaactcccaggaggctccacgccgggcggtcagggacgctcgcgaggacgcatgggcccccaggaatgggaactggttagatcccaggaactccgtgccggagacgggaagagaggatgcctagggccctaaatggaaaggccagagctggagacctagcacccagaagatgagaccgcaattcgagaatcaaagggccgggagcgatggtgagcgcctgtaatcccagcactttgggaggttgaagcgggaggatcctttgaggccaggagttccaggctgcagtgagccgtgatcgcaccactgcactccagcctgggcgacagagcgcacaggtgccagcaaggagcacaaataccagcatgcctggtcttccaagaattcggggaacccaggagctttggcctggagtgggatctagactacagatcccagcatgccctgtgagacacacacacacacacacacacacacgcctggagtgggatctagactacagatcccagcatgccctgtgacacacacacacacacacacacacacacgcctggagtgggatctagactacagatcccagcatgccctgtgactgacacacacacacacacacacacacacacacacacgcctggagtgggatctagactacagatcccagcatgccctgtgactctctcacacacacacacacacacacacgcctggagtgggatctagactacagatcccagcatgccctgtgactcacacacacacacacacacacacacacacacacacacacacacgcctggagtgggatctagactacagatcccagcatgccctgtgactcacacacacacacacacacacacacacacacgcctggagtgggatctagactacagatcccagcatgccctgtgactcacacacacacacacacacacacacacacacacacacacacacgcctggagtgggatctagactacagatcccagcatgccctgtgactcacacacacacacacacacacacacacacacgcctggagtgggatctagactacagatcccagcatgccctgtgactcacacacacacacacacacacacaccaggcgggggaagagctggggagtgggggcggggaagtcttgtgactacaaatcccagaatgctctggagctaggaaggaacaggacggctttggggaggggtcgtgggactccagatccgggcgtgccttgggacaaggcagggacagaccggcggggggcggcctggtacttcaggtcctggcacgctggggactggcgctcaccttaaaggagtccacaaactcgtcactcatcctccggagctcgcggccatagcgctgtgctgcccagaggttggggggcgccgagcgcgagcggccccgaaaggggctgggctcctcccccatcccttcgtcgtcctccgtccccgcggggtaggagctgtggcgactccggatctccacagccccagcgcctgcagagggtcagtgggtaggggggcgacgttaatctcagctcctctaagcccctggccctgcctgaaccctccccatcagctctgcaggcccactcgtgggtcttccaggggcgcatcacagcccacctctcagagccccagtcccttgtatgtgaatcgaggggaagctcaggggcctttggtgaagatttaggttaacttctcattaatcccacgaatccttaccgagtgccaataatgggtgaggccctgtgcctagcacaaaataagggcataagaaatactagttacatcacaaggtcaggagatcgagaccatcctggccaacatggtgaaaccctgtctctactcaaaacacaaaagttagctgggcatagtggcacgtgcctatggtcccagttactcgggaggctgaggcagaagaatcgtttggacccgggagggagaggtcgcagtgagccgagatcacgccactgcactccagcctgggcgacaggctttttttctc

SEQ ID NO: 17781 - DNA, 2484 bp, Homo sapiens
  CDS (335)..(2185)
tttttctggcagaaggcggggttctcctcgtacgctgcggagtctctgcggggtgtagaccggaatcctgctgacgggcagagtggatcagggagggagggtcgagacacggtggctgcaggtctgagacaaggctgctccgaggtagtagctctcttgcctggaggtggccattcattcctggagtgctgctgaggagcgagggcccatctggggtctctggaagtcggtgcccaggcctgaaggatagccccccttgcgcttccctgggctgcggccggccttctcagaacgaagggcgtccttccaccccgcggcgcaggtgaccgctgccatggcttttccccatcggccggacgcccctgagctgcctgacttctccatgctgaagaggctggctcgagaccagctcatctatctgctggagcagcttcctggaaaaaaggatttattcattgaggcagatctcatgagccctttggatcgaattgccaatgtctccatcctgaagcaacacgaagtagacaagctatacaaggtggagaacaagccagccctcagctccaatgaacaattgtgcttcttggtcagaccccgcatcaagaatatgcgatacattgccagtcttgtcaatgctgacaaattggctggccgaactcgcaaatacaaagtgatcttcagccctcaaaagttctatgcgtgtgagatggtgcttgaggaagagggaatctatggagatgtgagctgtgatgaatgggccttctctttgctgcctcttgatgtggatctgctgagcatggaactaccagaatttttcagggattactttctggaaggagatcagcgttggatcaacactgtagctcaggccttacaccttctcagcactctctatggaccctttccaaactgctatggaattggcaggtgcgccaagatggcatatgaattgtggaggaacctggaggaggaggaggatggcgaaaccaagggccgaaggccagagattggacatatctttctcttggacagagatgtggactttgtgacagcactttgctcccaagtggtttatgagggcctagtagatgacaccttccgcatcaagtgtgggagtgtcgactttggcccagaagtcacatcctctgacaagagcctgaaggtgctactcaatgccgaggacaaggtgtttaatgagattcggaacgagtacttctccaatgtctttggcttcttgagccagaaggcccggaacttgcaggcccagtatgatcgccggagaggcatggacattaagcagatgaagaatttcgtgtcccaggagctcaagggcctgaaacaggagcaccgcctgctgagtctccatattggggcctgtgaatccatcatgaagaagaaaaccaagcaggatttccaggagctaatcaagactgagcatgcactgctagaggggttcaacatccgggagagcaccagctacattgaggaacacatagaccggcaggtgtcgcctatagaaagcctgcgcctcatgtgccttttgtccatcactgagaatggtttgatccccaaggattaccgatctctgaaaacacagtatctgcagagctatggccctgagcacctgctaaccttctccaatctgcgaagagctgggctcctaacggagcaggcccccggggacaccctcacagccgtggagagtaaagtgagcaagctggtgaccgacgaggctgcaggaaagattactgatgccttcagttctctggccaagaggagcaattttcgtgccatcagcaaaaagctgaatttgatcccacgtgtggacggcgagtatgatctgaaagtgccccgagacatggcttacgtcttcagtggtgcttatgtgcccctgagctgccgaatcattgagcaggtgctagagcggcgaagctggcagggccttgatgaggtggtacggctgctcaactgcagtgactttgcattcacagatatgactaaggaagacaaggcttccagtgagtccctgcgcctcatcttggtggtgttcttgggtggttgtacattctctgagatctcagccctccggttcctgggcagagagaaaggctacaggttcattttcctgacgacagcagtcacaaacagcgctcgccttatggaggccatgagtgaggtgaaagcctgatgtttttcccggccagtgttgacatcttccctgaacacattcctcagtgagatgcaggcatctggcacccagctgctataaccaagtgtccaccaactacctgctaagagccgggagcatggaacgtgttgggatttagagaacattatctgagaaaagagttcacttcctgctcccaggatatttctcttttctgtttatgaagtacaacccatgctgctaagatgcgagcaggaagaggcatcctttgctaaatcctgtttgaatgtcattgtaaataaagcctctgctctcag

SEQ ID NO: 17782 - protein, 617 aa, Homo sapiens [sequence omitted]

SEQ ID NO: 17783 - DNA, 973 bp, Homo sapiens
  CDS (182)..(973)
agaagcatcgaaagcgttggagaggtgttaccggaacggcggcgacaagggtgttcccgaactagagtggggcatacataatcttgctgctatgcttcgaagctgtagtctgaatcaacctaagttttaaacagaaggtgaacctctgagatagaaaatcaagtatattttaaaagaagggatgtgggatcaaggaggacagccttggcagcagtggcccttgaaccagcaacaatggatgcagtcattccagcaccaacaggatccaagccagattgatagggctgcattggcccaagcttggattgcccaaagagaagcttcaggacagcaaagcatggtagaacaaccaccaggaatgatgccaaatggacaagatatgtctacaatggaatctggtccaaacaatcatgggaatttccaaggggattcaaacttcaacagaatgtggcaaccagaatggggaatgcatcagcaacccccacacccccctccagatcagccatggatgccaccaacaccaggcccaatggacattgttccaccttctgaagacagcaacagtcaggacagtggggaatttgcccctgacaacaggcatatatttaaccagaacaatcacaactttggtggaccacccgataattttgcagtggggccagtgaaccagtttgactatcagcatggggctgcttttggtccaccgcaaggtggatttcatcctccttattggcaaccaggacctccaggacctccagcacctccccagaatcgaagagaaaggccatcatcattcagggatcgtcagcgttcacctattgcacttcctgtgaagcaggagcctccacaaattgacgcagtaaaacgcaggactcttcccgcttggattcgcgaaggtcttgaaaaaatggaacgtgaaaagcagaagaaattggagaaagaaagaatggaacaacaacgttcacaattgtcc

SEQ ID NO: 17784 - protein, 264 aa, Homo sapiens
MWDQGGQPWQQWPLNQQQWMQSFQHQQDPSQIDRAALAQAWIAQREASGQQSMVEQPPGMMPNGQDMSTMESGPNNHGNFQGDSNFNRMWQPEWGMHQQPPHPPPDQPWMPPTPGPMDIVPPSEDSNSQDSGEFAPDNRHIFNQNNHNFGGPPDNFAVGPVNQFDYQHGAAFGPPQGGFHPPYWQPGPPGPPAPPQNRRERPSSFRDRQRSPIALPVKQEPPQIDAVKRRTLPAWIREGLEKMEREKQKKLEKERMEQQRSQLS

SEQ ID NO: 17785 - DNA, 2348 bp, Homo sapiens
  CDS (247)..(561)
aagcctcagtatgtgagagaggcagagagcctccctctgtgactcaccattctattggagatccaagcaacccaggcctagggatagcactttgtttctcccaagcccttgaggtaatttggggagagtcttggagatgctgtgagggaaagacaccgggaaaagctgcaggcattttcccagaactgggaccaagaacatcatgccagttttaatctgggtgcatataaagtcagtcattctttgatgacccagaagtgtggctctgcaggcattttattctcaagccaaagactagagggcttgctcttgaggagagtagggacctccaaagccataattgtggaaagcaccttagcagtatggctggaattgcacactctccctaattgcaagcctgggacaggaggagagctgctacagctgtggtttcttctggctgaggagacttgcagccggggccagcttgacaacctggcactgttctgcatgtgtcattgctgggtgccccagcctgctcccctgaaattgtggtgcaggggggcctctctgatccactcctaggcagaactccaggaatttagagtacatactttcctggaccagaagcctcagtcaccccaccctttctgtgaagagatcggggtaaagcaggccctctccactctatgcctaggcagaactcatgacattcagagcacctgctcacccagcaccagtcaccccacccttcctgtgcagacattggcatgtagggggcacctctcagctgcacacccaggcagatctccaggcagtaggagcacctgctctcctggttcagcagcctgagtcacccacccttcctgcacaacgaatatggtgcagcagggccctctccagtccacatgctggtagatctccagtcatttggagcacctgcttgcccagattggcatcctgactcactccagccttcttgtgcagtgatcagcatgcaaggagcccttctcaattgcacactcaggcagatctctgtatagtaggagcacccacttgcctggtccagcagcctaagtcacccctacttcctgcacaaagatcatggtgcagtagggccctctctgcgccacatccaggcagatctccaggcagtcagagcactgaataaccttgattagcagcctgggctgcaccacccttcctgtgtagagattgtggtgcagtgggtccctcgacaatccctgcccaggctgatctttaggcttctggagcacccactttcctagattaggagtttaggttgtacctccttcctgtgtggtgaacttggggccaaggagctttcccagctccatgccaaggcacacttctgggtgcttggtggctatgcactgaattctccctcagaactggtgtttgtgcctgccatcaagggacttgtaggtgggcctgcccagtctgtcctcagccatcttttcccctaccttcctggggctgagcagggagctcacactactgtgtactccacagttcagtccattgcctgaggcaacagagagcctctcctggtaaaccaagatcaagtatatacccagccacattgactgcagccagctgttacctgtaagaatcatctactggcttgtaggtcaaactgcacagctcaatataaaatctgctgaaagaaacacatagggctatagaagtgaaggcaaaagaccttgaccaacattttctacattcatatcccccagggagaggggaaaagggaaaaggaaagaagaaaaccctccacaataatataggaaagaaagaaaaagaaaatatcctacccacaagaaaataattacaacaattagaaatgccagcatctccagatgagaagaaatcagcataaaaattctggcactatgaaatatatgaatatagttacaagaccaaaggattacactagctctccagcaatggtccctaaccaaaatagaaacttagaaatgacaaataaaaaattcaaaacatggattgcaaagaagctcaatgagacccgagacctgattgaaaatctacacaaagaaacttctaaatgaatccaggaaattaaggaagcaataaacaccttaaaaagaaaccaaccagagcttctggaattgaaaaacttgcataagaaattttaaagcaaaattaatagctttatcaatagactagagcaagcagaagaaaaaatttcactccttaaagactggtcttttgaactaaccaagtcagacaaaaataaaaagaaagaattaggaaaaatgaaaaacgtcttgagaaatgtgggattatgtaaagcaacaaaacctacaaattattgacattcctgagag

SEQ ID NO: 17786 - protein, 105 aa, Homo sapiens
MTQKCGSAGILFSSQRLEGLLLRRVGTSKAIIVESTLAVWLELHTLPNCKPGTGGELLQLWFLLAEETCSRGQLDNLALFCMCHCWVPQPAPLKLWCRGASLIHS

SEQ ID NO: 17787 - DNA, 2313 bp, Homo sapiens
  CDS (155)..(1513)
attcttccggtttcagaagttaaggctggtgtcctggccccagtccacctctgggagcgcctgcgccgctccgcggagagtccgtggatctcacaggttcccagttttccagacctgaagtgttttccagtcaaagcgaagagacgatctgtggatgttgaatatgcaaggagctgaagagagagacattagaagagagacttgtccaggctgggtaaacaagaacaagcctgctctggagcaggatgtctgtaaaattgactcatcagggatagtagtaaagaggttccaagaggatgaataccaagattctacatttgaagaaaaatatgcatgtgagggcatgaaggaaaactctcctagggagattgctgaatcatgccttttccaggaaggaggttttgggagaataactttcatccacaaagaagcaccccctgaaattattagtcaaggatataattttgagaaaagcttgcttttgacctcaagccttgttacacgtctcagggtttctacagaagagagtctgcatcagtgggaaacaagtaatatacaaaccaatgatatttcagaccaaagtaaatgtccaactctctgcacacagaaaaaatcttggaaatgtaatgaatgtggaaaaacctttactcagagctcatcccttacccaacatcagagaactcatactggagagagaccctacacatgtgaggaatgtgggaaagcctttagtcgtagttcattccttgttcaacatcaaagaattcacactggagtgaaaccatatggatgtgagcagtgtggaaaacatttcgatgtcgatcatttcttactcagcatcaaagaattcacactggagagaaaccttataaatgcaatgaatgtgggaattccttccgcaatcactcacatctcactgaacaccagagaattcacactggagagaaaccttataaatgcaataggtgtgggaaggcattcaatcagaatacacaccttattcatcatcagagaattcacactggtgagaagccttacatatgcagtgaatgtggctcttcttttcgaaaacactcaaatcttacgcaacatcagagaattcacactggggaaaaaccccataaatgtgacgaatgtgggaaaactttccaaacaaaggcaaacctctctcagcatcagagaattcatagtggagagaaaccctataaatgtaaagaatgtggcaaagccttttgtcagagcccatctcttatcaaacaccagcgaattcatactggagaaaaaccatataagtgtaaagaatgtggcaaagcgtttactcagagcaccccactcactaaacatcagagaatacatacaggggagagaccctacaaatgcagtgaatgtggtaaagccttcattcagagcatttgccttattcggcaccagagaagtcacactggagaaaaaccctataaatgcaatgaatgtggaaagggctttaatcagaacacctgcctcactcagcatatgagaattcatactggagagaagccctataaatgtaaagaatgtgggaaagcctttgctcatagctcatctcttactgaacatcatagaactcacactggtgagaagctctataaatgtagtgagtgtgagaaaaccttccgcaagtatgcacaccttagtgaacattacagaactcacactggtgagaagccttatgagtgtattgagtgtggaaagttcttcagacatagttcagtccttttcagacatcagaaacttcacagtggtgactaatgctgccatttaggttatgacagtttctctagcgaggatgactacgaatctgactgggagtagaggggcaggtagagttcctggagggaaggatgaaggagccttagctactgtactctgagaggaatgtttccagaaatggaggtgggagcttagggaatgcagagcctacttgaggtgggcatctgggaatacagggtagaaagaaattcctgcttttcagataaagcctacacattgccactgtctccccatgtgactcttacagcttgaggaggcatttgttagcacttctgttcactttactacatcctgccccacattctgacttgtcacccattttcgttggctggcaggttgagatgtttttcttaaacactgcctgtcagtgtgaagtggcacagctctgatgtagtgctaagtctagcctccagatttgaggcagccctgaccatgctaccatgggggaggctcccaacctgtggaagtggtcctgtgaaaaggagacagaaacaagtaagagcc

SEQ ID NO: 17788 - protein, 453 aa, Homo sapiens
MLNMQGAEERDIRRETCPGWVNKNKPALEQDVCKIDSSGIVVKRFQEDEYQDSTFEEKYACEGMKENSPREIAESCLFQEGGFGRITFIHKEAPPEIISQGYNFEKSLLLTSSLVTRLRVSTEESLHQWETSNIQTNDISDQSKCPTLCTQKKSWKCNECGKTFTQSSSLTQHQRTHTGERPYTCEECGKAFSRSSFLVQHQRIHTGVKPYGCEQCGKHFDVDHFLLSIKEFTLERNLINAMNVGIPSAITHISLNTREFTLERNLINAIGVGRHSIRIHTLFIIREFTLVRSLTYAVNVALLFENTQILRNIREFTLGKNPINVTNVGKLSKQRQTSLSIREFIVERNPINVKNVAKPFVRAHLLSNTSEFILEKNHISVKNVAKRLLRAPHSLNIREYIQGRDPTNAVNVVKPSFRAFALFGTREVTLEKNPINAMNVERALIRTPASLSI

SEQ ID NO: 17789 - DNA, 1088 bp, Homo sapiens
ccgagtgccccttctcagggctcagtctgaccgtagccacgtcctgcctcgcgccgcccctcgggcctgacctggaagctccgtcagctccgtccttgtccttagagctgagcccagaccccggggtctggccgaatcctcacccccagggcagtgtttttggtctgccaccttcaggaaaacggctgcggcctcggcctcccttcgggcacccaggaatgcgggggtctgctcagtccccccaccctccatgctccaacccccgggggctgcggagcctgctgccccctccccgcgggtggggacgttctatgcaatacagggttccactttagaagtgcgcgcggctagggtcaccgcccgcccttcccggcgcagcccccgagctccacagctgaggcagcccctctggcttctaaatccgcggtcgggattcttcctcctgtttagttttttagtttttccttaaaaaaaaacaacacatcgatggactttgcttccctgttcttgaagaatacttgaatgtcggggggcctgggggtgggggcctcggagaccgtctgccaggccctgctgcccctcctgaatctcgtatgatggtcacagtccggtggccgtgggggtgctctgccttccctggtccccactgcccatatctgtggactgccccttccaaagacccctggggggggtggggcattccgcccacccctttcccccatcacttctcgcctgtcagtgattccatgtttcgtaacgggggattctctgcctttttgtatcaaagaacaagcaaatggacccccgcccgctgcaggcgcccatagccatcgggtctctaaagctgagtggctagcagcgtttgtttgtttgttttttttttttttctgaaggtgggacagtcacttcctcctccctccccacccctgtcgcatccacgtgcgacctggaggactggtcagaaccgttactgtgaatgagtgaagatcctggaggaccctgggccccaggccagctcccatcgctgggggacggtgaacggccatgtgttaatgttacgatgtttttaaaagacaaaaaaaaaaaag

SEQ ID NO: 17790 - DNA, 1563 bp, Homo sapiens
  CDS (187)..(1473)
agttggtgagcatcatggcaaccgttacagccacaaccaaagtcccggagatccgtgatgtaacaaggattgagcgaatcggtgcccactcccacatccggggactggggctggacgatgccttggagcctcggcagcttcctgatgtggtagaaatgccatggtagccccacaggaaatcacctcatgtgcgcctcccacccacaggcttcgcaaggcatggtgggtcagctggcggcacggcgggcggctggcgtggtgctggagatgatccgggaagggaagattgccggtcgggcagtccttattgctggccagccgggcacggggaagacggccatcgccatgggcatggcgcaggccctgggccctgacacgccattcacagccatcgccggcagtgaaatcttctccctggagatgagcaagaccgaggcgctgacgcaggccttccggcggtccatcggcgttcgcatcaaggaggagacggagatcatcgaaggggaggtggtggagatccagattgatcgaccagcaacagggacgggctccaaggtgggcaaactgaccctcaagaccacagagatggagaccatctacgacctgggcaccaagatgattgagtccctgaccaaggacaaggtccaggccggggacgtgatcaccatcgacaaggcgacgggcaagatctccaagctgggccgctccttcacacgcgcccgcgactacgacgctatgggctcccagaccaagttcgtgcagtgcccagatggggagctccagaaacgcaaggaggtggtgcacaccgtgtccctgcacgagatcgacgtcatcaactctcgcacccagggcttcctggcgctcttctcaggtgacacaggggagatcaagtcagaagtccgtgagcagatcaatgccaaggtggctgagtggcgcgaggagggcaaggcggagatcatccctggagtgctgttcatcgacgaggtccacatgctggacatcgagagcttctccttcctcaaccgggccctggagagtgacatggcgcctgtcctgatcatggccaccaaccgtggcatcacgcgaatccggggcaccagctaccagagccctcacggcatccccatagacctgctggaccggctgcttatcgtctccaccaccccctacagcgagaaagacacgaagcagatcctccgcatccggtgcgaggaagaagatgtggagatgagtgaggacgcctacacggtgctgacccgcatcgggctggagacgtcactgcgctacgccatccagctcatcacagctgccagcttggtgtgccggaaacgcaagggtacagaagtgcaggtggatgacatcaagcgggtctactcactcttcctggacgagtcccgctccacgcagtacatgaaggagtaccaggacgccttcctcttcaacgaactcaaaggcgagaccatggacacctcctgagttggatgtcatcccccgaccccaccctgttttccaccagagttctgacactgtgactctgtataaaatggttgggaagctgcaccc

SEQ ID NO: 17791 - protein, 429 aa, Homo sapiens
MCASHPQASQGMVGQLAARRAAGVVLEMIREGKIAGRAVLIAGQPGTGKTAIAMGMAQALGPDTPFTAIAGSEIFSLEMSKTEALTQAFRRSIGVRIKEETEIIEGEVVEIQIDRPATGTGSKVGKLTLKTTEMETIYDLGTKMIESLTKDKVQAGDVITIDKATGKISKLGRSFTRARDYDAMGSQTKFVQCPDGELQKRKEVVHTVSLHEIDVINSRTQGFLALFSGDTGEIKSEVREQINAKVAEWREEGKAEIIPGVLFIDEVHMLDIESFSFLNRALESDMAPVLIMATNRGITRIRGTSYQSPHGIPIDLLDRLLIVSTTPYSEKDTKQILRIRCEEEDVEMSEDAYTVLTRIGLETSLRYAIQLITAASLVCRKRKGTEVQVDDIKRVYSLFLDESRSTQYMKEYQDAFLFNELKGETMDTS

SEQ ID NO: 17792 - DNA, 1892 bp, Homo sapiens
  CDS (128)..(700)
gcaccgggaaaataacaatcgtatttcaggttgaaagctcctattactgctgggttttggaggctgcgataaaatcttcatcgacgtgaaggtaccttctgggttggcttgggtcgtaagtcctaagatgggggccgtccttccctgggggcagggacgtagggaaccaggcggtggggagggagaaaggagcgacgaggtcagaggaaaccttgggtttccaaggctcctggggcaccaaagggcttcccgcagtcggggaattgagccctggggaggagccttttgcgagaacgtgagcgcgccccaacacgcctcagacctcgtaaacccacttggcaaagaccggggaagcggctggcggaccgactgcggtgaactcaagaaattaacctgcgctgcaactaaacgggctgccgccctttcacactcacctcgagcgaccgagatagagaaagctcccgaaccggccgcggggggacttggctccaccctcccgtcccgggagaagaggacaaaaaggggagatggacttggaatggccccgcccttcacagcgctccaatccttggaaaccaaacctcctctccaagcctccacgtctagaagggacaaaggcagcgaggagatccagagaccgacggggagatggtggctttcaggcttctggtgtgggtgcatgggggaaaggtacaatggttaactttccatcaaaaatacggcaccacacgatggtcttgagaagacacactcggtcttctggtttagaagcaaattgacttcctgaagctgtgaagcgaactatcgcaaaactctcttgcttcttgaatgtgggggcgatacaaattcaattaatgatgccatacacgtaatcttttcgactttttagaagtcacaaacgctttaactctccagtgaaaataattgaaagaggttaaacataaggggaatgggctttttttttttcttgtttttatttgggacaatttttcaaatgataaaactgtataaatacaagctgggtcagtcaaggaaagcgctgtggctgaagattttcgtaaaaaccttagtaaacgtggcatttaagtaactaattatgctttgccattagcagaccattaagataaacaggagaaagttcacactcctgctatttcgttccctaagaatagtcacaaagataataccaggctagttggtgggttatcttctccattaggagggttaatgtttaaatttgttaattaaaatacaaaaaatttggtttcctacacagccaacgttgtgagggaagtctcacggggacatcctgactccttgaaatttaccttttgttactttatcctgtggcattatcccctggagtcatatagggtttcaagactgttaatgttgcagggaatgtgagtgaatatgttagaagtctggactttcttctcccttatcataggtgactggcatacacactcctcataaagagaagttatggctcatcaaaagagtgactttatgagcattaatagaataataaatcttgcacttttagttcaagaaacagtgaagtcctataatcagagtgacccacgcaaatatgatccattcacttgcccaactctgacaggatacggatagtctataaatcattttagtttttaaaaccttaaaaaaggaaggcacccaaatctcccaaaggaaggtgtttatggggggaaagggacttctagcaaacctgcaggaagagatcatggaaaaacgaacagtcggtccagaagctgaattagatagactttccaccgaaacaagaatggatagatgttccaatgtcattgtttcagtatttatgttctatcatttaaaaagagaaaagtcttcctgcttcctgaaagctatac

SEQ ID NO: 17793 - protein, 191 aa, Homo sapiens [sequence omitted]

SEQ ID NO: 17794 - DNA, 1945 bp, Homo sapiens
gattttaatgataatgttttgtggtgggttaaagacctcctaacaacagggggtttttatacaacaacaagaagtttttaaataattgagtttttaaagtggaaagcagcagtaaattaaactagaaggatatattttatacctagaaataaataaagctcaacttgttttgtaagcctgttttaaaaatatttaatcatttaatttgtgcaagtatagagttctcctatggcaaaactataccatcatcttctccaattgtgcatggcagctgtactaagttctgcaaaaacaagacatatggatgtgtttcataccttctcagaattggtatatcaagacacatttaaatataagccctctggaaatggatttatatacagtcaacataaatacccccttagaaattggtaatattttatagccaggtttaggtttagtgtcaagtatagtgattgctggtctatcactactcatgaagtggaaccccctctactcataaaaaccccaatcaaacatatagatgaatagaaccttgataacattagaatgccttgttctctgaaggcttagaagacaatacgtcaggaaatatgaaggagaagctgaggaacgaaagaaacttcgacaagagaatggaaatgtacatgctatagcataactgaagataaaattacaggtttgagttttaaaatatatctttagatcatatcctataattttgaaaaatttaacactatataatctcaagaaaaatatggaatgtgttcttaattatatatacactatgaacaatggctatgttaaagtattattctttgagtataagatggaattcaatgttgagaatagactacgtgtttaataagtattattagggatataaatataagagacactggtccagttctcaaagaagttattgtttagtagataggaaaaaaaatgtaagaaaccagaatactagggatgtaaaataaatgtcatgagaaaggaaccaatggagtatgagaagtttccagtgaaaaacagaaagaatccagtagaatttatttagggaagaggaaaagatgtgttcggggtggccttggaagtgaacgttgaaggactagtgagattggttcaagaaactgtgaagggaaagaaagggttatactgagaaatggaagagataattttagaaacttgtgaaaaatggcttaatctaaatgagtgttaggggagatacagttgtgatgataggttgagctcacatggtggagagccacagttgcgggtgcttgcactgataatgtgagggcatggagacagacaataggttgaatgctctttttttacaaaaggaagtagaaagggagggggatgtaaatttgataaataggttggtgaaaacttatattttcttgtaaagagagagaactgagcatgttgtaggtataaggtaaaaaggcgtgaagaggaatatttcgttgataatgaaagtgagcagctagggaagaaaactcccagaggaagagggaggcaaggaaatcaagaacacacttaaagtttgtcagaagaaggaactttatttccttaaacattcaagaaagatgatgtcatttcagttattgattgtctaacttcagtaggtttaagagttacttgagggctgggcacagtggctcaggcctgtaatcccagcactttgggaggctgaggtgggcggatcacctgaggtcaggagtgcaagaccagcctggccaacatggtgaaaccttttctaaatatacaaaattttctaaaaatacaaaaaattagctgggtgtggtggtgaatgtctatagtcccagctacttgagaggctgaggcagtagaattgcttgaactgcaaggcagaggttgcagtaagccaagatcgcgccattgcactccaacctgggcaacaagagcgaaactccatctt

SEQ ID NO: 17795 - DNA, 1817 bp, Homo sapiens
  CDS (439)..(894)
agcataacctgtttgtgaaactgcaaaaaggttgacatggctgaagcagaagatgggttggtactgaatggttgggagagatatgtagcggctgaccctgaaggacgttgcagcccatgctatggagacctgattttattttgtaagaggtgggcaacccctgaagcattttagtgatgcgaacagatgtgtctgttaccaagcaaagccagttaaagaaggtcacagaggaggaatgatcacaaagagtctgagaagccaactggggccaaacaagttttagaacctctactggctgatgccaacatcatcagagatgaactgttcttaccagaaacttctctgctcctgacaccccacctctccccagaagagaagaaggagagtggccacgttgattcagccaagcacctccaggaggtcccctctggatgtcccatgaggctgcccctcagccacagcccagagcacgtggagatggctttgctcagcaacatcctagcggcctattcctttgtctcagaaaatcctgagcgagcagctctgtactttgtttctggcgtgtgcatcgggctggtgctgaccctggctgctctggtgataaggatctcttgccacacagactgcaggcggcgtcccgggaagaagttcctgcaggacagagagagcagcagcgacagcagcgacagcgaggatggcagtgaggacaccgtgtccgatctctccgtgcggagacaccgccgcttcgagaggactttgaacaagaatgtgttcacctctgcggaggagctggagcgcgcccagcggctggaggagcgcgagcgcatcatcagggagatctggatgaatggccagcctgaggtgcccgggaccaggagcctgaatcgctactattagggagcagcaggaccccggaaaccactggaggccgcctggaaaggagagcgtctgcagggacagtgggcacaaggaactgaacccagctctgctaatattgtgatttcagagaaaaagcaggacatgccccttttctagccaggaggattgctcctttttggccaaatgtatggagaagtagaaaaatcaaagcagttcatcaccctttccaggtctcggaatggtgctgaaaaatcctctccaacactgtggatggagatcggagaaacgcgactgtggtttctcttgatttctgaggatctcagaagtttcagcagacttccttgctctgtgttattcctttgcaaaaggaaagatcattatagcatgagggctgggaatagcagggtgaacttaacccaataaatgcaatttcctaaatgacttcatgctatggaggtgattctgattcaaatagcatgatccatgcttattatttaaggctgatttttaaaatcttgtgttgcaagggcaacctcgtccattttaactggcacctcagggattaaaatcctactttttagtgtagttcccacctcattcatgaaaatgaatagaactattgtattatgggagatgtgtcagtgaactagaaaatgtcaataacctcaaaggatgaagggtttttattttaaatagtttataaaatatatattgacatgcatatttgaaaatgctgcataaaaataaaagtggtgtgttttccccctctttggagacaagaaaattttattatgactctagataattgtgattttaaacactttgtttttttttttttttttttaattggatttcaaagaaaagaatggaaatgagaggtaaggattaaagccaaagttaggatgggaattaaaaaaataaacattacataaaatctt

SEQ ID NO: 17796 - protein, 152 aa, Homo sapiens
MRLPLSHSPEHVEMALLSNILAAYSFVSENPERAALYFVSGVCIGLVLTLAALVIRISCHTDCRRRPGKKFLQDRESSSDSSDSEDGSEDTVSDLSVRRHRRFERTLNKNVFTSAEELERAQRLEERERIIREIWMNGQPEVPGTRSLNRYY

SEQ ID NO: 17797 - DNA, 2333 bp, Homo sapiens
  CDS (1397)..(1948)
gaaaatgcaaactgaaacctgggaaacagtgcagtccaagtcaaggtccttgttgtacagcacagtgtgcattcaagtcaaagtctgagaagtgtcgggatgattcagactgtgcaagggaaggaatatgtaatggcttcacagctctctgcccagcatctgaccctaaaccaaacttcacagactgtaataggcatacacaagtgtgcattaatggggtaagcatttaactatatgttttaaaatttaattttagaaaacttgtttttcagaagaattattgatgcttaaagctacatagttaaagtaattaatcttggtctctgtttaagtaatattccctcacaaaaccatgaatatattatgtggcattcaattagctactaatttgtctttcatctttccatgtacatgtggttgatattctctagagaaacatagttgtacaactcggcatgtgatttgtctataatatttaagttttataaaataatatttcagtagcctaaataaaagaactctttggtcatcttctctgaatatcaaaccttcaaagcttttgtggctgaatatcactttgctctacaggaaaaaaatttaatttttctttctttatagaagagccgtaataaccaacataaaatcgatcctcatctaatctcttgctctgcttttatttcatttttttaagttgccattgctttaaaagatttactatctttcttggatttactgtttttcaaattttttcaaatgtatttatgtaattcagttttgatactcatctctgtttgtttttcactttcatttccatttaaatattttgacattggaagctcatacttgcctgtctgttactataaaaaataggtttgactgtatagggattaaacaatttgtcttttatttttcttctagcaatgtgcaggttctatctgtgagaaatatggcttagaggagtgtacgtgtgccagttctgatggcaaagatgataaagaattatgccatgtatgctgtatgaagaaaagtaaggcttttaaaaacacaagagtataaaatttgcctcaaactattattttctcctaaattttaagtgtaaaactttgacctacagtttggccagataatttccagctaaatctgtcctcttgaggagattataaatgtaacgtagcattgtgtctctattattatggtctctacaatgttttaaaaatgataaactagacaaaacgttgccagctttacagcagtaatttacataaacactgttagactttaagtcatcgtggacactgagtcaagacttgctggttgcttgtttacattgtaacatttaatatgaattactgatggcgttacccagcctaactagagaaggtctgtataacatgttatggtaatgatttcagttttttttccctctttgtatttgcacaactggaaatctgatctgcaacttatatttgaatctgaccttcagcttatatttggcatttcttttccagtggacccatcaacttgtgccagtacagggtctgtgcagtggagtaggcacttcagtggtcgaaccatcaccctgcaacctggatccccttgcaacgattttagaggttactgtgatgttttcatgcggtgcagattagtagatgctgatggtcctctagctaggcttaaaaaagcaatttttagtccagagctctatgaaaacattgctgaatggattgtggctcattggtgggcagtattacttatgggaattgctctgatcatgctaatggctggatttattaagatatgcagtgttcatactccaagtagtaatccaaagttgcctcctcctaaaccacttccaggcactttaaagaggaggagacctccacagcccattcagcaaccccagcgtcagcggccccgagagagttatcaaatgggacacatgagacgctaactgcagcttttgccttggttcttcctagtgcctacaatgggaaaacttcactccaaagagaaacctattaagtcatcatctccaaactaaaccctcacaagtaacagttgaagaaaaaatggcaagagatcatatcctcagaccaggtggaattacttaaattttaaagcctgaaaattccaatttgggggtgggaggtggaaaaggaacccaattttcttatgaacagatatttttaacttaatggcacaaagtcttagaatattattatgtgccccgtgttccctgttcttcgttgctgcattttcttcacttgcaggcaaacttggctctcaataaacttttaccacaaattgaaataaatatatttttttcaactgcc

SEQ ID NO: 17798 - protein, 184 aa, Homo sapiens [sequence omitted]

SEQ ID NO: 17799 - DNA, 3203 bp, Homo sapiens
  CDS (1103)..(2227)
acaaatatttacacaacatgtaccttttggaaggtatacctgatctttaaagcaggtaaacatgttctaaaaattgacacattaatttgaaataatataggaaattgaagcttagattttatgataaacttaaaagaataggtacaacttttctgctttatttaaattttattttctggtttatttaaatttagtcaaattctgtttgtggcatttaacttcatacttggaaaaatatacagtctcccactgttgaggaactcttctggagagtatatttttatgtgataataagtagagatgatgaagaaatgatttttgtatgccaaaggatacaaaaatgtttttatttaagcgagaattaatcaaatctgttttaagaaaattaattacttgattttgaaaactgtaagatatactaatgaagttcttatggaaaataacctattttggagtaatatcccaagctggcagaggctcagtgaaactaaatattcttaagtgccattgacactatttattattggtctgtttttaaagcaacatgacaatatagaggaagagcaattaagattcccatacactttgaccctgttattccatccttaagaaattatttcaaagaaatagttcattagagatgaaaagcttattgtaacattgtctatcatagcaaaacatggaaaccacttcattgtcctgtgttaggggattggtttacttaatggtgctacaccaacaaaactgaatactgtgctgtcattaaaatgtgagactggagaaatgtatttgttctgatttagatattctgtatagtgtgattacagtgatatttaaaatatgcaaaaggtaatatagaaaaatgaaaatataaatatggttatgtttgacttcatatttttgtaaattgttaatgttatgatgcctattcaattgttttttaagacagaaagtaacctatttttatatcctgtgaaatacatcaaagttttggactatgaaatttaaaacaagcatgaaggacttggggaattgaaaaattgaaattgttatatgtgttttattaataagaagtacatgttacttttattttaagaattacatggattatttatcccgactatatgaaagagaaatcaaagatttctttgaagttgcaaagatcaagatgactggcacaactaaagaaagcaagaagtttgctacactgcctcgaaaagaaagtgctgtcaaacaggaaacagagagtcttcatggaagttcggggaaattaactggatctacttctagtctaaataagctcagtgttcagagttcagggaatcgcagatctcagtcatcttccctgttggatatgggaaacatgtctgcctctgatctcgatgttgctgacaggaccaaatttgataagatctttgaacaggtactaagtgaactggagcccctatgtctggcagaacaggacttcataagtaaatttttcaaactacagcaacatcaaagtatgcctggaactatggctgaagcagaggacctggatggaggaacattatcacggcaacataattgtggcacaccactgcctgtttcatctgagaaagatatgatccgccaaatgatgattaaaatatttcgctgcattgagccagagctgaacaacctaattgcattaggagacaaaattgatagctttaactctctttatatgttagtcaaaatgagtcatcatgtgtggactgcacaaaatgtggaccctgcttctttcctaagtactacattgggaaatgttttggtgactgtcaaaaggaactttgacaaatgcattagtaaccaaataaggcaaatggaagaagtaaagatctcaaaaaagagtaaagttggaattcttccatttgttgctgaatttgaagaatttgctggacttgcagaatcaatcttcaaaaatgctgagcgtcgtggagacctggataaagcatacaccaaacttatcagaggagtatttgttaatgtggagaaagtagcaaatgaaagccagaagacccccagggatgtggttatgatggaaaactttcaccatatttttgcaactctttctcgattgaaaatctcatgtctagaagcagaaaaaaaagaagccaaacaaaaatacacagatcaccttcagtcttatgtcatttactctttaggacaacctcttgaaaaactaaatttatcttttataagctcttaacttgaagttagagtaaaatagcgcggtgactcacacctgtaatcccagcactttgggaggccaaggcaggcggatcacgaggtcagaagatcgagaccatcctagctaacaagcatttctttgaaggtgttgaagctcgcgtggcacagggcataagggaggaggaagtaagttaccaacttgcatttaacaaacaagaacttcgtaaagtcattaaggagtaccctggaaaggaagtaaaaaaaggtctagataacctctacaagaaagttgataaacatttatgtgaagaagagaacttacttcaggtggtgtggcactccatgcaagatgaatttatacgccagtataagcactttgaaggtttgatagctcgctgttatcctggatctggtgttacaatggaattcactattcaggacattctggattattgttccagcattgcacagtcccactaaaccttgtgaaagaagaaaagataactgaatgaagcatttgagtataacagacactataccaaaataccaagcaactgttttgagaacccagacttaaaattttatgtattattaaatgttagataaatgggtagtaccatactacaaatatttaaatgcaaaattaccaacctatatagcagttttatttgccctataggttgcatactaacttaagcattcatgtcaccataaaatgcctttagcatttctcaatgactggatgggaaattttcctttattgcctagctgcttgtgtttgagtggttgtcctatgagcaatgcatttggagttcttcagctttcactacttctctgttgcttgctaatcatgtaactactaaaatactgtacaaaattgttttttcacactaacaaatgtgtatatggagaagagggctcatgtgatgatcatttgtgaacttagatttttgaggattatgtgactagtaataaatgtgaaataaattttc

SEQ ID NO: 17800 - protein, 375 aa, Homo sapiens
MDYLSRLYEREIKDFFEVAKIKMTGTTKESKKFATLPRKESAVKQETESLHGSSGKLTGSTSSLNKLSVQSSGNRRSQSSSLLDMGNMSASDLDVADRTKFDKIFEQVLSELEPLCLAEQDFISKFFKLQQHQSMPGTMAEAEDLDGGTLSRQHNCGTPLPVSSEKDMIRQMMIKIFRCIEPELNNLIALGDKIDSFNSLYMLVKMSHHVWTAQNVDPASFLSTTLGNVLVTVKRNFDKCISNQIRQMEEVKISKKSKVGILPFVAEFEEFAGLAESIFKNAERRGDLDKAYTKLIRGVFVNVEKVANESQKTPRDVVMMENFHHIFATLSRLKISCLEAEKKEAKQKYTDHLQSYVIYSLGQPLEKLNLSFISS

SEQ ID NO: 17801 - DNA, 1272 bp, Homo sapiens
acataatgttataaataagaaaactgaggctcaaaaagttttacacttgtccaaaggtatccagcaggctgcagacctggactttgaatccaagtttttctcattcaaaatatgttttttctaatgcaatatgaggcatgaaggcaatggtatccttttgagaggtgtgatggtaagttttatgtcagcttggctaggctgtgatgtctaattgcttaaccaaacactggtctaaatgtttctatgaaagtatctgtggatatgattaacactcacaatcagctgagcacagtgggctcatacctgtaatcccagcattttgagaggccgaggcaggaaggtcacttgaaccaaagagttcaaggccagcccagggaacatggtgaaccactgtctcaacaaaaataaaaataaaaattagccaggcatggtgtcatatacctataatcccagctacttgggaggctgaagtagcaggattgcttgagcccaggaggtcaaggctgctgtgagtaatgaccatcacaccactgcattccacttggatgaaaaaccaaaacattgtcaccaaaaaaacaaaaatgtataaataaataaataaataaaatttacaatcagttgactttaagtaaagcagtgtatccttcataatgtgggtgagactcatcggattagttgaaggccataaaagcaaaaactgaggcttcccagagaaggaggaattttgcctcaagaccataacacagaaatactgcctgggtctttagcctgccagccagccctatatttttcagacctgccagctcccagaatcacctgagccaattccttaaaataaatctctctttttctttctctctttgtatatatataaatatgtatatgatatctccaatatatacatataattgaggggacataaatataaatcaatctctctccattaatatatgtatataataggttctgtttctctagagaaccctgactgagacaaagagtaactgaaagtcacccaagagaatgtggaaaagagtcaaaggaaatgtatttctccctcaataggtcatttcctagacaactttccagaatacgacaagaagcacataacttcatgatcaaggtcagaaagatgctttttctgtaaagtgcctcatgagaaattttgtatgctttatttttttcaaggtgaaaaaaagtttgtgaatgtttaaaaataattcttttcaaattgtcccagtgcagtaatttttagaatgcaaactcactctg

SEQ ID NO: 17802 - DNA, 2090 bp, Homo sapiens
gagaaaaaaaaaagaaaaaaaaccatatgtgtattagggtgactgagtggtgacttcatttataataatacagagaatagctataagctcattgacagtaaaaacaacaaaccaggattctactgtttgaaaagaagtttcgttttaattttggaatttagaatgtgtatttgcaaagtcaccaattttcatctaaaaggttatattctagttgtgtcaccaaaccatcaaaaaaccttaaaaaagaagtaacttgctttgtaggtttgtattgttgatctaaacctgatacatgcttcatttaatcaggaataatccttttttttctgctggacatgtataaatttcactggattgtataaatttttatctattgccttaaacatttacatgattctcaatatgttttagctgtacagttttggtgttcatcttagaggattcttcagcagaagtgatatttctttactgttttgtgaggtaatactgattttgaaaatatatataagctaaaaacagtatttcgttgatatcagtagtcattgtgttaactataaagtcaagtgccagcaaagaactttaaaactgtaaagctgtgtatagaactgttttgtgtagcatggaaatattctgtcagctttttaaagtcactaaatgttcttgattatcagcttgaaggtatttttgtattacaagttgacagttgctgggtgtagtggctcatgcctgtaatcctagcaactcggggctgaggtgggaggattgcttcagcccaggagtttgagaccagcctgggcaacatagcaaaaccccatctctacaaaaataaaaaatatgtctgggcatggtggcccaagtctgagtcccagttacttgggaggatcacttgaatgtaggatcacttgagtctaggagttcggggctgcggctatcatctgcagctataatcatagctcactgcagctatgatcatgtctcagcactccagctttggcaacagaacgagatcccatctcttagaaaaacaaagttgatagttaaagaacataagtggatgatggcatttgaggccactagtgaaagtatgttttctctaaaatatttctctaatagtgatataaatggctattttattatgatgtttgtatgtgttttgtatttctctgtaaaccatgctccagtctttgtttttctgttaccataatgtaagagaaggtcctggaacagagactaaatcccacgaaactgacattgttaaacacactaaaacagaagtacttacctcttgaagatttaatatataatggttgacatgatacatgtacatgatgaatgaccagatgcttatggtctacattttcctttatcctgttagtattaccttccttaatctttgttcattaacatgctaattcctcttcagtgtttattttctagtgacagaatgctaacatttcttacaccctggcagaagggagagaaatgtgttttggggtgggtaactaaatttttgagtgaaatatcataagatgagaatggaaagagggagacacaaagagttataacaaaaaaacaatggtttttttagccatttgactggctctttaaatagtctacaagacattcacgtttaacatcacttttagtgaaataaaatgtgccatactagtatgtgcttcaaaagggcaaatgtgctttagtgccctaaggctaaattttggtcatttgacatcagagatgttgtaagtattgcacttaatacgcacctatttctcaatagtgttattttttggctagcattttctttaccactatcttgttgatagctttttgttctctaaggttgaaacatgacagtgcttatctcaaacagattacccatctgcagaactaaggaaagcaatttatgtatgaaagaaattcttgaattcgtcattctcaacctttgaattaaagcttagactaaatagtaatatatcgtgggaaggattttggttttgtgatatttctgtgaattaaggaatagatgttaaccattattttgtagaaaagtgatttgtatgtggttaattataaataaaactggtacc

SEQ ID NO: 17803 - DNA, 3070 bp, Homo sapiens
  CDS (125)..(2683)
agtcagggaggcgaactgctgagcactggccgcggacgctccgttgcagtctcgcccaggggccggtacctgcgctcgcgccgccgggttgaaaggatgaagccgcagctggagcagccaccctatgattggctgtggcgcttgtgaacccaaagtaaagatggcgggcgggcaggcagccgccgcactgcccacttggaagatggcggcgcgccgcagcctcagcgctcgcggccgggggatcctgcaggcggctgcggggcggctgctgccgctgctcctgctgagctgctgctgcggtgcgggcggctgcgcagcggtgggcgagaatgaggagacggtgatcatcgggctgcgactggaggacacgaacgacgtgtcgttcatggaagggggggcgctgcgggtgagcgaacggacccgggtcaagctgcgggtgtacgggcagaacatcaataacgagacgtggtcccgcatcgccttcaccgagcacgagcggcggcgccacagcccgggggagcgcgggctggggggccccgcgccgccagagccggacagcggcccccagcgatgcggcatccgcacctcagacatcatcatcttgccccacatcattctcaaccgccgcacctcgggcatcatcgagatcgagatcaaaccgctacgcaagatggagaagagcaagtcctattacctgtgcacgtcgctctccacgcccgccctgggcgccggcggctcggggtccacgggtggcgccgtcgggggcaagggtggctcgggggtggccgggctcccgccgcccccgtgggccgagaccacctggatttaccacgacggcgaggacaccaagatgatcgtaggcgaagagaagaagttcctgctgcccttctggctgcaggtgatcttcatttcgctgctgctgtgcctgtcgggcatgttcagcggcctcaacctggggctcatggccctggacccgatggagctgcgcatcgtgcagaactgcggcacggagaaggagaataattacgccaagcgcatcgagccggtgcgcaggcagggcaactacctgctgtgctcactgctgctgggcaacgtgctggtcaacaccacgctcaccatcctgctcgacgacatcgccggctcgggcctcgtggccgtggtagtctccaccatcggtatcgtcatcttcggagagatcgtgccccaggccatctgctcccggcatggcctggctgtgggggccaacaccatcttcctcaccaagtttttcatgatgatgaccttccccgcttcctacccggtcagcaagctgctggactgcgtcctgggccaggagataggcaccgtctataaccgggaaaaactgctggagatgctccgggtcaccgatccctacaacgacctcgttaaggaggagctgaacatcatccaaggggcgctggagctccgcaccaagacggtggaggacgtgatgaccccactccgggactgcttcatgatcaccggcgaagccatcctggacttcaacaccatgtctgagatcatggagagcggctacacccgcattccagtgtttgaaggggagcgctccaatatcgtggacctgctgtttgtcaaagacttggccttcgtggatcccgatgactgtacccccctgaaaaccatcaccaaattttataaccaccccttgcactttgttttcaatgacaccaagttggacgctatgctggaagaatttaagaaaggtaaatctcacctggctatcgtgcagcgggtaaacaatgagggagaaggggatccattttatgaagttctgggaatcgtcaccttagaagatgtgattgaagaaatcatcaaatctgagattcttgatgaaacagatttatacactgacaacagaacgaaaaagaaagtggctcaccgggaacgaaagcaagatttttctgcctttaagcagacagacagtgagatgaaggttaaaatatcaccacagctcctcctggccatgcaccgtttcctagcaacagaagtagaagcatttagcccatcccagatgtcagagaagatccttctaaggctgctaaagcaccccaatgtcatccaggaactgaaatatgatgagaagaacaagaaagcccccgaatactacctctaccagcgcaacaagccagtagactacttcgttctcattctgcaggggaaagtggaagttgaagctgggaaagaaggtatgaagtttgaagcgagcgccttctcatactatggcgtgatggccctgacagcctctccaggtgaaaataagtcccctcctcgcccatgtggcttgaatcactcagactctctcagtcgaagcgaccggattgacgccgtcacaccaacactggggagcagcaataaccagctcaattcttcgctcctccaagtctacatccccgattactcggtgcgagccctttcggacctgcagtttgttaagatctcaagacagcaataccaaaatgccttgatggcatcccggatggacaaaaccccccagtcttcagacagtgaaaacactaaaatcgaattgactcttacggagctgcatgacgggttgccagacgagacagccaacctgctcaacgaacagaactgtgtgacgcacagtaaggccaaccacagcctgcacaacgaaggcgccatctaggccgcgctggctgcacccgcccaggcccgcacccgcccagtcccgagggcccggccctgtctgcccatgacttcactggtgtgagcttgtccgccatgctgtaccctgcaacatcctgagaccaaagaccttgtgcccttcccaggagccgcggaggaggacagtgagggaggaatggaaacgagagatgtgaagttggcagccggggcatggcgttcaagattttggagatgaactgattccgcccaaatagaatcatgtttattttttcagctctcccttttatcattattcacactcctctgccctcgatttgcatgaagttgaaaattgttgcgatttattttttcaagagatcatgtttttaaagtgtcttttgcagag

SEQ ID NO: 17804 - protein, 853 aa, Homo sapiens [sequence omitted]

SEQ ID NO: 17805 - DNA, 2533 bp, Homo sapiens
gagttttaaagtagaagtacttgctagtaatgcagatagagtcagttctctcaccagtatggatttaaattgtcctttccatctcagtttactcttttttttaaaaaaaacaaaccaatatgctacctgaaactagaaacacatttttaattctgcagctctcctaacagattattttgctttagtacagagctgggctgcaggctgagttgggagttggtaaaggattgaggacagcaatgtaggtcgcctcttcctacaggaaaaaattgaggaacgttgtgtattactggttaaaagattgattaggattatttcaagggatggttgagttgtcgttttacttatttcacccaatattttgtgtctctacttaagcagtgttgttttaaatgttactggataattgtaacataatcaaattaaattttatatttaactgatacccaagcatttgatgaaaacatgttgcaggaatgggagagtattccatagcttttgttttattgtgatttgattaaatgtgacaactaatagtttaaagacaggacttcactgttttagctgatttcctgtagaaagtgtggctaagtttaattgaaagaaatgtcttcttactagaactgattttgggggactttatccactcttacttggaacactaactgttggctataagggttcaaaaaggaagcaacagttgcttatttggcatgttgaaatatcactggctattttagagtatgaagcaaactttatcaatatgttttcttttccctccttacacacaatgtagactgatagaaaattagttttagttcttctagaatttatataaattttgtaagctccacccaacacacacacacacacacacacacacacacacacacacacacacacacacacacctgccccacttacaaaagtctatattagccttttaaaacaaaaatttcctgcgtgaaattctggcttagttaactttttggtctttctctcggggcttttcttgttcttataaaatactgtaaattacaaatggaaatttaatgcagaattaaatttctagtgtacaatatttgtaagacaagaagaaaatttccttttcccagatctcaggaactaccttgttcctgttaacttcttgaactggctagttgctcaaaggtatgtatacaggcctttagggaagagcagtttttaaaattttcctttctgatcattatatacctgtcagatgacaatagataatcttccaaagttgctacctaaaaatcctaggaaagaaactttggtgaacatgactgccattcccattaattgctaatgaaaaacatcaaacttgcttagtagaaaaacacctaatttggtataactttcttgcagtttatccatattatgtgcttgttacttaatgtaattaaaagcattttaaaattctacttttttcgtatccactttttatacttgctacttcctaaatcctccctcactgtttatttcatccatctactcatttcccatcatccaaagttagcctctccttgtataccaggcactgtctgatttccatgtattccttttatttttactgtgggcctttgtgcttagtatacttttacttcatataatgtgattaacaaatgaagtgattatcatatggagtttaaggaaattagatgtatcttgcaattactttgaaatctttgggaaaccttaagaagattgtatctgttttcatttttatttacaacatcttggaatttgttcatgatttcctaaaatttctttgcctacccacatctctgtgaaaattttccatatcagttaagtagttttcgcaatgaaaattttagaccatagatatgttgtatgctgtgatcttttgcagcctaatgtttgaagggagcatgatgcagagaggttttgttaaaatcattttagcccaaagctttgtgtaattttcctgcaactttgattttgatttctttctcaaatagacttttttaatgtttagaaaagttggaggtcaatttatgatgtgattcaagttttagatttatttgctattttcaaagttttttttaatagtcttctctttttccagcagagagagatcatcattgcctgaatttagctttgtgactgcaagagcaagaccagttcctgtctggagacgactgttacaataatatcatcctattattttatgttcactctttatcaatttgaacagatgtttacatgtactataattagcattttatctctacagttctctaagagtacatctgagtccaaagtgtatctgaatgtgtgctctgaccttattcttaaatgttttctccccatactttatagccatttattttttaaacaccttaagaaggaacgaaaaagttctcttggatgacgtatattcaagtctgagccaaattgaggattgtgtctaggaaatctgtaaagccatactactgtgttcattagcatgagcaatttaaaatgaaaatgaattaaaaagttaaacatg

SEQ ID NO: 17806 - DNA, 2290 bp, Homo sapiens
ttactccaatgaacttcttccccactcattggaaaaacagaaatgatatgacatgagaaagacagcaaaatataatattagcgtggcaaagagccaggaaaattaaaagacatataaagggaagagatggcgaaaagaccctctagaaatatctaaaaattcagatgtgtggacacagaaatgaccttagccaagacttgttgttcacgccaccctcaagccctgagctatctaagggcaggctgagaagcacgtgttgaagaataccaatgtttataaggtggcagttcaaaaactctcccatccaaaattggacaaaggaacaaaaaaatctgccatgtgacaaatttaaagtttccaaattccagggttctttgatctctgacacaaccagattatcaaaattaaacctctactacttaacaatgataaagggtatttcattctcataagtgtagctagtagtatatcttttccatcatggctttttctctgtttatcttttctctctttctttatttccctgtagctttcaagcagaaattcttttcattttgttttggctctgtaattaaacactcaaagtgtatcagtagctaaaacattacttcaatacccacatttattctggctagaaaatcattccattttataccatgagcatccagttatttaattaagaaaatttcccttaagatttatactagatatggaaaaggagtaaagccaatgtaaggagcaaaacaaaatgtctgctgctgttgttgatttcaattatgcaataataacatgcaattccaggatcaggccagctcagcactgtattaaagatttaattggaatagttatgattcaccatgggaatacaatcttgtaaaaaatatgttttctgaaaattaagcaatccttatgggctctattcatcagacatgttatgccatctttcttcatcaaaggtataaatatatacatatgcatatatatatacacattcccactacatttctttagcttcccttctttatccatcttagtttcactactttctatatatgtgaatgcaatatcttgattacaatgagcaaaaatataattattttctcctactaaattacatcctcactcacagagcataagctacattttattaagacacacatgttcaatggtccttccctacctacccagaggccttgaaacagctctaacatttacattccaatgtaagatgtttcttttactcctccttagacggtatgctgttattaagaagtattttaaagtagaagtaaaggtaaattaaaccaaattttctatttttatatttcgttgttgacttgtttctaaaattcctataattttttgctgcatattatcctcatccccaaaataacatccattttaaagtgtatagttgaggggaaggatgctgtttttggtataagttgtcaaatatggaacatttgacctggagagggctaaaatcaatatttaatcctcagagcttcacctgtcaaaactatttaagtctgcagaaaatcaagattgaaatgaaaactaccaaccagctgaacatccaaaacgtcaaattccttaacatgatgtaaaaaatgtaagctaaaaggaattagtccattttgatagcagcaatagagagccctgtgtattcgtattcgactttcatggaaaggttcttctgtggcaagaccacctgtggaactagtacctaaacacacagatttgttttattttagagcttcacaatttgagatctcaaaatacaaaacctaataaggctgaaacacagggtctatgaaggctaagaacccacattaattcaaaaagttgacacagctaaacatcttacaagcatgaggtgagaaccgcagaaaccaaagctgtgctaacatctcacctctactgctttgatgtgatctagatgcacagttagcttcagtgtggcccgttatctaatagaaccatctttcaaggcttttcattgggaatgacaaaaagccagttgctctggctgtgtggcttcagaggcacatttccagttaatcagtacaaccaaagtcaaccaaatagttgactggtatttgatttgttttaatttacttttattatagatctaggggggtacacacgtaggtttgatagatggatatattgagtaatgctggggtttaggcttctagtgaacccatcacccaaacagcaaacatagtacctagttcaaagactattatcttacttaggtagacgacacacgtttaaaatatataccttt

SEQ ID NO: 17807 - DNA, 2227 bp, Homo sapiens
  CDS (1127)..(1501)
caaatgtttataaaatgactaccgtatgctaggcagagtatggagcatagcaactatgaaatctgtttcagtagcttggtccagaaccctcagtatttggaaagttgcatattgtcatcatttactcccattttgattatattaagaaagtatgtgagggcatgagcctctcaggaggggacctcagtgtttccggatccctcctgccctctgtgggacctagatgctggctagctgagcaccgtcaatgtgtcctcgcagaagacgaagcgcatttcctttcttctcttttttgcggttccagtgtgatgacatggcttggtcaccatgcttcgtgtttgctaaaaagaaaccagggatatgagtttctgaattctcaacctggtgcctttgccagagaacaaagtcaggttaatcagacgtcttcccctctccagcccaactcattcgctggctgacctctcctggtcccatggttctaagaaccatctccacgataatgattcccaaatgaatatcctagcccagacctctccctcccactccagacttctgcttggattccgtgggctgtctcataggcatcttatgcttgctacatctaagtccagcaccagattccaccctccagcctgctcagcccttgcctcctgcttttgggaaacggcacatcgctttttccttgagttgtgtgtgccagaagtcgtgaactcacccttgactccatcttcctttcaggagctcagttcatcatcaggtcctctttgttccactttcaaaatgtgcagaacacatctctttcttccttccaccaggctgttttccatgtggcagccaggtgaattcctttaaaatgtaacttagttatctcatccctgttagcttagaaaggctcagtgttgcttcctacttcattcagtaaaaaatccagagttcttactatgacctgcacacttccaaatctgtcccccaaccagcataacccttattcctattccccccaaccccatacgcacagagtgtgcttcagccacgtcggtcacctttttgttcctctccaatcccactgagggcctttggccttgccgctgcctctgcctggaatagtcctctgtcacatgtcttcatggtatgctctcactatcttctttctgaacaaatgccttattgcagcagccttcagggaccacttgaacaccccatcctttgtccttccttgtaccccttatctgctgtattttgttttcactgcattgacacattatgcatttatgtctctctcccaccgccttgcacacacatactagaatgccagctccctgggtgcagagacagagcatttgttcacagaaacaaccccagagcctggagagggcctggcacaaagttgccgaatcatctgtatcctcatgggtttgctcccaggagctcagagatcgcctctttggaaaagttgcggcagggaggccagaatgagccaagcgtaacccagtcacacccgtagctcgtccttagtagaagctaagaatccagggcaggtctgagagcacattcacagggtgctctgaggcttctaaacagctgtccacataggcactaacttggtatatcctcctgacaaccctatgactgaagcagcatcttcatgagagatgctttcgatgggagaggttgagtaacttgtctgaggtctcttggccgtaaagggacaatattgcaccagcagccacatgcctgaccatttatgtagcttctgactagcactaaatttctttaaggtctgatttatctctaacatgcttgtaaattttgcataatttttactccataattctggtacatgtttgttttaatataaaaataacagttgatcctaccagcttactcactccacttttttgcttcttgggctaaaagtgacacaccaataagattgcatcctggctgggcgtggtggctcacacctgtaaccccagcactttgggaggccgaggcgggtggatcacaaggtccggagttcaagaccagcctggccaacatggagaaactctgtctctactaaaaatacaaaaattatttgggcatggtggtgcatgcctgtatcccagctacttgggaggctgaggaaggagaattgcttgaactggggcccaggaggcagaggtagaagtgagccaagattgcgccactgcactccagcctgggcaacagagcgagactctatctc

SEQ ID NO: 17808 - protein, 125 aa, Homo sapiens
MVCSHYLLSEQMPYCSSLQGPLEHPILCPSLYPLSAVFCFHCIDTLCIYVSLPPPCTHILECQLPGCRDRAFVHRNNPRAWRGPGTKLPNHLYPHGFAPRSSEIASLEKLRQGGQNEPSVTQSHP

SEQ ID NO: 17809 - DNA, 2857 bp, Homo sapiens
  CDS (1333)..(2094)
aagtctcaatgtttaaggaaaaaagatttagaaatagtggtttttaaaagtttgatggaaaaacacatgagttcctgctggtgcattttacatgctttctaggtccttctgagttttaggatcctgagggatttggttggtattgtttttgggttttcttcttgaaactcagtattaaaacactgaaaagtagcagatttttttctacctagagttttctgtttatccatcatgagcccaaataaagtcacaattgtatgttacctgctttacaaagaagccatttatgtttaattgactgttcattttgctttcttgtctgctgggatgacaaccgtgaaattcagtctggtagtttttatgagttggacatgaacctattagaaatgatttaaagtataaaatcatttctcacaggctttcaaaacataaacctgtgatcagaaacctggaatctagaaatttattcaggacttgcagaatttgtagcatatctacattattggagatctattgaaagggcaagaaaaagatgattgcccgttagtatcaacagttatggtacagacaactatgagagaaaccttttagatttggcagctgtatcattaataatgtgtcattggctattctaatattacagtaatctaaaatggcatattaatccagcctttaacaaattggtttaccagatcattagggatgcagaaattttagttgactgtgaaatttatatgagtcatactcatttactttattctttttaagtgaaaactgcccttacagaaaagaaaatgagtttataaagatttctcacagagttcagtggaaaacggttttactgtaagagagagtttaatgaagaagaatcaaagcttattaaatttttcttagaatcattttattttggataagccctgggcaagtgggccagtgcttactttcatggctatgtttaattcctagaaacattttaaaattactgccttactaatattgtttctgtcataagaaagaaaaataatttttagaccaaagctttggtagtatacttgataacctttgtaatcttttttttttcaaactgtttcctttgggctaaatcagcatgcagccgtctaacacaaatcattacaaacccccttttctgagattttactaatcgctatgaactaagcaagaaattaaagtcggttgctttagctactgcaaattgcacatcatcctgtagtttagaattattattgacaactagaggttctttctttcttcactgaacagtttggagactcccagcaactgcgactggtccggatcctgcggagtactgtgatggttcgtgttggaggtggatggatggcacttgatgagttcttagtgaaaaatgatccttgcagggccaaaggaaggacaaacatggaactgcgtgagaagttcattttagcagatggtgccagccagggtatggctgctttccgaccccgaggccgaagatcccggccatcatcacgaggcgcttcacccaacagatccacttctgtgtccagtcaggctgcgcaggcggcctccccacaggtccctgccaccaccacacccaagattctccatcctttaacacgcaattatggtaaaccatggttgacaaacagcaaaatgtcaactccttgtaaagcagcagagtgctcagactttcccgtgccatctgcagagggaacgccaatacaaggaagcaagcttcgacttccaggatatttatcagggaaaggcttccactctggggaggacagtggcttgataacaactgcagctgccagagtccgaacacagtttgctgattccaagaagactcccagccgaccaggaagtcgagctggaagcaaagctggcagcagggccagcagccgccgaggcagtgatgcatcagactttgacatttcagaaatccagtccgtgtgctcagatgtggaaactgtcccccagacacacagacctacaccccgagcaggttctcggccatccacagcgaagccttcaaaaatccccacgccccagaggaaatcacctgccagcaaattggacaagtcctcaaagagatagtgcaattggttctaccaaggcccttccttgagcatttattatttaagtttgaacgatgtaaaatatggtgtagaaattcttgtgaaatattgcaagaggcgagtttaaaattctgcagatggccttatttgtgtatttgtctttttattttatctgtataattttttttgtcagatattctggggttaaagtcacatcatatgtgaggaggaaaagtttaacatgaactaacatttctgcactgtaacgtgccgggcacacactaaactcagttactgtacctacaggtaagtctacatcctctctgacagccacagcactacatcaatccctgacgttagggaaacctcatgacattttcctgtttttatggaaactctgagaagctgaatgatacatgcaggggatattttttgagatgatttaaatgtaaaccaaaagatggaagacaaaaagacaaacacacccacacgcagtctttgcagtatctgacagagaactcacaggaagttacttcaagcacttgccagtactatgatattcaagtaccttgcagcatttctctgccattgctttcaatgaggccagaggcatcctggatattagacctattatactgtaagaatataagtataaagtgcgttcatatacatgtgaggttttcttttgcttgagtggacagtagcacctgtatcattgaactcattttgtatcagagcaattttgcttgcagaaagctatgaaataaaacacgtccctt

SEQ ID NO: 17810 - protein, 254 aa, Homo sapiens [sequence omitted]

SEQ ID NO: 17811 - DNA, 2564 bp, Homo sapiens
  CDS (35)..(841)
aagtttctttgaagctagagatcttcgccagcacatgaacaaacatcttggtgtgaagccattccagtgccaattttgtgataagtgctatagttggaagaaagattggtattcccatgtgaagtctcattctgtcactgagccttataggtgtaatatatgtggcaaagaattttatgaaaaagctttgttcagaaggcatgtaaagaaagctacccatgggaagaaaggaagagcaaagcaaaacctggaacgggtgtgtgaaaaatgtggaagaaaattcactcagctaagagagtataggagacacatgaacaaccatgaaggagttaagccatttgagtgcttaacatgtggagtagcttgggctgatgcccgatctctaaaacgccatgtcagaacacatactggtgaacggccctatgtctgtcctgtatgtagcgaagcctacatagatgctcgaacactccgtaaacatatgactaaattccacagagactatgtgccttgcaaaattatgctggaaaaagacacccttcagtttcataaccaaggaactcaagtggcacatgctgttagcatcttaacagcaggcatgcaggaacaagaaagcagtggtcctcaagaacttgagactgtggtagtgacaggagaaactatggaagctctggaagctgttgcagctactgaagagtatccatcggtatctacactttctgaccaaagtattatgcaagtggttaattatgtattagcacaacagcaaggacagaagctatctgaagttgcagaagctattcaaactgttaaagtagaggtagcacatatttcaggaggagaatgagtatgttaatgaagataaaaagaagtgacatctcttgtacactgaactcacagaacatttgtttacaattctgtgtgactgtctgcttggagtttacatatcaaagttctgggctgtttggtaacgtaacgtttccaaacattttgtctggccaatgggttctatagaaaagtccgtttagtgtagagaaattgaaaacagatctattaggttggtgcaattgcttttgcaccaacctaatatttgatggcagtggtttatcatgatataccttttatgaattaatgtttataaatgactgtactgaatttaaaaccgtacagtttcatttgcattttgacattactttattatacattttgcatttaaaaggctgcaccagttggcttttcttctgttttattctcaaaatatagagattctgtgatttatttgccctgtttatggattaaaaagaaaattctaatataaagcatttcaataggatgcataggtatattacgttttttaaatgctttagatctgtgattcttgacttactatttattttatccccttttaagtcagggatgctttattctattttaaagcacttatgagttacatgttgtaatcaagtttgcacaatatatttatctatatgaggaacccataaatgaatagctaatttttaaaatgccattaaaatgcatgaaatgcttattaaaaccttactatactatttcttcaaggcaagtaaattgaccatgagaaaagaacacagttattaaacactgttgacaggaaaattctccttgataacataggacaattaatggaaaaaaaaattctcattatttgcaaagaatgaacaagttaatgaacaaacaaactagatttggtatgttttcagcttttgtatcatgtttaattgtttaatttggttgaaaaactgcagttgagaaatcagatagcaatatagacattcacagcagctctgtggataccatgtaattgtcaggtaatttcagaatgttgaaaattattcagtgcagccctcatagtatcatacttgaagaaattgattacagttccactaaattgttgaagataaattatttttaaaggttatgaaaactaagttatattaattcatatgtttgatttttaaatcccacctcctcaagctatccaattttctgactttgaaaataaccatgagagatgccacatttctctctgggaaactaccactcaaagaataattgttaaaaattaagcttttaggtattagaagctgttataaagtataaaattaagatataagcagatcacatgtaaatcattcctaaagcacaagaaaagaatgtgccttgatgtacatattactaagttgcctctcccagtttactttaaaaatggctttaaggataaagaataaatgtgatagctgtgcatgcattatatatttgcatttgcaaatttcccattgttttaacagctgtgtggctgactttcaattttaagacgtgaattgacatacagcccataactttataatggctgctcatttatcttatctttcagttagtggaaaaacatttcaacctgactaaaatttggaattgtgtcttttatgttccatcctctgttgttactagatttagtttaaaaattgtgtatgaccattaatgtatgtcataaacatgtaaataaaagatgttgaatcttgttgaaaagc

SEQ ID NO: 17812 - protein, 269 aa, Homo sapiens
MNKHLGVKPFQCQFCDKCYSWKKDWYSHVKSHSVTEPYRCNICGKEFYEKALFRRHVKKATHGKKGRAKQNLERVCEKCGRKFTQLREYRRHMNNHEGVKPFECLTCGVAWADARSLKRHVRTHTGERPYVCPVCSEAYIDARTLRKHMTKFHRDYVPCKIMLEKDTLQFHNQGTQVAHAVSILTAGMQEQESSGPQELETVVVTGETMEALEAVAATEEYPSVSTLSDQSIMQVVNYVLAQQQGQKLSEVAEAIQTVKVEVAHISGGE

SEQ ID NO: 17813 - DNA, 2293 bp, Homo sapiens
  CDS (182)..(1792)
gcacaaagatagactactgtgcctcatctaatcacggatgtcagcacgagtgtgttaacacagatgattcctattcctgccactgcctgaaaggctttaccctgaatccagataagaaacctgcagaaggatcaactactgtgcactgaacaaaccgggctgtgagcatgagtgcgtcaacatggaggagagctactactgccgctgccaccgtggctacactctggaccccaatggcaaaacctgcagccgagtggaccactgtgcacagcaggaccatggctgtgagcagctgtgtctgaacacggaggattccttcgtctgccagtgctcagaaggcttcctcatcaacgaggacctcatgacctgctcccgggtggattactgcctgctgagtgaccatggttgtgaatactcctgtgtcaacatggacagatcctttgcctgtcagtgtcctgagggacacgtgctccgcagcgatgggaagacgtgtgcaaaattggactcttgtgctctgggggaccacggttgtgaacattcgtgtgtaagcagtgaagattcgtttgtgtgccagtgctttgaaggttatatactccgtgaagatggaaaaacctgcagaaggaaagatgtctgccaagctatagaccatggctgtgaacacatttgtgtgaacagtgatgactcatacacgtgcgagtgcttggagggattccggctcgctgaggatgggaaacgctgccgaaggaaggatgtctgcaaatcaacccaccatggctgcgaacacatttgtgttaataatgggaattcctacatctgcaaatgctcagagggatttgttctagctgaggacggaagacggtgcaagaaatgcactgaaggcccaattgacctggtctttgtgatcgatggatccaagagtcttggagaagagaattttgaggtcgtgaagcagtttgtcactggaattatagattccttgacaatttcccccaaagccgctcgagtggggctgctccagtattccacacaggtccacacagagttcactctgagaaacttcaactcagccaaagacatgaaaaaagccgtggcccacatgaaatacatgggaaagggctctatgactgggctggccctgaaacacatgtttgagagaagttttacccaaggagaaggggccaggcccctttccacaagggtgcccagagcagccattgtgttcaccgacggacgggctcaggatgacgtctccgagtgggccagtaaagccaaggccaatggtatcactatgtatgctgttggggtaggaaaagccattgaggaggaactacaagagattgcctctgagcccacaaacaagcatctcttctatgccgaagacttcagcacaatggatgagataagtgaaaaactcaagaaaggcatctgtgaagctctagaagactccgatggaagacaggactctccagcaggggaactgccaaaaacggtccaacagccaacaggatctgagccagtcaccataaatatccaagacctactttcctgttctaattttgcagtgcaacacagatatctgtttgaagaagacaatcttttacggtctacacaaaagctttcccattcaacaaaaccttcaggaagccctttggaagaaaaacacgatcaatgcaaatgtgaaaaccttataatgttccagaaccttgcaaacgaagaagtaagaaaattaacacagcgcttagaagaaatgacacagagaatggaagccctggaaaatcgcctgagatacagatgaagattagaaatcgcgacacatttgtagtcattgtatcacggattacaatgaacgcagtgcagagccccaaagctcaggctattgttaaatcaataatgttgtgaagtaaaacaatcagtactgagaaacctggtttgccacagaacaaagacaagaagtatacactaacttgtataaatttatctaggaaaaaaatccttcagaattctaagatgaatttaccaggtgagaatgaataagctatgcaaggtattttgtaatatactgtggacacaacttgcttctgcctcatcctgccttagtgtgcaatctcatttgactatacgataaagtttgcacagtcttacttctgtagaacactggccataggaaatgctgtttttttgtactggactttaccttgatatatgtatatggatgtatgcataaaatcataggacatatgtacttgtggaacaagttggattttttatacaatattaaaattcaccacttcag

SEQ ID NO: 17814 - protein, 537 aa, Homo sapiens [sequence omitted]

SEQ ID NO: 17815 - DNA, 1752 bp, Homo sapiens
  CDS (12)..(1085)
tttttcttaggatggctggctgtggtgaaattgatcattcaataaacatgcttcctacaaacaggaaagcgaacgagtcctgttctaatactgcaccttctttaaccgtccctgaatgtgccatttgtctgcaaacatgtgttcatccagtcagtctgccctgtaagcacgttttctgctatctatgtgtaaaaggagcttcatggcttggaaggcggtgtgctctttgtcgacaagaaattcccgaggatttccttgacaagccaaccttgttgtcaccagaagaactcaaggcagcaagtagaggaaatggtgaatatgcatggtattatgaaggaagaaatgggtggtggcagtacgatgagcgcactagtagagagctggaagatgctttttccaaaggtaaaaagaacactgaaatgttaattgctggctttctgtatgtcgctgatcttgaaaacatggttcaatataggagaaatgaacatggacgtcgcaggaagattaagcgagatataatagatataccaaagaagggagtagctggacttaggctagactgtgatgctaataccgtaaacctagcaagagagagctctgctgacggagcggacagtgtatcagcacagagtggagcttctgttcagcccctagtgtcttctgtaaggcccctaacatcagtagatggtcagttaacaagccctgcaacaccatcccctgatgcaagcacttctctggaagactcttttgctcatttacaactcagtggagacaacacagctgaaaggagtcataggggagaaggagaagaagatcatgaatcaccatcttcaggcagggtaccagcaccagacacctccattgaagaaactgaatcagatgccagtagtgatagtgaggatgtatctgcagttgttgcacagcactccttgacccaacagagacttttggtttctaatgcaaaccagacagtacccgatcgatcagatcgatcgggaactgatcgatcagtagcagggggtggaacagtgagtgtcagtgtcagatctagaaggcctgatggacagtgcacagtaacagaagtttaaataaaaatgtcttcagctccatgctcaaggttgaaagggttacctgtaaatttctgcccacataacattatactcatccctagtagtgcattttgggagttggggtgggaaggggtatgggaaggatagactcataattaaaatgtctaacatgtctctgttgagaaatttatttaatgtaaggaacttgggtgttaatagttgagagctgtttagtaataacccagttttcttgaggtctgtttactttatactttttaaaaacttctgtagttcttttggccagtgtgtttgcattatctgtgcattaatggtcctcatctgactcctgcattgtgtcttatttttctgcatggattggcataagaccattactaaaatttggcacctgtgagatgtttgatattatgaacaggaaacataatttaatgtatgaatagatgtgaatttgggatttcaaaatagatgaataacaactattttatagtaaagttattgaaatggaaatgaaaacagccagtaacttatgtttcagaatgtttgtaacacacttcatggtgttcccataggctttgctgtctagtcttatagtttgaggtttttttggtctgcatttttctttttgattacaaaatttataatttaataaatactagagtttatc

SEQ ID NO: 17816 - protein, 358 aa, Homo sapiens [sequence omitted]

SEQ ID NO: 17817 - DNA, 2900 bp, Homo sapiens
aacaactttagtacttggctttgtgtgaaagaaaacagaattccctatgtaatacccaacacaccatactcatgcaataaatattggtgaatacaggtgctgtactagagatgacaaaagtacaattaagagtcctatttttcactggatctactagttgaataaggatgccatatactaaagcatagaaaagttaaatatccattccctataaaatctaagaaatactatgcagtaatatgtcataaattgccaaataataatttactgtaatacagaaaaagatctgcacctatgtatgaaaagattctcagaaaactaagaataaagggaaattctaacttgatacatcctgtgcacctcaagtctatagcaaaagttacatttcattgagaaattttgagcacaatttaagtaagaggagaagataagaaagaagaaataaagttcactattcgtatatgatatagtcatttgtataaaatccaaaacagcaaactactagaactgagaaaattcagcaaggttgtctaatataagattaatttataaaaagcagttgttttttctataccgagagatcagcaatcttttttaaatgttttcagctttgtgggccatatggtctctgtcataactataactgctgatgtagtatgaaagcagccttagacatcatgtcaagacatggcaatgcctgtgttccaataaagctttctttgtaagtagatggcaagcttggatttggcctgtgagccataaatttctaacccctgccatttatcatgagaaacccacttagaaaatagtctaacaaaaattaacttaattaaaaacgcataaaaccttcatgggaaaaaaaaaatctaagtttattagaaaataaaagattgttatgtgatatatggcttaacctagtaatgcctgttttctttaaagcacatcagtgtctcctgttcaaaattttttttttcctagaaacttgacaaattcattttaaagttagcatagaccaatacaggtccagaattagctgagtcagttttgacagaaagaggaaggaaggaacactagacctacaaggtaaatgagagttactgtaaaattatactaataaaaacaacataatgctagcaaaagaaaggcaaatagattggcataaactagtaatctcagaaagattcatgtatatttgacaacttggtatatgatgtggcacaactaggtagtgaggttgcttaaagaagatgattatttagatttagtaggagtactggctatttggaaaaaaaagctagatccctactttcaactttatatgcaaaggctaactcttgaaggattaaagacctaaataagaaatataacacttatatttaatgaattcacttatatttagtgaatattcacttatatttagtgaatagtaggctgggcatggtggcttatgcctgtaatcccagcactttgagtggtcaggagttcaagaccagcctggccaacatggtgaaatcctacctctactaaaaatacaaaaattagctggtatggtggtggacacctgtagtcccagctactcgggaggctgaggcaggagaatcacttgaacccaggaggcggaggtttccgtgagccaagatcgtgccactgcactccagcctcggtgacacagtgagactctatctgaaaataaataaataaataaatgtgaatagtagaaattttggagaataactacatcatagggatcatagaacataatgttcaaatttagtagatctgattacatcagaattaaagatttctgttaaaagaactatacacagagttaaaagtcagatgtcagctttggaacttttaaaacctaaagggaataatacctgtaatatattaagaactcctaaaagttaacagaaacaaagaacaatagcttttaaaaaaataggtaaaagatactaacagacaatttaaataaagggtagctaagtgctaacaggtagatgagaagatagacaaactcactagtaatcagaaaaaaatgaaagtaaatgagatacaatttttcacccatcaaaatgacaaatatttaaaggttttctgatgccaagtattgggtatggtgtagatatctgtgtacttacgatgtgagtgtaaactaatattgtcattctgtaaaccagtcaataattaaatcagaagtgtttaatccctctgacccagcactcagaggaatttttaaacagatctttgaggatataatctttgtagctgcatagtttgtagtagtggggatttggagatagcctagctaaatatccatcactggtaaatagagcaaataagaaaaatgaaatgggagtaacaatggtgagatctttaaaactagatgaaactttaaaacatacagttgagagaaagaaacaatgagattcataaatatttaagaaaatagaaaaagcacagtagaaggaaatcggagtagagataataggaggaaagaggaaacaagtttgaggaaatatcacttgctaaatttatttatattatatttctatagatgaagcaaggatgatacagattcttttttctggatgaagcctggcttgaaaaaaaaacaaatggggctgggcacggtggctcatgcctgtaatcctagcactttgggaggccgaggcaggcagatcatttgaggtcaggatttcaaaaccagcctgatcaacatggtgaaaccccatctctactaaaatacaaaaattaggcatggtagcaggcgcctgtaaccccagctattcaggaggctgaggcaaggagaattgcttgaacccaggaggcagaggttgcagtgagccaagatcacaccactacaccccagcctgggtgatagagtgagactccatctc

SEQ ID NO: 17818 - DNA, 1870 bp, Homo sapiens
  CDS (223)..(1644)
gtagaaaaccagagtgagaaggagttactgtgccggctgcagaagctgcacctccagcaccagaacgtcacatgtgagaaggaaaagctgctggaacggcagcagcagctgcaggaggagctgcagtgccatgaggcagagctgcagcacctcagggatacggtggcctccttcaaagagagcaatgagaaggacacagagacgcacgctcagcttcaggagatgaagcagctgtaccaggtcagcaaggacgagctggagcggcagaagcacatgtatgaccagctggagcaggacctcctgctctgccagctggagctgaaagagctcaaggcctcccaccccattccggaggacaaaggaaagtgtgctaataagtgtgacacactgctgtccagactgacagaattgcaggaaaagtacaaggccagccagaaggagatggggcagctgcagatggagcagtgtgagctcctggaggatcagaggaggatgcaggaggagcagggccagctgcaggaagagctgcacaggctcacactgccactgccaaagagtggcctcttactcaagagtcaggagctactcaccaagttagaagacctgtgtgagctgcagctgctctaccaaggcatgcaggaggaacagaagaagctgatacagaaccaagactgtgtattaaaagaacaattagagatccacgaagagctgcgacgtttcaaagagtctcatttccaggaggtgttggagaatcccgatgattccaaattggctaagtcctccaaatgtaatcgaaacaagcaatccaagctgctcatggagcagatgcaggccctgcaggtgatgtatgacgccggtcaggcgaagcaggagctcttgcagcaagagcaagggaggctcctagaggagcggaagaggctgcaggcagacttgcagctctgcctggaagaaatgcagctgcttcaagtccagtccccttctataaaaatgagccttgagtcctacgggaagagctatggtagcatggtccccagcaatgagaactgtcgcaagacttatgataccactgtggatgacaatgagagctattacaagagttacaccagcacccagaccagcagcaagagctttctcaagagctatgacagcagcaccagtgccagtgaggcctatgggaagagttactgcactaccagcaacagcagcattacctataagaagagttacggcagcaccagtagctctgacacctgccagaagagttttgtcagcagctgcactgacgaggaacctgctgagcctgaagacatggagcgctttgaggaaatggttgtgaaagtgctgatcaagctgcaggcggtgcaggccatgtaccagataagccaggaggaacacagccagctgcaagagcagatggaaaagttactggccaagcagaaagacctgaaggaagagctggatgcctgtgaaagggagttcaaggagtgcatggaatgccttgaaaagcccatggccccccagaacgacaagaatgagaacatgtttgggttgtggaagcctatggtattcttggctattgcagctgtggctctgtatgtgttacccaacatgcgacagcaggagtcagagttctgcctcatggagtgatggcagaccttggccagcgcgagggcagatccccagtggccaccaccctcagctttgggcaggacacactgtgccagaaccctccccatatgttccatgtgtccccatctcctcagcctcagtcacccaggctgaaaaggcttgtggggagcggctgacttccatctcctgccttgtgtaagaacctgagttccttgtaattaaatatcaactgaattacatg

SEQ ID NO: 17819 - protein, 474 aa, Homo sapiens [sequence omitted]

SEQ ID NO: 17820 - DNA, 2028 bp, Homo sapiens
  CDS (364)..(684)
acaagaacacccaagactacaagcagttcattgtttttacagatagacttcagccaaccactgaagcagcagagatggaatttttaaatagacacaaactagagacagttcctttggtaaggcacaaaggtgaggcttctcagccccatagtggggctgcatgcatacagagaaggtctccacctcgggacagcttcttgaatccggtggatatcaactgtcactgtgtgtcagaatcaccttggggcttttaaaaaataatgatgcttgggcacccactcccagagctcaagtttacctgatctaaggcatgtgcctgggcattggtgtttctttagagcgcctccgtcccaggtgaagctaatggatagccagccctactttacgaatgaaccacagctcaaaatcttgtataaacaatttctctctccaacaccttatgtactcagttccactggatgtcttgcgctttatatgcttgaaactgagttcttgatttgggacccttccctacctggcccttgctcagggttccccatcttggtgagctgcactacccagcattctgtagtgaccagaatcccaagaactccccttcattctcatttctctgcccatcttctcccctgcccgcccatatacaattcgttctcggtgctgaggctattactttccaactgcacctagatatgtccacggctcgtcacctcccctgcttctgatgtagtcaaagctaccgtcatttgttctagggctactccctggcctctgggattccacttttgtctctttaagttgttctctgcagagtaggttgagtgcctttttctggcttaagacccatcaaaggctttctgctgtagagaattcaaacccaaacttttgcccaagaccagaaggccctgtggaatccgagcccccagatcccacacctctctcccctgctagttagcttgaagcaccaagctctaaagtctttccatttactgttcttttcaccgggaatgctttttcctccaccctttacaggctggcttcttcttcaccttcatgtcttagtctaagacatgacaattaactgcttgtagtcatgcttttgttttgtttttgtttttgtttttaaatcttggcactattgacatttggggctggaaaatttctttgtcgttggaacttttctgtacattataggatgtttagtctctactcactggatgacacaataatctgctccccagttgtgataagaaaaaatgtctctagacaatgccaaatgcctcatgaggacaaaatccctgccaactgataactactagcttaaatattaacttcttgaacaggtattctctgttctccaggctttaagtctccaggtgtatttctcaatcttcatatcctatttgttactttcatagaacttttctcaccttgaaattgaatatttatctagtaaatatctgtgtcatagtcccactagactatcttgactatttcattcaattctgtaatgatagcattgcgtacggctcctggtatgcagtagatgcttaataaacttctgttgaagaaatgcatgcacgcatgaatgaatgcatgagcaaacaaagactgctaggcaggcaagtgccttcccgccagggttagagagattatctagcagtgcaaaaagaccatggactaaaaaggaatgagataatgccccttgcagagacatggatgaagctggaagccatcatcctcagcaaactaacacaggaacagaaaaccaagtaccgcatgttctcactcataagtgggaactgaactatgagaacatagggacacagagagagtaacagcacacatcggggcctattggggtgggggtgagggtgaggggaggggaagtatcaggacaaatagctaatgcatgcagggcttaacactagggtgacgagttgataggtgaagcaaaccaccatgccacacatacagctatgtaacaaacctgtaagttctgcacatgtatcccggaatttaaagtaaaat

SEQ ID NO: 17821 - protein, 107 aa, Homo sapiens
MDSQPYFTNEPQLKILYKQFLSPTPYVLSSTGCLALYMLETEFLIWDPSLPGPCSGFPILVSCTTQHSVVTRIPRTPLHSHFSAHLLPCPPIYNSFSVLRLLLSNCT

SEQ ID NO: 17822 - DNA, 2845 bp, Homo sapiens
  CDS (613)..(2115)
gttttccggcgcggcccagcgagctcggcaacctcggcgcagcgagcgcgggcggccagccagggccagggggcggtggcggccaaggtccgaccgggtgccagctgttcccagcccccgcctcgggcccgccgccggcgccgccatgggcaagaagcacaagaagcacaaggccgagtggcgctcgtcctacgaggattatgccgacaagcccctggagaagcctctaaagctagtcctgaaggtcggaggaagtgaagtgactgaactctcaggatccggccacgactccagttactatgatgacaggtcagaccatgagcgagagaggcacaaagaaaagaaaaagaagaagaagaagaagtccgagaaggagaagcatctggacgatgaggaaagaaggaagcgaaaggaagagaagaagcggaagcgagagagggagcactgtgacacggagggagaggctgacgactttgatcctgggaagaaggtggaggtggagccgcccccagatcggccagtccgagcgtgccggacacagccagttctcggtggaacttaaaatgctgtgagacaccagacagacagatactgtgaacttggagctctctaatgaagggataccaaagtcttgtattcaatttttttttccttaaattgtcagccgaaaatgagagcacacctattcagcaactcctggaacacttcctccgccagcttcagagaaaagatccccatggattttttgcttttcctgtcacggatgcaattgctcctggatattcaatgataataaaacatcccatggattttggcaccatgaaagacaaaattgtagctaatgaatacaagtcagttacggaatttaaggcagatttcaagctgatgtgtgataatgcaatgacatacaataggccagataccgtgtactacaagttggcgaagaagatccttcacgcaggctttaagatgatgagcaaagagcggctgttagctttgaagcgcagcatgtcgtttatgcaggacatggatttttctcagcaggcagctcttttgggcaatgaagatacagctgttgaggaacctgtccctgaagttgtaccagtacaagtagaaactgccaagaaatccaaaaagccgagtagagaagttatcagctgcatgtttgagcctgaagggaatgcctgcagcttgacggacagtaccgcagaggagcacgtgctggcgctggtggagcacgcagctgacgaagctcgggacaggatcaaccggttcctcccaggcggcaagatgggctatctgaagaggaacggggacgggagcctgctctacagcgtggtcaacacggccgagccggacgctgatgaggaggagacccacccggtggacttgagctcgctctccagtaagctactcccaggcttcaccacgctgggcttcaaagacgagagaagaaacaaagtcacctttctctccagtgccactactgcgctttcgatgcagaataattcagtatttggcgacttgaagtcggacgagatggagctgctctactcagcctacggagatgagacaggcgtgcagtgtgcgctgagcctgcaggagtttgtgaaggatgctgggagctacagcaagaaagtggtggacgacctcctggaccagatcacaggcggagaccactctaggacgctcttccagctgaagcagagaagaaatgttcccatgaagcctccagatgaagccaaggttggggacaccctaggagacagcagcagctctgttctggagttcatgtcgatgaagtcctatcccgacgtttctgtggatatctccatgctcagctctctggggaaggtgaagaaggagctggaccctgacgacagccatttgaacttggatgagacgacgaagctcctgcaggacctgcacgaagcacaggcggagcgcggcggctctcggccgtcgtccaacctcagctccctgtccaacgcctccgagagggaccagcaccacctgggaagcccttctcgcctgagtgtcggggagcagccagacgtcacccacgacccctatgagtttcttcagtctccagagcctgcggcctctgccaagacctaactctagaccaccttcagctcttttattttatttttttagttttattttgcacgtgtagagtttttgtcatcagacaaggactttgatcctgtcccctttggcatgcgggaagcagccgcggggaggtaatgaattgtctgtggtatcatgtcagcagagtctccaagccccacgaaccctgaggagtggagtcatacgcgaaggccatatggccatcgtgtcagcagagagagtctctgtacacagccccgtgaaccctgaggagtggagtcatacacgaagggcgtgtggccatcgtgtcagcagagagagtctctgtacacagccccgtgaaccctgaggagtggagtcatacgcgaagggtgtgtggccaggctgcagagctgcgtgccgtttgtgtccgagcatcacgtgtggctccagcccttgtttctgccagtgtagacacctctgtctgccccactgtcctggggtcgctcttgggaggcacaggcatgggtgtgtctggcctcattctgtatcagtccagtgtgttcctgtcatagtttgtgtctcccaggcaggccatggtaggggcctcgcaggggccattggggagcacagggccaggctggggtgaggagagctcccctgttttctgtttaattgatgagcctgggaaaggagtgtgttctgcctgcccgttacagtggagcgttccgtgtccataaaacgttttctaactggg

SEQ ID NO: 17823 - protein, 501 aa, Homo sapiens
MKGYQSLVFNFFFLKLSAENESTPIQQLLEHFLRQLQRKDPHGFFAFPVTDAIAPGYSMIIKHPMDFGTMKDKIVANEYKSVTEFKADFKLMCDNAMTYNRPDTVYYKLAKKILHAGFKMMSKERLLALKRSMSFMQDMDFSQQAALLGNEDTAVEEPVPEVVPVQVETAKKSKKPSREVISCMFEPEGNACSLTDSTAEEHVLALVEHAADEARDRINRFLPGGKMGYLKRNGDGSLLYSVVNTAEPDADEEETHPVDLSSLSSKLLPGFTTLGFKDERRNKVTFLSSATTALSMQNNSVFGDLKSDEMELLYSAYGDETGVQCALSLQEFVKDAGSYSKKVVDDLLDQITGGDHSRTLFQLKQRRNVPMKPPDEAKVGDTLGDSSSSVLEFMSMKSYPDVSVDISMLSSLGKVKKELDPDDSHLNLDETTKLLQDLHEAQAERGGSRPSSNLSSLSNASERDQHHLGSPSRLSVGEQPDVTHDPYEFLQSPEPAASAKT

SEQ ID NO: 17824 - DNA, 1978 bp, Homo sapiens
  CDS (267)..(1730)
aaagcaaaggcgtcaggaatggttcttcctcaggtattttttctaaatgtgagatcaaggaattaccaccaaaaaaggagagtaatacaggagaaatattccagacagtaatgttggaaagacatgaaagccacgacatacaagatttttgcttcagagaaacccagaaaaatgtacatgactctcagtgtctgtggaaacatgattgaagacattataagcgagtgcgtgtgacctataaggaaagtctcattggtagaagagacatgcatggtagaaaggatgatgcacaaaagcagcctgttaaaaatcagcttggattaaacccgcagtcacatctaccagaactgcagctatttcaagctgaagggaaaatatataaatatgatcacatggaaaaatctgtcaacagtagttccttagtttccccaccccaacgtatttcttctactgtcaaaacccacatttctcatacatatgaatgtaattttgtggattcattattcacacaaaaagagaaagcaaatattgggacagaacactacaaatgtaatgagcgtggcaaggcctttcatcaaggcttacattttactatacatcaaataatccatactaaagagacgcaatttaaatgtgatatatgtggcaagatcttcaataaaaaatcaaaccttgcaagtcatcaaagaattcatactggagagaagccatataaatgtaatgaatgtggcaaggtcttccataatatgtcacaccttgcacagcatcgcaggattcatactggagagaaaccatataaatgtaatgaatgtggcaaggtctttaatcaaatttcacaccttgcacaacatcaaagaattcataccggagagaaaccttataaatgtaatgaatgtggaaaggtcttccatcaaatttcacaccttgcacaacatcggacaattcatactggagaaaaaccttacgaatgtaacaaatgtggcaaggtgttcagtcgcaattcctaccttgtacaacatctgatcattcatactggagagaaaccttacagatgtaatgtatgtggcaaggtcttcagtcacaagtcatccctagtaaatcactggagaattcatactggagagaaaccttacaaatgtaatgagtgtggcaaggtcttcagtcacaagtcatccctagtaaatcactggagaatccacactggagagaaaccttacaaatgtaatgaatgtggcaaggtcttcagtcgcaattcataccttgcccaacatctgataattcatgccggtgagaaaccttataagtgtgatgaatgtgacaaagcattcagtcaaaattcacatcttgtacaacatcacagaatccatactggagagaaaccttacaaatgtgatgaatgtggcaaagtcttcagtcaaaattcataccttgcatatcattggagaattcatactggagaaaaagcttataaatgtaatgaatgtgggaaggtcttcggtctaaactcatccctagcacatcatcggaaaattcacactggagagaaacctttcaaatgtaatgaatgtggcaaagcttttagtatgcgttcaagcctcactaatcgtcatgcgatccacactggagagaaacatttcaaatgtaatgaatgtggcaaactcttccgcgacaattcatatcttgtacgtcatcagagatttcatgccggaaagaaatctaacacatgtaattaatgtggcagagtgttcagttagcattaaagccttgtaagacatacaataatttatactggagaaaaactttgcaagtataatgaatgtagcagagcctttagtttttgttcaaggcttaataaccgttagctagaccatagaggacagaaactttactaatgtactgaatgtggcaaggtcttaaggtaaaatctgagaccaggatttttcaaagaattcttgctggtgagaaacctaacaaatgt

SEQ ID NO: 17825 - protein, 488 aa, Homo sapiens
MHGRKDDAQKQPVKNQLGLNPQSHLPELQLFQAEGKIYKYDHMEKSVNSSSLVSPPQRISSTVKTHISHTYECNFVDSLFTQKEKANIGTEHYKCNERGKAFHQGLHFTIHQIIHTKETQFKCDICGKIFNKKSNLASHQRIHTGEKPYKCNECGKVFHNMSHLAQHRRIHTGEKPYKCNECGKVFNQISHLAQHQRIHTGEKPYKCNECGKVFHQISHLAQHRTIHTGEKPYECNKCGKVFSRNSYLVQHLIIHTGEKPYRCNVCGKVFSHKSSLVNHWRIHTGEKPYKCNECGKVFSHKSSLVNHWRIHTGEKPYKCNECGKVFSRNSYLAQHLIIHAGEKPYKCDECDKAFSQNSHLVQHHRIHTGEKPYKCDECGKVFSQNSYLAYHWRIHTGEKAYKCNECGKVFGLNSSLAHHRKIHTGEKPFKCNECGKAFSMRSSLTNRHAIHTGEKHFKCNECGKLFRDNSYLVRHQRFHAGKKSNTCN

SEQ ID NO: 17826 - DNA, 1916 bp, Homo sapiens
  CDS (8)..(721)
gtctatcatggcagctcggactggtcatacggccttgagaagggtagtctcgggatgccgtccgaagtcggcgacagcggccggggcgcaggcgcccgtgcggaatggcagatatttagcttcctgtggtatactgatgagcagaactcttccactacatacctcaattttgcctaaggagatatgtgcacgaactttcttcaaaatcactgcaccattaataaacaaaaggaaagaatattcagagagaagaattttaggatattcaatgcaggaaatgtatgatgtagtatcgggagtggaggattacaagcattttgttccttggtgcaaaaaatcagatgttatatcaaagagatctggatattgtaaaacaagattagaaattggatttccacctgtgttggagcgatatacatcagtagtaaccttggtgaaacctcatttagtaaaggcatcttgtactgatgggagacttttcaatcatttggagactatttggcgttttagcccaggtcttcctggctacccaagaacttgtaccttggatttttcaatttcttttgaatttcgatcacttctacattcccagcttgccacactcttttttgatgaagttgtgaagcagatggtagctgcctttgaaagaagagcatgtaagctgtatggtccagaaacaaatatacctcgggagttaatgcttcatgaagtccatcacacataaaggcaaaaaagaactggtgccacctgcttctgactttagtttgttcacttttaggaagtattttcatgacatgttttcagaagccagaaagcatttgttaaacgcagctttggttataaacctgcaccattgaaattttgcacatagaatatagactcacttgtacatagaattatttcttcaagtataattcaaaataatatggacattatcatgttctgcattacaataatgggatgtcatcaccattgctagaatactggcatgattcttctgagcagaagttgaaactgtaaatttaaaccttttaattatcaccttacctgaaagaggttagttaagatattcacacagtatgtattatattaaccatatcacacttaagttattaaattcagactatttgtaacttattgttatagggcctgccgtatggcttaggatatttgagtaatcatatatttaaagtaaaaactttgggctgggcacagtggctcacacctgtaatcccagcacttggggaagctgaggtgggcagatcagttgaggtcaggagttctagaccagcctggtcaacatggcgaaaccccatctctactaaaaatacaaaaattagctgggcgtggtggcacacacctgtaatcccagttacttgggaggctgaggcacaagaatcgcttgaacccgggaggcggaggttgcagttagccaagatcgccctgctgcactccagcctgggcaacagagggagactctgtctccaaaaacaaaaacaaaaactgttagtgaaggttccctgggacttttgatattttaaaaattgttcttatgactagtagataaattcattgccataatgaggctagctcccagataaacagtgtattttcttcttttttttttttttggtgagtggtccagagctttaagctacttttccagtagtttgccactttctccgaggtagtttggctgctctttcagtgatgctaattgtgtgtcaaattttgtctacaacagtaggcaacagatgaagataagttggttgaatgtctccagcactatgcatccctattttctatttattgtgtacactcactttcagtaatgtgtttcaaactggtattttttaaaaaacaaatcaatgtaaggactgaagttgaagtagcaatgtaataaagttaatttgttt

SEQ ID NO: 17827 - protein, 238 aa, Homo sapiens
MAARTGHTALRRVVSGCRPKSATAAGAQAPVRNGRYLASCGILMSRTLPLHTSILPKEICARTFFKITAPLINKRKEYSERRILGYSMQEMYDVVSGVEDYKHFVPWCKKSDVISKRSGYCKTRLEIGFPPVLERYTSVVTLVKPHLVKASCTDGRLFNHLETIWRFSPGLPGYPRTCTLDFSISFEFRSLLHSQLATLFFDEVVKQMVAAFERRACKLYGPETNIPRELMLHEVHHT

SEQ ID NO: 17828 - DNA, 1834 bp, Homo sapiens
  CDS (653)..(1054)
aaggaggaagctggttcctggcctgcccagttgcgtgtagattctgcagaagtggcctccctttggggcagtgtggaaaaggggagaagagaggcctcattctcgtgcaggagcctccggccatcctgatgctgcccagccaggtggccttgtctgagcgagaagctctgggatggacgctgacccggctctgagccgcacacgccacacacacgtgtgctcccagggtgggccatgggcacagtggagggtggtggctgtgtttgtctctggatttctggggtcccaaaggtccctctctgctgtcacctctctgagtgtccttggggagagttttccaatctctgtaggtgaaaccatgtttggaaccctggaaagcatgtggagctggggcccccagagaggcctcctcccctggtgccagggtgcccacttgcagcagctgggaggctggcctccctgagaaaccaccagaagcaggcagcctcagctggacctgtgggcctgtcatagggagtgtggcagagggccttccatctctccccagggttgtgtctcgcaagtccctgggctgaagtgtgggaggaagcaatgtccaagagttggggaggaccccggccagccaggggaagaggccctctgtgccccatccatgtacagcctcctgccctgcctgggtgtgatggctgtcccatgggggagtgggaggcccaccagagggatggcttggatggggtcagagcccccgagggagggagtgcacagtcacgtgtggccccaggagtgcctggagcagctcccgcctgagctgagggtgccctgtcccaagtgggacactcacccacagggcccctcctcactcccgtcccttccccgtccatcatggctcgggggtgtcactcttgtccccactgcctggattttctttcagggagccccagactctggtaaatgctctgcttcctcctgcctggatacttctaatgaccctgacgacctggacgtgctcagaacccggcatgccaggcacacccggaagcggaggcggctggtgtgagcagcaggtgagtcctgagtggggaggccactgccctacaacccaggggacagagtggtgtccagatggcagggggccttggcctctgctcggctctttggcgctcacagcaggtgtgctgggttaggtgggcaggtccagggtcatggaggccctccagggggagaagcatttaacccacatccttcctgctggccacccatgcctcgggccttggcaccactgtgcccctgaccataggctcattccctgcctttggggtctgggctcctccctggccgctgtgctctggtggtgccctgttcccgtgcattgctgcgtcgtctcccagcttgtaaaacgatcaccatccccaaccgcagccaccaggctggctcttcactgctggagccctggtgccctggcctggcccttggcgcatgtgggtcaggtttaccaagcagactgggcgtggccggcgctggggtggtcttggttcctgtttgtctgtcccagccctgcttggggtctggctggggtcaagggcaccccccacctggtgttcctgtgttccaggacaagcactttctcagaagcccgtggccctgctgacgagagacagcccacccccagcctgcaagagaggcagccagaggccaggtatctgctggccgctgactgaccaggtccgcagtgaacagaggcgggcctgccgactgactgtgtggcatggagcatggctgttccccaagtgcacacctgaacacttggaggaataaagttctgtttttaattgtg

SEQ ID NO: 17829 - protein, 134 aa, Homo sapiens
MYSLLPCLGVMAVPWGSGRPTRGMAWMGSEPPREGVHSHVWPQECLEQLPPELRVPCPKWDTHPQGPSSLPSLPRPSWLGGVTLVPTAWIFFQGAPDSGKCSASSCLDTSNDPDDLDVLRTRHARHTRKRRRLV

SEQ ID NO: 17830 - DNA, 2026 bp, Homo sapiens
acaccctcggattgacgtgcgcacgcgcaccggttaccttcaggagcgccgaagaaggaaagaagaacacagagcccgaggcaaagcttaagtgcttacgcttttgtcgggaggtacagacccagctctgcgagagccaggggaaaaggaagagaggcagggaaggaaaggcagcaagtacaaggtgatgaatgactgcactggccattgcttcatgaagagccacgaaaaaacagagccggtttctcagcaggtagctggctgctcagtcacaaaggacctctttggacaggctttatggaaatactgtgcctaggacagtcgctcaaaggcaggagggagagaaaatgcatccgcaagctcactttgtcttctttcttctgctggtcaaaatttgctggctcgggcagttaacgccctcacacatccgagttgtgtcacctggcccctttggtagccactggggaagccagatctaggcatgtggcctgatggctcctgcggtggaaccacatgctcacactcagtcagtcaccactgggatgccctgggcagggcaggctgagtgactgggagatagctgagcctaagatatctaagcaagcacctgtgatgtatgcactgcagtgtccaaatgtgaaaaagcaagaaagggagatagaagcatatttttttctggagagaaggaggaaaccaccaggagaatacaaacagaaaaaagacatgctcatcatgccctgcaaactcctatgaactggaactacagcagctgttctgccagggacaggttcttctctaaagttccagctctctggagggagaaagccctgactttggatggagttgagctctgtcgcccaggctggagtgcagtggcaccatctcagctgactgtgacctccgcctcctgggttcaagtgattctcctgcatcagcctcccgagtagctgggactacaggtgcacaccaccatgcccggctaatttttgtatttttagtagagacggggttttgccatgatggccaggtttggtctcaaactcctaacctcaagtgatccaccctcctcagcctcccaaagtgctgggattacaggcgtgagccactgcgccccgcctacttgaattttttttttctttttttttttttgagacagagttttgctcctgttgcccaggctggagtgcaacggcatgatctcgactcactgcaacctctgcctcctgggttcaagtgattctcctgcctcagcctcccaaatagctgggattacaggtgcccaccactgtgcctggctgattgtatttttagtagagatgggtttcatcatgttggtcaggctggtcttgaactccagacctcaggtgatcggactgcctcggcctcccaaagtgctgggattacaggcatgacccactgtgcccggacctgcttgaatttttatgatgagcatgttggcagatcacgactgccagctccatgacagcaagaaccttgtatgactttttcatgatggatgttcatctgtgccatctgtaaatattgaataaatatttgtggaatacatgaatccaaaagtgaatggaatgataaagagggaaaggatcatgacatctactacagcatttggcacagacccagctgtctgcagtactatcaagagatgacatggacttcaaggatcaaacaggggagaaaaaggcttaaaagaaaaacaagtctccatcaaaggtaataaccacaatgagaactatacatagctatgtgcttataggtcttagttcacattcccctcattaaaattatagctcaagaaataaagggctgtttaatgacttgggtatataaatatacttcatttgtatattttttacttgctaaaatctatccaaattggtattacctcaaaccataatcttctactgtattttataattttactttattgccatgtatttttcccactgatgttcacaaattcacaggaaacatcagccatgtactaaataaaatatgaattgaatcg

SEQ ID NO: 17831 - DNA, 1658 bp, Homo sapiens
atcatggccacaagaatttgctctgtcgagggtcgtggtgccagctaggtgaggtttggggctctgtcactattggtcagtgtctgttacatacttgggccccagcagtgccctggcactgcacccccaactccatgggcacatttgtcctgttctcttcatctcagtttcctctcctgtaaaatgggtgcattgactgtgcagtggttcctccaaggtcccctgatccccagatgcggcccagggctctgccaaccagtctcaatgtttcaaggtggccaccatgaactttctgcatgtcgaagtaaaacacttcatgcctttctgcacagaggttagccctccacaggctctgggttcaaatcctggattccgttgatgccctgggcacgtccttaaagcccaccaagcctcagtttctccactgtaaaccaccgtcctggggggcatggtgaggatgaagtgggcttgtgcctgggacgttcctactcagccagtgccctgcctgaaacactaggatcgaactgtccattcagccaggcaccttcgaactcctcccaggcataatctctgtctggaaactccttgtgttgaataagatgggaaaatccatccatgagaactgaagccacaaacagcgcttgcaggacaagaggagagaaggtctttgggaggagatggccacatcgtttctagtccccacctcacacctgatcttggcctgtctggaacatgcagtgtgacccagggaaggccatgggtctcccagaggcccggtgaagcggggagcctttcctattcccagttaagggcctttgagaggcctcattttcttccctgaaggtctcgtccttccagcaaaatcagcgtcaacaacaggccctctttctggagcacctactgagtggcagtgttacaagcatcatcctattgaatcctcagctcaccccttgttgaggggcttctattactcttatctgaattctactcatgaggaaacaggtccagagaggttaagcaatgtgcctaagatcacacagcaaatgaggggacggagctgggatttgaacccttgcttatctgatccctaaccataggaataccaacattgtagttagttgttaactaatatgacctgcatgcaatgggcacatgccatggttggcaaccactgggctgaggcttctacacacgcacttgatagcttactctctgattttgctttttccacctctacgccctggaatgtcagttccacgaaggcagggatttgttttctgtcttatccaccactgtattttgtgcttagatggtgcctgggacaaactatttataggatgtttttcatttaatctcagtaaatctgtgaggtgggctggcgctgtggctcatgcctataatcccagcactttgggaggctgaggcaggtggatcatttgaggccaggagtttgagaccagcctggccaacctggtgaaaccccatctctactaaaaatacaagaattagctgggcatggtggtgggcacccgtaatcccagctactcgagaggctgagccaggagaatcacttgaacccaggaggcggaggttgcagtgagccgagatcgtgccattgcactccagcctgggtgacagcgaggctccgtctcaaattt

SEQ ID NO: 17832 - DNA, 3828 bp, Homo sapiens
  CDS (75)..(2921)
aagacaacgtcactagcagtttctggagctacttgccaaggctgagtgtgagctgagcctgccccaccaccaagatgatcctgagcttgctgttcagccttgggggccccctgggctgggggctgctgggggcatgggcccaggcttccagtactagcctctctgatctgcagagctccaggacacctggggtctggaaggcagaggctgaggacaccagcaaggaccccgttggacgtaactggtgcccctacccaatgtccaagctggtcaccttactagctctttgcaaaacagagaaattcctcatccactcgcagcagccgtgtccgcagggagctccagactgccagaaagtcaaagtcatgtaccgcatggcccacaagccagtgtaccaggtcaagcagaaggtgctgacctctttggcctggaggtgctgccctggctacacgggccccaactgcgagcaccacgattccatggcaatccctgagcctgcagatcctggtgacagccaccaggaacctcaggatggaccagtcagcttcaaacctggccaccttgctgcagtgatcaatgaggttgaggtgcaacaggaacagcaggaacatctgctgggagatctccagaatgatgtgcaccgggtggcagacagcctgccaggcctgtggaaagccctgcctggtaacctcacagctgcagtgatggaagcaaatcaaacagggcacgagttccctgatagatccttggagcaggtgctgctaccccacgtggacaccttcctacaagtgcatttcagccccatctggaggagctttaaccaaagcctgcacagccttacccaggccataagaaacctgtctcttgacgtggaggccaaccgccaggccatctccagagtccaggacagtgccgtggccagggctgacttccaggagcttggtgccaaatttgaggccaaggtccaggagaacactcagagagtgggtcagctgcgacaggacgtggaggaccgcctgcacgcccagcactttaccctgcaccgctcgatctcagagctccaagccgatgtggacaccaaattgaagaggctgcacaaggctcaggaggccccagggaccaatggcagtctggtgttggcaacgcctggggctggggcaaggcctgagccggacagcctgcaggccaggctgggccagctgcagaggaacctctcagagctgcacatgaccacggcccgcagggaggaggagttgcagtacaccctggaggacatgagggccaccctgacccggcacgtggatgagatcaaggaactgtactccgaatcggacgagactttcgatcagattagcaaggtggagcggcaggtggaggagctgcaggtgaaccacacggcgctccgtgagctgcgcgtgatcctgatggagaagtctctgatcatggaggagaacaaggaggaggtggagcggcagctcctggagctcaacctcacgctgcagcacctgcagggtggccatgccgacctcatcaagtacgtgaaggactgcaattgccagaagctctatttagacctggacgtcatccgggagggccagagggacgccacgcgtgccctggaggagacccaggtgagcctggacgagcggcggcagctggacggctcctccctgcaggccctgcagaacgccgtggacgccgtgtcgctggccgtggacgcgcacaaagcggagggcgagcgggcgcgggcggccacgtcgcggctccggagccaagtgcaggcgctggatgacgaggtgggcgcgctgaaggcggccgcggccgaggcccgccacgaggtgcgccagctgcacagcgccttcgccgccctgctggaggacgcgctgcggcacgaggcggtgctggccgcgctcttcggggaggaggtgctggaggagatgtctgagcagacgccgggaccgctgcccctgagctacgagcagatccgcgtggccctgcaggacgccgctagcgggctgcaggagcaggcgctcggctgggacgagctggccgcccgagtgacggccctggagcaggcctcggagcccccgcggccggcagagcacctggagcccagccacgacgcgggccgcgaggaggccgccaccaccgccctggccgggctggcgcgggagctccagagcctgagcaacgacgtcaagaatgtcgggcggtgctgcgaggccgaggccggggccggggccgcctccctcaacgcctcccttgacggcctccacaacgcactcttcgccactcagcgcagcttggagcagcaccagcggctcttccacagcctctttgggaacttccaagggctcatggaagccaacgtcagcctggacctggggaagctgcagaccatgctgagcaggaaagggaagaagcagcagaaagacctggaagctccccggaagagggacaagaaggaagcggagcctttggtggacatacgggtcacagggcctgtgccaggtgccttgggcgcggcgctctgggaggcaggatcccctgtggccttctatgccagcttttcagaagggacggctgccctgcagacagtgaagttcaacaccacatacatcaacattggcagcagctacttccctgaacatggctacttccgagcccctgagcgtggtgtctacctgtttgcagtgagcgttgaatttggcccagggccaggcaccgggcagctggtgtttggaggtcaccatcggactccagtctgtaccactgggcaggggagtggaagcacagcaacggtctttgccatggctgagctgcagaagggtgagcgagtatggtttgagttaacccagggatcaataacaaagagaagcctgtcgggcactgcatttgggggcttcctgatgtttaagacctgaaccccagccccaatctgatcagacatcatggactcgcccagctctcctcggcctggggctctggccaaggatgggctggaggtcattcagttggtctgtctcttccctggaaaccttctgcaaagatggtgtggtgtacgtggcttccctgtaaccacatggggcttggccatttctccatgatgagaaggactggaatgcttctccgggcaggacatggtcctaggaagcctgaaccttggcttggcatgccttctcagacagcacggcctgggctccaactcttcaccacaccctgtattctacaacttctttggtgttttgctcctcctgtggttggaaacttctgtacaacactttaaacttttctcttgcttcctcttctcttctcccttatcgtatgatagaaagacattcttccccaggaggaatgtttaaaatggaggcaacattttggccaacattggaaagcactagagggcaatgggattaaaccaacctgcttggtctctattagtcagtaatgaagacgacagcctggccaaccaagggaaaggaaattagtatctttagtttcagtcattccttgtaggatatggtttagctgtgcccccacctaaaatatcatcttgaattgtaatccctataatccccacatcaagggagagatcaggtggaggtaattggatcttgggggcggttcccccatgctgttcttgtgatagttctcacgagatctgatgattttataagtttgatagttcctcctgtgttcattctccttcctgccaccttgtgaagatgccttggttcctcttcactgtctgccatgattgtaagtttcctgaggcctccccagccatgtggaacagtgagtcaattaaacctctttcctttataaatt

SEQ ID NO: 17833 - protein, 949 aa, Homo sapiens
MILSLLFSLGGPLGWGLLGAWAQASSTSLSDLQSSRTPGVWKAEAEDTSKDPVGRNWCPYPMSKLVTLLALCKTEKFLIHSQQPCPQGAPDCQKVKVMYRMAHKPVYQVKQKVLTSLAWRCCPGYTGPNCEHHDSMAIPEPADPGDSHQEPQDGPVSFKPGHLAAVINEVEVQQEQQEHLLGDLQNDVHRVADSLPGLWKALPGNLTAAVMEANQTGHEFPDRSLEQVLLPHVDTFLQVHFSPIWRSFNQSLHSLTQAIRNLSLDVEANRQAISRVQDSAVARADFQELGAKFEAKVQENTQRVGQLRQDVEDRLHAQHFTLHRSISELQADVDTKLKRLHKAQEAPGTNGSLVLATPGAGARPEPDSLQARLGQLQRNLSELHMTTARREEELQYTLEDMRATLTRHVDEIKELYSESDETFDQISKVERQVEELQVNHTALRELRVILMEKSLIMEENKEEVERQLLELNLTLQHLQGGHADLIKYVKDCNCQKLYLDLDVIREGQRDATRALEETQVSLDERRQLDGSSLQALQNAVDAVSLAVDAHKAEGERARAATSRLRSQVQALDDEVGALKAAAAEARHEVRQLHSAFAALLEDALRHEAVLAALFGEEVLEEMSEQTPGPLPLSYEQIRVALQDAASGLQEQALGWDELAARVTALEQASEPPRPAEHLEPSHDAGREEAATTALAGLARELQSLSNDVKNVGRCCEAEAGAGAASLNASLDGLHNALFATQRSLEQHQRLFHSLFGNFQGLMEANVSLDLGKLQTMLSRKGKKQQKDLEAPRKRDKKEAEPLVDIRVTGPVPGALGAALWEAGSPVAFYASFSEGTAALQTVKFNTTYINIGSSYFPEHGYFRAPERGVYLFAVSVEFGPGPGTGQLVFGGHHRTPVCTTGQGSGSTATVFAMAELQKGERVWFELTQGSITKRSLSGTAFGGFLMFKT

SEQ ID NO: 17834 - DNA, 2708 bp, Homo sapiens
  CDS (105)..(1694)
tttatgctaccaggatttctaaagcacaccaagaggaaatagcaggtgctttcctagtgacactggatccacttatcagtcagctgctcacatttcagcctttcatgcaggtggttttggacagtaaattagacctgccatgtgaactgcagtttccacaatgtcttcttctggttgttgtcatggataagctgccatctcagcctaaggaagtgcaaaccctgtggtgcacagacagccaggtctcagaaacgacaaccaggatatctctactcaaagccgttttctacagttttgagcagtgttctggtgaactctctctacctgttcatttacagggattaaagagtaaggggaaagctgaggtggctgtcaccttgtatcagcatgtttgtgttcatctgtgtacatttattacttcctttcatccctcactgtttgctgaactggatgctgctctgctgaatgctgtacttagtgctaatatgatcacctctttgttagctatggatgcatggtgcttccttgctcgatatgggactgctgaactgtgtgcacaccatgtcaccatagtggctcatctgataaagtcatgccctggagaatgttatcaactcatcaacctatcaatactgttgaagcgtctctttttcttcatggcaccaccccatcagctggagtttatccagaaattttccccaaaagaagcagaaaatctgcctctgtggcaacatatttccttccaggcgttacctcctgagcttagggaacaaactgtccatgaggtcaccacagtaggcactgcagaatgcaggaaatggctgagcaggagtcgtactttgggagaactagaatctctgaacacagtactgtctgctttgcttgcagtatgtaattctgctggtgaagctttgggtacaggaaaacaaactgcaattatcgaagttgtgagtcagctatgggcttttttaaacattaaacaggtagcagatcaaccttatgttcaacagacattcagccttttacttccactgttgggatttttcattcaaactctagatcctaaactgatacttcaggcagtaactttgcagacctcgctacttaaattagagcttcctgactatgttcgtttggcaatgttggattttgtatcttctttaggaaaactttttatacctgaagctatccaggacagaattctgcccaacctgtcctgtatgtttgccttactgctagctgacaggagttggctgctagaacaacataccttggaggcgtttactcagttcgctgagggaacaaatcatgaagagatagttccacagtgtctcagttctgaagaaactaagaacaaagttgtatcctttctggagaagactgggtttgtagatgaaactgaagctgccaaagtggaacgtgtgaaacaggaaaaaggtattttctgggaaccctttgctaatgtgactgtagaagaagcaaagaggtcatctttacagccttatgcaaaaagagctcgtcaggagttcccctgggaagaagagtacaggtcagcgctgcatacaatagcaggggctttggaagcaactgagtcactactccaaaagggtcctgctccagcctggctttcaatggaaatggaggcgctccaagaaaggatggataagctaaaacgttacatacatactctagggtgaaacttatcactaggcagaactgggtttgatgctttgtcaactgaaaatacttatgtctgtacattttctaacagatataaaacaaattttgtaaagttgaatctagtgaaaataatctttatttgacatttagagaacaggattgtggggaatattcttattaagaactttggtacaatgtactacatgtggaacagtcaggaactgcctaggtccacaaagaaccatttactcagatagtctaactgtaaacaaataaataagctgcctaaggaaacctcagcaatttaaaatcatttatataatttatagctaaaattttttaaagttgtatttcataatagagcttactcttatgttaaagaatggcacaaaattaagctaaccagcttgaattacattttctttacttccagaattgtcctggaaaaagcagtaaattcgacctctcctcagctacttgctcttcatagaaactggcctcagtcaaatgcacaaaggctcttcctcctggaaaccagtactgtgagcctcaccacccagggcttttagccagcactcacagtcagtctcctacttcagttggcacagactggataatgagctcctgggatgggaaaagcaggccactttggggttttcttgtcccaaagcctgcttttgaggtattgattttttttaaaaaaagggaatcctttttcctaaagtttaactcacatctattgtcaccagttattatcttcccagttcagctccccttcttcttcccagccttcagcctctccctgcaacaaaataaagcacaccaagaacccactgaaacaaatcatatgcaaaaatcatacgcaaatttgaaaaagcaggaatttaaaatttatcttttgatgccagaaacactacctcgtactaagtaaaataacttagagctctaacagaaagttgaaaagtaggattacaaaaccatggcactggaaaatagcttttcaaaaaccataaaatccagtaaaaatc

SEQ ID NO: 17835 - protein, 530 aa, Homo sapiens [sequence omitted]

SEQ ID NO: 17836 - DNA, 2924 bp, Homo sapiens
tctcttgcttttggaagttaccacagggtctgcagaaacctgttgtataactgtagacactctctaatggttctcaaaggaggaaatgtagccttcagtctcctcatttgtcctttgaggaagtccacatttgttcacagttgcaacctttggttttacagtgggaaatggtggtggatgatatggacatatgtagcccagtggcattgtacttctgctgacagctgcacacattacagctgtctccaaacccacagtgatgcttagggaaagaccctgctcaggacccagcaggtcagcaccccagagcagactgataggtccgtgggacccatgttagagcagaaaatttgggctcagcacattttactgttagtagagagccaggaaacgttttctgggttggggattttgtgggattttttaatttttttagtaggttttgtttaacctctgtgcagtttgtatgaatgaattgctatacatttataaggagccagggtctggagggttgctatcactttgtccagcccaaataccttcctgggcaactcctaccatttgtttgcagttgcctctactagctgatggcagtatgctggaaagaggttgtactataaagagagttctttccttctactccagagttgttgtgtagctttgccattgaaccgatcaatttttaaactctttaaagaagcagcagctatttttttgaaattaaagaaaattctcaggccaggctcaatggctcatgcctataattgtagtgctttgggaggctgagctgggaggatcgcttaagaccagcctaggcaacagagtgagatcctgtctctacaaaaacaaaaattttttttttgttttctttttgagacggagtttcgctcttgttgcccaggctggagtgcagtggtgcggtcttggctcaccgcaacctccgcctcccagattaaagtgattctcctgcctcagcctcctgagtagctgggattacaggcatgcgccaccatgccgggcgaattttgtatttttaatagagacagggtttctctgtgttggtcaggctggtctcaaactcccaacctcaggtgatccgcccacctcagcctctcagagtgctgggattacagatgtgagccactgcacctggcaaaaaaaaattttttttttaatttgtcaggtgtggtgatgcatgcatgtagtcccaaatacttaggaggctgaggtggaaggatcacttgagcccaggaggtcaaggcaacagtgggctgtgatcatgccactgcactccagtctgggtgacacagtgagaccctgtctcttaaaaaaaaaaaagaaagaaaaaaaattattctttaggtaatttcacttggacatattcatgtatatggagtttgtcagctgactcaggcatttaccctaaagatcaaatctgttttcaaaaatcggcattggccaggcacggtgacccacacctgtaatcccagcactttgggaggccgaggcgggcggatcacgaggtcaggggttcaagaccagcctggccaacatagtgaaaccccgtctctactaaaaatacaaaaaattagctgggcatggtggtgggcgcctgtaatcccagctgcttgagaggctcaggcaggagaatcgcttgaacctgggagtggaggttgcagtgagccgagattgcaccattgtattccaccccgggtgacagtgcaagactccatctcaaaaaaaaaaaaaaaatttggcatcatttacaatttcatagaattactgtgaaggcctttctagttgagatgttggggtatttgggattctaattgttaaccccagaagaaggtaatttagcttgtatttatttaaaacccatttagccttttacttatatctggtagaattccagtgatcatcctaataaggtatatttcagaataatttttttttccttcagaataacttagaatcagatgctataagggctcctaggagcagtgtgaaatttccgtaaagataaatttgaatgttgtaaccaagtttatattaaaccaagaggccatttccaatatgattttttgtttctttttaacttgttaagtccctaagagattacatgctagggcttgagtcatttctattgtagataatgatggcccacacagtcaccttcaactatccacataagctaggctttccgcttttgccacggacagtgtgaccaagatatttccagagtaaataacccgccacaaccttggtaattcctcttttcttcttaagctccaggaagcgaaagcagaaggactcttttcagactgccctctgtagcctacattgcagctttccaaacaggcagctagcactgggaaagcccatgtggtgaccccatatttttctgaggttcttcttttccatggtgttactttattatcagaaagtaaattcagaaaacaggtcttgcccttagcagacaagaaccacaccagtttcttgtaaaggtaacggatacattgggattcaggagtgacacagaggtccagccccagaacttgtaaggattttgtttgaacactgagcagatgcctcctccctgccacccatcacactagttagggctggccatgaattctatgccagagtcactcctgcagtctgctagggatgggccttcttatcccactctcgcacacatcccagtctagtctttgccttcacagagtcctccttgacacccctgacttaatgatagttgctgttttggagtagaattgatcaggtttaagtcatcctgctcaggttgggcatagtggctcatgcctgtaatctcagcactttgggaagccaaagtgggaggattgcttgagcccaggagttccaaaccatcctgggcaacagagggagaccctgtctctaccaag

SEQ ID NO: 17837 - DNA, 2284 bp, Homo sapiens
  CDS (3)..(860)
caatgttgatgctgatgctattgatgatgtttgctgtccactgtacctgggtcacaagcaatgcctactctagtccaagtgtagtcctggcctcatacaatcatgatggcaccaggaatatcttagatgattttagagaagcttacttttggctaaggcaaaatacagatgaacatgcacgagtaatgtcttggtgggattatggctatcagatagctggaatggctaatagaactacgttggtggataataacacctggaataacagccacatagcactggtgggaaaagctatgtcttctaatgaaacagcagcctataaaatcatgaggactctagatgtagattatgttttggttatttttggaggggttattggctattctggtgatgatatcaacaaatttctctggatggttaggatagctgaaggagaacatcccaaagacattcgggaaagtgactattttaccccacagggagaattccgtgtagacaaagcaggatcccctactttgttgaattgccttatgtataaaatgtcatactacagatttggagaaatgcagctggattttcgtacacccccaggttttgaccgaacacgtaatgctgagattggaaataaggacattaaattcaaacatttggaagaagcctttacatcagaacactggcttgttaggatatataaagtaaaagcacctgataacagggagacattagatcacaaacctcgagtcaccaacattttcccaaaacagaagtatttgtcaaagaagactaccaaaaggaagcgtggctacattaaaaataagctggtttttaagaaaggcaagaaaatatctaagaagactgtttaaatgcactgttctggttcctaacttgaagcagttgtccttgtgagaaccggtctttgcctttagctcatgtcgtgttacacagcaaagagggtacagaaccatcactggtccaggttaatgtacaaaattttctggcaatgcctgattaaaaaaataaaattggcttgttgagaacagctgttttcgatttctaatgtgaagcaagacagagcactgctgtaaatgtctagcagcagatttttttttattggtacatattatccttcaaatctgagaatttggactaactgcaccaaagaaccctctaatttggtccctggcacatgcatacttgtcaatgtttttattcttttacaagacctgcattttatttgaattacccgaatagcaatatgtaaaatacaagtgacaaaatgtgatgagagcttcttgaaccggtaaactagtacaggtctgagaaagacatattagaagaatcattatacttccttgaattatatttattttcatgtttctctaatgcaaagaatgtttcatcaaatgtatattttctgttgcttactgtttgctctgagaagaagctgctgtttcaaagatggacctctgagtagctaattgattcaagtagtttttttatgttgacacattattactgctgttagcagtcgttttcaccaggtacttacagagcagatttcatacatcattcattcaagggctaaatttatattttttggaaatcatggcaactacacaggatgttgcttaccaggacggagttttggtatcttagtactgaagttagcactatgtttacatgcaaaagattaaggaaaaaacccttaaagtggacaggtatccagagttcattttctgtgactcatcaaagtgacaaaagacttgtaacaactttgcctggacttttttcattttacaacagttcatccattcacaatgattttgttctctgctccatattttttaatcccttaagcatttgatgaaacactctttagtgctatatgcattttcttacttttgttaaaaatgtgacaattgtcaaaaaatgcactaaaatgtaaatggagattgaacaagttcactttccagcttataggcaactttatacagacttgaacattttctccagttgtttagtaaaagtgaaagagaaagggtttttcctgccacaggatataacttttttttatataacaagcataacacaccactgcttttggtggaaaagtgcagaatagtatgtaccttttatgaagaaaaatgtaatttacaatattcagtgagaatgttactgctgattttcttttccaaggtgtagaatattctttgatttatagaattcatttttgacccagatgatggttcctttacagaacaataaaatggctgaacattttcac

SEQ ID NO: 17838 - protein, 286 aa, Homo sapiens
MLMLMLLMMFAVHCTWVTSNAYSSPSVVLASYNHDGTRNILDDFREAYFWLRQNTDEHARVMSWWDYGYQIAGMANRTTLVDNNTWNNSHIALVGKAMSSNETAAYKIMRTLDVDYVLVIFGGVIGYSGDDINKFLWMVRIAEGEHPKDIRESDYFTPQGEFRVDKAGSPTLLNCLMYKMSYYRFGEMQLDFRTPPGFDRTRNAEIGNKDIKFKHLEEAFTSEHWLVRIYKVKAPDNRETLDHKPRVTNIFPKQKYLSKKTTKRKRGYIKNKLVFKKGKKISKKTV

SEQ ID NO: 17839 - DNA, 2286 bp, Homo sapiens
  CDS (123)..(671)
attttgactggcaaaatgtggcagatttcagggatgcaggtggatccttaactgaggtcaaggtggaagaggaagaaagggatccgcagagtcctgaatttgaaattgaggaggaggaagaaatgttgtcatccgtcataccagattccaggagagaaaatgaacttcccgatttcccccacattgatgagttttttacccttaactcaacaccatctagatctgcatatgatgagcctcatttgctcgtaaatattgagaaacagaaactagagttggaaaaacgacgactggatatcgaggccgaaaggctgcaggtagaaaaggaacgcctacaaatcgagaaagagaggctgcggcatttagacatggaacatgagcggcttcagctagagaaggagcggctgcagattgaaagagaaaagttgaggttacagatagtcaattcagagaaaccgtccttggaaaatgaacttggtcaaggagaaaaatccatgcttcaaccacaggacatagaaacagagaagttaaaacttgagcgagaacgcttgcaactggaaaaggataggctgcagtttttgaagtttgaatctgagaagctgcagattgaaaaggaacgcttacaggtagagaaagacagacttcgaattcagaaagaaggacacttgcagtgatttttccaggcttccatttagcaaatgtttgaaaactctagatttttctcatatcaggtgatataatgatggttgctggattagctgtggtttcttgtctaatgtcagtgttcagtaggaaaaagttatatgtggataactgtatgcctaagtagtatataaaagctgtgccctagcgtaaacagtatagcagaaacttactgtgctggactctttaccttataatattacatagagtcttgtattgtctgtgtacccagagtttacaattatgtccatataaaattctagcccagaagttctcatctggggtagattttggccttcagaagaccaatttggtgatgtctggagacatgttgggttgtcaaaactggggtggggaaaaggttgctactgtgcaatgcatacctcctcaacacccccccacactcagtaaagaattttccaacccaaaatatcattagtcctgaggttgagaaaccctgtcctagcctaactgtatacctctatagctatgttttatagttttagaatattaaaacctcagatatttatgtgggtaggtacttaaatggccaaaaactttaactatgaaatgttactgtgtagtatattgaatataggaagtgatgaagattataggtattttattcccatgtttccatctataaatagccttctcagattcagaaaacaatacagagaacatcagaaattttctaaaatgggtcactttgaaaagaattctttttctcactattaatgctttagaagcaagacgcaattttaaagctttagttccttttctttcagtcattgtcttagtttgggtacaaaaatgtcatttcagtaatgtactgaaatcttataagtgaatagttgaagctagtaaaaatgataccagtataaaaatggtacttgtagtccatgagcttgaacccaatgactgattgtttgacttttaaaataagtaatagcagccatttgggagtagggggtaggtggggaagatgtactccgtatcaaataataatgatgttgaaataatgatagtaggtatgtattatggattggagaagcacttattacactatctaacctaatatgtagaacaattcttgagagttgtatctgtcgttatttctgaatgtgaagctcagagaagtgacacagagtaaatggctgatcttctatattgtagtatattttgtccttccctcttccctgaggaacaaagcacgtatctttagtctctttgatatttattctgagaccaagggcttgcttgacctgatgattttccttcagctctctgaaggtgctttttccacaatccaagtgattctgatacacactaaagttgagaatcactgcactagatcactttgtgttttctgattttcaaggttgatacgtagctttaatacagctcctctgttgacagttattactttaattttgcatttgttccttgtaagaatggctggaaactgtgtgttgacatttgaggatgggtatgcaaggaaaaaatatacttctgtttacttactctgactttgaaatagtgttatttttctatatctgaaataaatgcttctaccatagaaat

SEQ ID NO: 17840 - protein, 183 aa, Homo sapiens [sequence omitted]

SEQ ID NO: 17841 - DNA, 1999 bp, Homo sapiens
  CDS (69)..(1286)
attcgaatcggcggcggcttctagtttgcggttcaggtttggccgctgccggccagcgtcctctggccatggacaccccggaaaatgtccttcagatgcttgaagcccacatgcagagctacaagggcaatgaccctcttggtgaatgggaaagatacatacagtgggtagaagagaattttcctgagaataaagaatacttgataactttactagaacatttaatgaaggaatttttagataagaagaaataccacaatgacccaagattcatcagttattgtttaaaatttgctgagtacaacagtgacctccatcaattttttgagtttctgtacaaccatgggattggaaccctgtcatcccctctgtacattgcctgggcggggcatctggaagcccaaggagagctgcagcatgccagtgctgtccttcagagaggaattcaaaaccaggctgaacccagagagttcctgcaacaacaatacaggttatttcagacacgcctcactgaaacccatttgccagctcaagctagaacctcagaacctctgcataatgttcaggttttaaatcaaatgataacatcaaaatcaaatccaggaaataacatggcctgcatttctaagaatcagggttcagagctttctggagtgatatcttcagcttgtgataaagagtcaaatatggaacgaagagtgatcacgatttctaaatcagaatattctgtgcactcatctttggcatccaaagttgatgttgagcaggttgttatgtattgcaaggagaagcttattcgtggggaatcagaattttcctttgaagaattgagagcccagaaatacaatcaacggagaaagcatgagcaatgggtaaatgaagacagacattatatgaaaaggaaagaagcaaatgcttttgaagaacagctattaaaacagaaaatggatgaacttcataagaagttgcatcaggtggtggagacatcccatgaggatctgcccgcttcccaggaaaggtccgaggttaatccagcacgtatggggccaagtgtaggctcccagcaggaactgagagcgccatgtcttccagtaacctatcagcagacaccagtgaacatggaaaagaacccaagagaggcacctcctgttgttcctcctttggcaaatgctatttctgcagctttggtgtccccagccaccagccagagcattgctcctcctgttcctttgaaagcccagacagtaacagactccatgtttgcagtggccagcaaagatgctgggtaagctgaaggtagtcctagagatcacagtgatgtgagtggcacctgtcaccttctttacatgacctgcattatcaggaacagtatgtaaaagatgaatgatgtctgccttttatttttagataggtatgttgttgaaaaagcaagtggcaaaacattgctcccaatcctttaggcttacttattccatgcttcttttagaatatttattttatactttcgtgaattaaaaattttcagtacctgaaagtcaacagtcactttgtaactgaagaatatacagctgttaggctaaaattccctttgctcactggctttgattgaatacctacagggatcataactgtctagacaattacttgacatgtgttctcatattccttctgtcttcccatagagagcagtttgggattaatacacatgattctgtctctcaaaatgtacctctgcactggaagtttttaccccaattttgagggatttttccagatttcagaaattatagttaatgtcatatcactcgtttaagttacatttttacctccagtcattttggctctcttttagctcgtttttatagggatttgtaaaattaaaaatgctttgcatgttttactttataccttaacagggtttattaagggaactccagcaatgttaaatagacatgttagatccactaccccaagtgcacttaaagtgtgatataaatgg

SEQ ID NO: 17842 - protein, 406 aa, Homo sapiens
MDTPENVLQMLEAHMQSYKGNDPLGEWERYIQWVEENFPENKEYLITLLEHLMKEFLDKKKYHNDPRFISYCLKFAEYNSDLHQFFEFLYNHGIGTLSSPLYIAWAGHLEAQGELQHASAVLQRGIQNQAEPREFLQQQYRLFQTRLTETHLPAQARTSEPLHNVQVLNQMITSKSNPGNNMACISKNQGSELSGVISSACDKESNMERRVITISKSEYSVHSSLASKVDVEQVVMYCKEKLIRGESEFSFEELRAQKYNQRRKHEQWVNEDRHYMKRKEANAFEEQLLKQKMDELHKKLHQVVETSHEDLPASQERSEVNPARMGPSVGSQQELRAPCLPVTYQQTPVNMEKNPREAPPVVPPLANAISAALVSPATSQSIAPPVPLKAQTVTDSMFAVASKDAG

SEQ ID NO: 17843 - DNA, 2116 bp, Homo sapiens
  CDS (1758)..(2102)
acgcaatggaattctactcagcattaaaaaggaatgaatcactgatgcaggcagcaacaaggaagaatcccaaatagccaaggccacagcctagaaacttctccttggaggctaagcctgcagcacccagctgagcacagaggacaatctgaggagctaagtgaccggctggacactccattcacagaagaaaggccatgtgaagataagatgagaagacagccatctaccagccaggaagagaggcttcaccagacaccaaccctaaaggcaccttgaccttggacttccagcttccaggactgtgagaacgcaaatgtctgtggtttaggccatccagtctgtgataccttgttatggcagtccaagccccagtgaagtcagacagtccggctgggttctaatctctactctatattacaggagttatacggccttgggaaagtcacttaactgctctgaaccttaactttcttatctgttgaaagggcccgcttcacagggctgctgtgaagatggaatgccctatggcagggaccctgcatagtgtccagcacagagggcaccacagagggctcaacaaccacatgggccctctgaaagacttattcattaaaaagatgaccactctgcactttgggaggccgaggcgggtgggcagatcacctgaggtcaggagttcgagacaagcttggccaacgtggtgaaaccctgtctctactaaaaatacaaaaattaactgggcatggtggtgggtgcctgtagtcccagctactcaggaggctgaggtgggaggattgtttgaacctgggaggccgaggttgcagtgagccgagattgcgcactccagcctgggtgacagagtaagactctgtctaaaaaaaaaaaaattactctcctctcaaagacttacaatctctgaagacagagcaggcctgcaattgtaattgtgagtaatagggccccaagaggtgtttttctaaactctgcttgcagttagtcgcattcccagagggacatttggcgttgatgcatcccgtggcatattcctttgtgaaatgtttggctttgtcttaaaaccacatcatgctccaaagtggagccgcgctctcatgtttgcaacttagttaccagaagcgctcacaacctgaccttttagaccatgtgtgtcctttctccaaactaaaacagcctaagctctattctgtaactgaaaacaagaagccaatcttggctgtccattctgtgagtcagatgctgccaggcttagtggcagcaccaggggccgctgcgtagtgaaggtcctcctcgcagcagtgtgctccagcagccaggaacgatgtcctgtgtggctttgcactcaggaggagaacattcggggcattttcttatcaaagagcacttcgcagcactgtcctgctctcctggactctgtagggcatggggcaagggtggaaatgtggagggcagggaaggatgcacaggctggtttggggcctctgctctctgggctcaccagcctctgagctctccaccctgcactccccgccgccaggcttctcaaggcctgtccctgcctcccagggcagggcagttccccagggtctgttgattcgacagtaaatgcaaaactcctctgctttcttcctgtggaggagccatctcttggccaccggaacacaggaatatttgttgagtgaagggaacacgatgcagagtccaaaggggtgattcagacctgggtttcagtcctacccatgcccacagttccccagttccctgttttctctgggggagctcccggcaactgccgcaatgaggcaactgggaaatccctttgttggctgggcaaggtggctcacacccagcactttgggaggccaaggctagtggattgctttgagctcaggaattcgagaccagcctgggcaacatggcaaaaccctctccctacaaaaatacaaaaattagctgggtgtggtggcatgcacctgtggtcccagctacttgggagactgaggctggaagatcgcttgaacccaggaggcagaggtcaccgtgagctgagatcgtgccactggactccagcctgggtgacagagtgagaccctgtctg

SEQ ID NO: 17844 - protein, 115 aa, Homo sapiens
MPTVPQFPVFSGGAPGNCRNEATGKSLCWLGKVAHTQHFGRPRLVDCFELRNSRPAWATWQNPLPTKIQKLAGCGGMHLWSQLLGRLRLEDRLNPGGRGHRELRSCHWTPAWVTE

SEQ ID NO: 17845 - DNA, 2033 bp, Homo sapiens
  CDS (8)..(2032)
gaaagagatgtctgcaaacaccgtgctggacagccagcgtcaacaaaagcattatggaattacctccccaattagtttggcatctcctaaagaaattgatcatatttacacacagaaattaattgacgccatgaaaccatttggagtgtttgaagatgaggaagaattgaaccacaggctggtggttcttggtaaattgaacaatttagtaaaagaatggatttctgatgtcagcgagagtaagaacctcccaccttctgttgtggctactgttggtggtaaaattttcacatttggatcctataggcttggagtacacaccaaaggagctgacattgatgcactttgtgtagctccaagacatgtggaaagatctgatttttttcagtctttttttgaaaaattgaaacatcaagatggcattagaaacttaagagctgtagaagatgcctttgtacctgttataaaatttgaatttgatggtattgaaattgatctagtctttgcaagactggcaatacaaaccatatcagataatttagatctaagagacgactctcgcctgagaagccttgatataaggtgtattcgcagcttaaatggttgtagagttactgatgaaattttgcatttagtgccaaataaagaaacttttagactcaccctaagagctgtcaaattatgggcaaaacgacgtggtatttattccaacatgctaggattccttggtggtgtctcctgggcaatgctagttgcaagaacttgccaattgtatccaaatgcagcagcatctactttagttcataagttctttttagttttttccaagtgggaatggccaaatcctgtgctgctgaagcaaccagaagaaagcaatttgaatttgcccgtctgggatcctcgggtaaatccatcagataggtatcatctcatgcccataatcacccctgcctacccacaacagaattctacgtataatgtgtccacatcaactcgaacagtaatggtagaagaatttaaacaaggtcttgcagtcacagatgaaattcttcaaggaaagtcagattggtccaaactacttgagccaccgaatttctttcaaaagtatagacattatatagtattgactgccagcgcatcaacagaagaaaaccatctagagtgggttggattagtagaatctaaaatccgtgtacttgttggaaacttggaacggaatgaatttattactcttgcccatgtgaatccccagtcattcccagggaataaggaacatcataaagacaacaattacgtatcaatgtggttccttgggataatttttcggagagtagaaaatgcagaaagtgtcaacatagacttgacatatgatatacagtcatttactgatacagtgtacagacaggcaaacaatataaatatgctaaaggagggaatgaaaattgaagcaactcatgtaaagaaaaaacaacttcaccactaccttcctgcagaaattcttcaaaagaagaaaaagcaaagtctctctgatgtcaatcgaagctcgggcggacttcaatccaaaagattgtctctggatagcagttgtctggatagctccagagacactgataatggaacaccttttaattctccagcgtccaagtctgatagcccttctgtaggagaaacagaaaggaatagtgctgagcctgctgctgtaattgtggagaagccactgagtgtaccaccagcccaaggactttccattccagtgattggcgcaaaagttgactctacagtaaaaactgtatcaccccccactgtgtgtaccattcctaccgtagtaggacgaaatgtcattcctagaatcacaacacctcacaaccctgcccagggacaaccgcatctgaatggaatgtcaaatataactaagactgttacacctaagagatcccattccccatccatagatgggactcctaagaggttgaaagacgtagaaaagtttattcgacttgaatcaacatttaaggacccccgcactgctgaag

SEQ ID NO: 17846 - protein, 675 aa, Homo sapiens
MSANTVLDSQRQQKHYGITSPISLASPKEIDHIYTQKLIDAMKPFGVFEDEEELNHRLVVLGKLNNLVKEWISDVSESKNLPPSVVATVGGKIFTFGSYRLGVHTKGADIDALCVAPRHVERSDFFQSFFEKLKHQDGIRNLRAVEDAFVPVIKFEFDGIEIDLVFARLAIQTISDNLDLRDDSRLRSLDIRCIRSLNGCRVTDEILHLVPNKETFRLTLRAVKLWAKRRGIYSNMLGFLGGVSWAMLVARTCQLYPNAAASTLVHKFFLVFSKWEWPNPVLLKQPEESNLNLPVWDPRVNPSDRYHLMPIITPAYPQQNSTYNVSTSTRTVMVEEFKQGLAVTDEILQGKSDWSKLLEPPNFFQKYRHYIVLTASASTEENHLEWVGLVESKIRVLVGNLERNEFITLAHVNPQSFPGNKEHHKDNNYVSMWFLGIIFRRVENAESVNIDLTYDIQSFTDTVYRQANNINMLKEGMKIEATHVKKKQLHHYLPAEILQKKKKQSLSDVNRSSGGLQSKRLSLDSSCLDSSRDTDNGTPFNSPASKSDSPSVGETERNSAEPAAVIVEKPLSVPPAQGLSIPVIGAKVDSTVKTVSPPTVCTIPTVVGRNVIPRITTPHNPAQGQPHLNGMSNITKTVTPKRSHSPSIDGTPKRLKDVEKFIRLESTFKDPRTAE

SEQ ID NO: 17847 - DNA, 1927 bp, Homo sapiens
cgaacatgctatcaaataaatgtggaacacctttagcaaactatcaacagctcatgaaggcatgaaatgtgaaaatgatgaatatttgagtgctttttcttaataagtataaccttaaacatcagctaatacacctggtgtgcattttcagtcaggataccttaatcctcatttctagttgccttgccaatgattccataatatactgtctcattactgtttatttttactgttgtgtaaaattgtggtataatgagaaatacatttggtctttgttcctggttcctggcatagagctcctaaaacgcttagaatttcatgagtgataagagttttttggttttgttttgtttttgctgttgttgttattcatagcactgcccttttaattacacctgattatactactgaagtgacttatggttgctcccctagacagcctcagaatggggctgttctctaggaagatcaagtaactagaggatggagactttgtgccccatttctcccacctcctggaaggggaggggtgctggagattagattagacaatgagattaagagaactccaaatagcccaagagggtggtgcacccccaactttataggggtagaggctcctgagattaggagaaccctttttaggctttactctatgtacctcttcatttgagtgttcatttgcgtcctttataaccagtaaaacaaagtacgctgttttcttgagttttgtgagccctgtagcaaattatcaaacctgagtagggcagtgggaactcggaatttatcaccattcagaactgcaggttgtccttgtgagtggcatctgatgtgggggaagtcttggactgagccccttaacttgtggagtctgcactaatttagactgcactaactaacttgcactgcactaacttggactgcactaacttgtggagtctgcactaacttggagaagttagtgtcagaattgaattgtagaacacccagttgttcagaattgaattgtagaacacccaattggtgtgggagaattagagaatttatttgtgtcagaaaatactccagaacaaccaccccatattatgattagctcttttcctttctttggctctgagcttaattgtacattaagcaaacttaagtagaaaagaaactgaatatgttaaatatattaacataacaacatatttggacttgcttaactaagattacagagatgatcagtttataaaaccaccttcaacttaaataaatttgaactcgaaattgcaaaagcagtctagaggctttgctagtatccttcaaccaatttctagtaaaaatatcctatataaccataattatcaaaaccagaaaaacaacattggtaggatactataaagtaaactaatcttattttggatttgacgaatttttacatgtttttttcttttttagtttgtactctaagaagttgtattacatgtacagattcgtgtaaccactgcaaccacataaaactaatgaacacaaagtccctcatgctacctttttatgcttacactccatccaaacctaactctgccaaccacttttctcctatcagtataatttcatcatttcatgaatatgataaaaataaaattgtttttgtaaatggtttttataaattttatataaataagttatatgaatttttattgatagagagtatgtaagcttttggcatttttgtcactcagcaaattactcctaaggtttatatgagttgatgaatagttgttttattatttttttttaccaccatgtatctaaccagatgaaagttgtttatatttgagagtagtatacatatttgatgtagtagtttatccattcacctatgagatatatttgcactgttttcctggttttaagtgctataaataaagatgctgtgaaatct

SEQ ID NO: 17848 - DNA, 1907 bp, Homo sapiens
aatgcacacgagcagacagagaagcaacatctttaaggtactgagggcaggagaagttaatgtagaatactatgccagaaaaaataaattcccaaaagtggaagtgaaataaggacatttagagatgtacaaaagctgaccgaattcactaccagtcaacccacactacaagaaacatcaaatgagtcctccaagcagaaggaatccaataccagatgaaaatccagatctccacgaggaaatgaagaacaccagaaatgggtaactatactagatcggccctttcttcaaataagagcagttggaataacaaagctgttcagttgtacccttggaatccactgaaatcctgggtagggaagctccagtaccaccaactggaaagactgggaatgcctaatagctggtactggccattgtcgtaggctttgtccactctgacaaactgaagatggggactcgactcaccttcgccagccacaggaggacctccagacgaggacaggactcgctgcctttctttcccgtcagaaagggatcccttgcggacaggacctaagcaccacgcacctgccccccgggatgccgaacgaagtggtccctaaagctcctctgcaggcccaaccgaaacaggcctgaagctccaggatgggcgagaggatcctctttgagcgaaaccagccttctgcctggctggccctggtcaacaccctgggaagaggccgatttggcggacagaacggaagaaaagacctaaaggtagaatctcatgatgtcgagatgttaaaacactcaaattttaaggttcgactgtgagggggagatagggggtctcgagctggatcgacccctgagccttcatctgcagagtcctgtgcaccagctcagaggacaggactatgtgcaccaatggttctcatcaggcggcaacttcaccctcacatgcctcccccatccctgctggtacacaagaccacgactaggggaagcccggagggagaatgttaacccctggcatctatctagtcagcagaggtgagggatgctgctaaacaccttacaatccaccggaggacacccgcccccaccgaccccgaagtggccattccctggaggtggggaaactcgcctgtagatcaatgcccacgcacttggcggacaggaaatcacgaattggccactaactggatcttggatctgagaaaaaaattccagcgtcagagggaactctcggagatttgcccagagcataaggaacgtactccttccctcagtgatggatcctcacatctgggggaaatcatagacaatttcttttgtagggcgaactctgctatacagtttatgatgtcagagtgaatactttctttgagttgcagtcagaaactgtagatttttaaaaatttaaaattcattattctctgtcagtattccaaagtgtatacagaaagctattgcactgttcaggagatggcgcttaacattttggaaattcaaggtgatgaatgtccagataagactatctctcctggtacaaagtttgacaatgctgaacatttttaaaggttctttttgatatacaaagtgcaccaatgagtgctttttaattcttacaataattctgggtgaggtaggtatttttccaattcccattttatgcttcggtagccctttgtatttatacttcaaaacacttggctctcttgtaattatttaagaaattagttgtgattatttgtttaatgtgcaggagttacaaaaggcaagctttagaacaagacagacctggttatgattcctggctctgaaagctgtacaccctgtgaccctagacaggtgttttaatgcctcgctgcctctgtttcttgctctgtaaaatgtgaacaataacagtattggcctcatgc

SEQ ID NO: 17849 - DNA, 2040 bp, Homo sapiens
aaagccccaccccggtgcgcgggtatggcggccagcctgtggatgggcgacgtgagtgagggcagccgtccggggtctgaagacaaggaagcatctcggtttcgcgagagaggaaggatctgagtgggaggggacttgggatcccagaaaggggagacgtgtgacgggggttctttttggtgacacagaagcgggttccagcatctaagtgaagaggctgagtccgtgaggctaggggtcctggggccccacctgggttcgtgggagggaaaggtggtgctttggggacatagaatgggagcaatccaaggactgaggcgcgctgttctgggaccggaggagtggggtttctaggtccaaggggaggctccctaaagcggggcaagcttgaaccaaaagagctggggtttcaggccgctcagtggaggcgaacctcgcccctcgctcccccagcggcgcgtagccagccctgggctgaacgggaggggctctggaacccggagtgggaagcccggccgccggcctgagccgctgtgctcttgtttttacgcagctggaaccctacatggatgagaacttcatctccagagcctttgccaccatgggggagaccgtaatgagcgtcaaaattatccgaaaccgcctcactgggatcccagctggctactgctttgtagaatttgcagatttggccacagctgagaagtgtttgcataaaattaatgggaaaccccttccaggagccacacctttacttagcttacagctgcaccagctggcacacctgggctcatagaaccatggagctggcagtgcccttagcggtcatccgtgcaaccccctcattttatacaggagaaaaagctgaggcttagagagggggagatgttttggccaaggcgaaacgttttaaactgaactatgccacttacgggaaacaaccagataacagccctgagtattccctctttgtgggggacctgaccccggacgtggatgatggcatgctgtatgaattcttcgtcaaagtctacccctcctgtcggggaggcaaggtggttttggaccagacaggcgtgtctaagtaaggccttacttgttactgatgcttaactgtgttagtttcagcctttctctcctgagtggaggtgttttagaaaggccctgcagcatggcgattaagaccacaagctctggagccaaactgcctggttcaaatcccagctccaatacaggtgagggagaatgccagtattgtagaattgaagctctgtgacccttacagccccatctgtaaaatggagctgattaataatagctgcttgtagggttgatgtaaggattaaaggatataatataagtaagtcacatttgaaatgctttataggtgtttgctgttttgcttgttattgttactgagcctttcagtgtagttagaagtgttccacttcaggctgggcgtggtggctcatgcctgtaatcctaacactttgagaggcccaggtgggtggattgcgtgagcttaggagttggagaccagcccgggcaacacggtgaaatgccgtctctattaaaatacaaaaaattagccggatgtggtggtgtgcacctgtagtcccagctacttgggaggctgaggtaggataattgctttaacctggaaggcggaggttgcaatgagccaagattgtgccactgcactccagcctgggcaacagagccagactctgtctccataaaaaaaaaaaaaaagttggcccggcatggtggctcacacctgtaatcccagcactttgggaagctgaggtggatggatcacctgaggtcaggactttgaaaccagcctggctaacatggcaaaaccccatctctactaaaaaaatacaaaagttagccgggcatggtggcatgcgcctgtagtcccagctactcgggaggctgaggcagaattgcttgaatccgggaggcagaggttgcagtgagctgagatcacacaactgtgctccagcctgggtaacagagcaagattctgtctcaaat

SEQ ID NO: 17850 - DNA, 2198 bp, Homo sapiens
tttttgccctgtcttgtacagtcatattaagatttgcaatatgaatatccatatctggaataggactataataccataaatagcttaaaacatagtcttcatgttttcagtaaatgttatgacagtgtattatatattaattataaattaatatgtaatacaaatcttcacaaatctgaaaatgccaaatttagtgaatattcagctttttaaattttgaaatggagtctcactctgtcacctaggctggagtgcaatggcgtgatcttggctcactgcaacctctacctcctgggttcaagtgattctcctgcctcagcctcccaagtagctgggaatacaggcacctgccaccatgcctgtgctattttttttttttttcatagagatggggtttcactgtgttggccaggctggtcttgaactcctgacctcaggtgatctgcccacctcagcctcccaaagtgctgggattacaggtgtgagccactgcacctggccaatattcagcttttaataaaatttttcttttaaagatgattttactttctatcagattcctattgcattgaggacttattttgctttatttttattgttttttcaaatgttttaccaagtacaacttgtctctaagattcaaaacagtgtacattttgaatagatgtatcatttattttatgtatatgcataataatggttagaatgctcacagttatactgttcatcagtaaccctgtgaatacagggttcacatccaagatgttctcactggtccgtggcaaagtaagaaaatgagaacaactttccacatttttcataaaaatagaaaggatacaatttaaataattgtcctccattttgatattatgggttttaaaaactaatgatggtttttaaatgccctttgtttcatgaaataataatgatgctttattaaatgatagaaatatattggaggttattattacttggaaaaactaagagctagaactcctatatcaatttcacaaatcgatcacacatttatttttaatttcatattttttctctgaaaattatgaatctggaaaccactgctgtgagcggaattttgttattcctagatcagagatgacacataatgttgaatgatttgtctgtggtcagttacgtactaagtggtggagccaggaggaatatcagctacccgtgtgccagcacctcatggtccccctctcatcaccattattattagaatacatggctagatcgcaatattaggtaggcaaattgagagtccatgtttgttcctcatagcaatgtgatttgttcattatgtgaggtattccttcaaatttaaaaaggattgtgttctaatctaaaaggtcattcataagccactcattcgaaacatcttcccagatacttagttttatgaaattctcaagactgacaccccaaagcatccttaatctataataaacacagaagtacagggaagctcacctccactttgtttacatttctatgggcaaatgtgccgactttctagtgagatgtgaggaatttaagtgcccttactgcagccttgggaatagaaacaggatcatcaacagcctccactcctgccatcctcacccatgcatgagcaaggcctgtttagagagggagaaagaaaaagaccttatattacttggaaaatgagaagcaaagattttagacaagaaccaatgactgggaaccaaaatgcaatgagggcttggcagcccaggagtagtggctgctgttgtgagacacatggagctaaaatgggagagatgagaaactgtgagctttgaggattgtaagaaggaagggagctgcaacaaaggtcacaggtctgtggggttgccacgcctcctattttctatctctaatctcccttttgattttcacaattggtcctgttcttatatgtctgggtgaaagtaagggaagatctgtggtttttggtaggatagagtttcatgtgccatcatctccttccttgccattattgtaaagattcctccactagagttagtgatgatggcaacagacaaatgccggatgagaggtttgggttatctctcatattattaaatagtgatagaaaattggcaagttaaagactggccgcaaaaagcttctgtaagggccaagggaaaacttctcttttgccctctgaaggtttgctg

SEQ ID NO: 17851 - DNA, 2589 bp, Homo sapiens
tataacagtgccactctcaggaattactaagtgacattttaaattgatattttaaactctttccaactacatagttatggtttatttcattctcatcctgttgggatgagaacttgtttgtgcctttcataacttgtttaaagcagagttttaaaattagtttataggatctgaggtggctattagttacagtggcaagattatttagaaagcaagattttgatgagaattaaaaacaatagaaaatgtagagtgcttaaacaaaaatgttatattttgaaagagtagatacttaatttataaataacagtctgaaggttgatgctattttgggataattgttttgctaatggataattctaacaacgcagaatacctagtcaagactgtcatcaaaaacattcacaaatgtttcattctatttttagtgactctgtttaaagagtttctgaaaggaaagaaattttttatttttattatctttagcagtactgagtgtcatagcagaatattttacagactttctatgagattatttttatggtacaaagtatttacatttccctcatgtttatcattatgccaattttacatggcagtcatgccactgactctgctatttagctaagtaatttcttttttcggagactgtctcactctgtctcccaggctggactgcagtggtgcgattctcctgcctcagcctcccgagtagcggggattacaggcacgcgctgccacgccccgccagttttcatatttttagtagagacagggttttgccgtgttggccaggctggtcttgaactcctgacctcaggtgatccacccaccttggcatcccaaagtgctgggattacgagcgtgagtcacagcacccggctaagtaatttctatttattgtgccaaaacatgtcaaaatcatgacctctttgaatggtatatttgagaggatattcatttcattggttaaccatggactactctgtccacgtagtgaaaacatgcaccagtttttacctattatcatggtagtatcatctgccaaaatttcaaggcattcattttattctttgaacaactcttcaccatggtgtggacatgaattttcatatgtgttacttgactagaagtataaatggtttactatagatatccaaaaaccttgagatttgctcataggaaatgaatattgtgatgaatcctgggctctagagtcagacttgcttgggtttaaattcttgctctaacacttactgtttttgtaaccttgagcaattttaatctctctgtgtctcaatttcctcatcttttaattagggatgataatactacctacctcacaggatttttatgaggattaaataaatgtaaggtttttagaacattgatagggagcaataaatagaagattgtattattattctgttaccttggagtgtaagtactgcatttaagtgaatgaaaaatttgctttgaccagatactgaaggaaataagtaatagctagtatttatccaatgccaactgtatgctaggtactgtgcttagataatctgtgtataatagtgttaatcctcaaaatttgggtgttatacccctattatagatgaggaaactgaggctcagagaattaaagtaactttatcactgtcacaaagctagtaagtaacagaggtaggatttatattcaaaaccctgtgtgttcattggaaccgtatcaggcttggggctattcatgtagcattatttccatttttatgtatatgatatatgacgtctgatgcattggccagtaatagtcaaattaacccagccaaattgtcacagtgattcttaaactgtggttctcacacttgcccaggatgttgttaaatgcagatctgaagaccccaatctcagaaactcaaatttaagcatggggcccaagagtatgcattcttaccagataccttgggcagtgactgtcaaaagtttggtcccaacaaacagcattaacgtcacctgggaacttgttggaaatgcagcctctctcagggcctcatctcagatcagatctactaaatcagatactctaggggcaggggcaggggcaggggctagcagttgtgtttaagcaaactctgcaggtgtctttcttatcctagtttgagaaccaatacccaacaacctacgtgattttggtgcaagtagtgtttgaaacacactgaagattactgccctattactaagacatttctcaaaaagcatgttttaaatcagtgtagtccaggatcacactatattaaatataaagataacttaaaggatcattggatcattcattttggccaaatttttagcttctccaaagtgactaacatcagggcctacaataaaatctgtaattctccaagtttagtaattttatattgaggcaggaagggctcattaagtactaataagtacataatttattaaaaacatacataagtgtcatcaaaaaggtccacaattgttagtaaaaaaaattaaattgaagtagtaaatgctgttttataacatacatttttctgctaattcattctgttttgtgtgacctaataaagc

SEQ ID NO: 17852 - DNA, 1968 bp, Homo sapiens
aagaaaattcacattgaagagaaaccatacagaggtaaggtttgtgacaaggtttttgcatataatacatctggcaaaacatactagaattcacactggagagaaactcattataagtgtaatgagtgtggcaagaccgttggtcaaaattcacaccttgtaattaaaaggtcaaaattcacaccttgtaattcatagtggagagaaaccttacaagcacaatgaatgtgacatggtttttaatcaacaatcacaccttgcaagtcatcatagacttcatactgcatagaaatcctacaaacgtgaacaatatgacaaagttttcattcacaaatccagcttcaaatacataggagaattcacactggagaaaagccatagaaatgtaaggtttgtgacaaggctttcgggaatgattcacacgtggcaccccatactagaattcacactggagagaaaccttacaagtgcaatgagtgtggcaaaccctttagtgggcagtcaccacttattcaccatcaagcaatccatggtatagggaaacttgactaatgtaatgattgtcacaaagttttcagtaatgctacaaccattgcacatcattggagaatccacagtgaagagatcttacaagtgtaataaatgtggcaaatttttcagacatcgttcatgccttgcatttcactggtgaactcatgctggagagaaaccttataaatgtcatgattgaggcaaggtcttcagtcaagcttcatcctatgcaaaacataggaggattcatacaggagagaaacctcacaagtgtgatgattgtggcaaagcgtttacttcacattcacacctcattagacatcagagaatccatgctggacagaaatcttacaaatgtcatcagtgtggaagggtcttcagtccaaggtcactccttgcagaccatcagacaattccttttggagacagttgtttcaaatgcagtgagtatagcaaaccatcaagcattaattgacattagagtcaaatcagccttgacctgagtttgttgatttaacattggtttcaagcattaattgccattaaactgtttatgttaagaggattgcactgggggccatggctcatgcctgtaattccagcactttgagaggcaaagacaggtaggtcactggagctcacgagtttgagaacagcctagccaacagatgggagctacttttcccagcctttattttctttttcttgttttttttttgggatggagtcttgctctgtcgcccaggttggagtgcagtggcacgatctcagctcactgcaacctcctcctcccaggttcaagcaattctcctgcctcagtctcccaagtagctgacactacagttgtgtgccaccacacctgggtaattttttgtgtttttagtagagactgggtttcaccgtgttagccagaatggtctctatcttctgactttatgatccacccgactccacctcccaaagtgctgagattacaggagtgagccactgtgcctggcctgttttttgtttctttaacaaaaagttatagagacttctatgagtattgtaccgaatctaaatcacaattgagtatataatcattgagcgatattcatttttccaatcagtatgggatttatatctatttatacatgtttttaatcattttgatcaatgtttatagatttcaaggtacaaacctcactttttatgtttattcctaaatatttcttactttaagttctttagcaaatggaattggtttttaattttcttttaaaattatttattgttaatgtatggaaattcaactaatttttggtgctgttattctattctgcaaataaactgaatgtgtttgttagttccagttgcattttggctgactctttgtgattttctttacagaaggtcatgtcatctacaaacaaataaaatttgacttctttctttctg

SEQ ID NO: 17853 - DNA, 1844 bp, Homo sapiens
  CDS (401)..(1456)
agagtcgggtagacggcagcgggagcggtggcgtctccccgccttccctccctcccgggcctgggcgcccagccggacaggtgagcggcagccaggtgagcgcgcccacctgcgcctctccgcgcggcccgccctccccggcgccgggctcctctccgcgcccctgtcggcgcggaaccctggcctcgtccgcggcccagctccctggagcctcgcatcagcgggggcgcccccgcgagctgcgctctccccggccggagcgctcctcctccagcccccagcccgcagggtactttgccctcggagcgaaggaggctccagaactggtagagccgggccatcgggctgggcacctccccgcggcgcccgcagcgcggagtccactgaccggctcaaaggtatggcgttgacggtggatgtggccgggccagcgccctggggcttccgtatcacagggggcagggatttccacacgcccatcatggtgactaaggtggccgagcggggcaaagccaaggacgctgacctccggcctggagacataatcgtggccatcaacggggaaagcgcggagggcatgctgcatgccgaggcccagagcaagatccgccagagcccctcgcccctgcggctgcagctggaccggtctcaggctacgtctccagggcagaccaatggggacagctccttggaagtgctggcgactcgcttccagggctccgtgaggacatacactgagagtcagtcctccttaaggtcctcctactccagcccaacctccctcagcccgagggccggcagccccttctcaccaccaccctctagcagctccctcactggagaggcggccatcagccgcagcttccagagtctggcatgttccccgggcctccccgctgctgaccgcctgtcctactcaggccgccctggaagccgacaggccggcctcggccgcgctggcgactcggcggtgctggtgctgccgccttccccgggccctcgttcctccaggcccagcatggactcggaagggggaagcctcctcctggacgaggactcggaagtcttcaagatgctgcaggaaaatcgcgagggacgggcggccccccgacagtccagctcctttcggctcttgcaggaagccctggaggctgaggagagaggtggcacgccagccttcttgcccagctcactgagcccccagtcctccctgcccgcctccagggccctggccacccctcccaagctccacacttgtgagaagtgcagtaccagcatcgcgaaccaggctgtgcgcatccaggagggccggtaccgccaccccggctgctacacctgtgccgactgtgggctgaacctgaagatgcgcgggcacttctgggtgggtgacgagctgtactgtgagaagcatgcccgccagcgctactccgcacctgccaccctcagctctcgggcctgagcccgccatgccctcagcctgcctcactgctgggccagggtcatgcctatataagttggcatggcagggacaatggtgggcagttgctcttacatgagctaagtttggagacctgaggcccctttgtcctcgctgggtgggccaaggtctgggacctgtcttggactgtgggagactcaccctcaccttgccaggcctctcccctgcaggactggcattgcactagtctgaggtggccactgcctttgatcaacctttgtgtgcgagggtctaagtagggtcgaacacagaagtgggaaggagaggggtgggccaggggctaatggtgtcactgtgtaaagtttttgacatactagctctataaatatatgaatatggacaaaat

SEQ ID NO: 17854 - protein, 352 aa, Homo sapiens
MALTVDVAGPAPWGFRITGGRDFHTPIMVTKVAERGKAKDADLRPGDIIVAINGESAEGMLHAEAQSKIRQSPSPLRLQLDRSQATSPGQTNGDSSLEVLATRFQGSVRTYTESQSSLRSSYSSPTSLSPRAGSPFSPPPSSSSLTGEAAISRSFQSLACSPGLPAADRLSYSGRPGSRQAGLGRAGDSAVLVLPPSPGPRSSRPSMDSEGGSLLLDEDSEVFKMLQENREGRAAPRQSSSFRLLQEALEAEERGGTPAFLPSSLSPQSSLPASRALATPPKLHTCEKCSTSIANQAVRIQEGRYRHPGCYTCADCGLNLKMRGHFWVGDELYCEKHARQRYSAPATLSSRA

SEQ ID NO: 17855 - DNA, 2610 bp, Homo sapiens
acatacattattttttcattttactttgtgctaccacggtttccatttgcttatggctgttggttgtgaggtctagtgctttcttaaaatatactactgctttgcacattgtgggcctgggagctccgggtgccaaataaagattaggactaacacaccttcagtgtttgagtgatgtgggttcccggtgagcacctacatgctgcttacctagtacaggctgtgcagccaagacagccctgtgtggcccagaagaccaaacatttcatgtgaacctttccccttcagggtgataaagatcaggtcgcttgtccccagtccttgttacctccatgttattgattcacttcccagttgccatattcgaggtaagcctccatagctttatctttgctttcatgtcaacaatgcatgtctgcatccttggactggcttcaagggtttctggcaaaaaatttgcagtctgttaatagacttgggcacaaataggacctaaccaagtgtgaagggaataatgaattcagactgaggcatttgggagagactgttggggaagttcatccagtgcagggccttgtcttgttgggtggctcagatatattaatatgacccttatccaaattaacaatgttacgcatttgcccctaaactccaggtgcatcattgagaagggaaggaatttgctttgctttggaggcacattatttcctcagggttctcatttggattgccttggaggttggtgtgatgccacaatgtgcagagaggctgaggacagggagggcaggtgggcttcactttccagccagctctgatttctggggagtggtagtctattcagggggctccgaggccctgtttgggtggattgggaagagtgtgcagttccttagtgatgtctatcataggcacagtggggaactagcaacattcatgctaggtatttgccagccttgacataataaaacagatgtcactgactcctgcctctttgtccagcagtggtcagcactgcttggtcaggctgcagggcatagatgggttgcatcctgagtgagaaaatgcatttccagatatgtttttgtctcttcttgctggcaggactagggttagtgtttatcatttgacttaaactcattcccccaagttcttactctattttcatgtatcggcagttactatttaagttgctgccctcgcagactacagtgagggcaacgagcacagactagagcaaagcttccccacccacagactgattatgcagtgtcactgggagcccctaacactggagacgctgacttaggaagtgtagcgtggggtcaccgggcaggacttttaaaaaatgttcccagatggctctgatcactgtcaggtttgggagctagggatggaaataagtcagtcttatgtatttctcttttttggggctgcagcttttggctgatgcagtttgtatatcagtttctcaaaaatcctcttttatgtgccctgcacagttgtatgtacacaggggagggcctggcagggagccttagctaaatgctgtatgtcatagatcatctggttcttgtggggtgtgtgtgtcagaatcacatgggaaacaccttcagagggtaggggcctgggctcagcgtggggagtctgaggcagcaggtgcagagtgggaggagctgggcactgcacttgtgctttggctgagctcccgctgactctgaggggagcttggtgacattcttcatggtccacaggaccttgctcagaaagaactatgttctcatttaggagagctttgaggcagttgggaagcattgttggtaaggatgttgaggcttgagaatgtaatgcttttttctttactatggcccacactcagcaaataattgcctctgggataaatccccgacccatgcccaccccgatcagggaaacatagtggggagttcagaaacggactcttcagtaggcggtgcctgagtctcctcagatgacctggtgcattgggctaagctgctaaatgcatagcctgaagtggatttgagttggttcctctgcatggtttgaaggctccctcgccacctttcagcacttctgatgagtccctatttttattgtaaaagtatgacaacaatattaagatgaaaaaatgacctcttttatgtttttattttctacatgtcattccagtctttggttctgtgaatacacatctttacatggttataatcacggcccctccagttaattggcttgcccacagttttactgtgaagtagagctgagatttgaagtcggctgggccctctacatacatgtttccttccctttgtgggattgagtagaaggtgcaatatttaggtatgaccacagggtggtgccaaaaatcaacacatagctgcccccacctccattggactgaaaaccaaaccaaaaacctaagcctgtaatctgggaatttggatgaggatatagggagatggctcaggagtctagaagacctggcaagtatggtgtggatggggacagaatttacttcatggtctggtgtaacctgaatctgtagacttgatgcctgttgatataattggtttttaataaatttttgatcct

SEQ ID NO: 17856 - DNA, 2012 bp, Homo sapiens
  CDS (14)..(997)
gagcgccggcccgatggcggcggcggcggcggcgatggccgagcaggagagcgcccggaacggcggccgcaaccgcggcggcgtccagcgtgtggagggcaagctgcgcgccagcgtcgagaagggcgactactacgaggcgcaccagatgtaccggaccctgttcttcaggtacatgtcccagagcaagcacacggaggcccgggagctcatgtactcgggagccctgctcttcttcagccatggccagcaaaacagtgcagcagacttgtccatgctggtcctggagtccctggagaaggcggaagtggaggtggctgacgagctgctggaaaatctggctaaagtgttcagcctgatggaccccaactctcctgagcgcgtgacctttgtgtccagagccctgaagtggtccagtgggggctccgggaagctgggccacccccggctgcaccagctgctggccctcaccctgtggaaagaacaaaactattgtgagtcgaggtatcattttctgcactcagcggacggggagggctgtgccaacatgctggtggagtattccacgtcccgcggcttccgcagcgaggtggacatgttcgtggcccgggccgtgctacagtttctctgtttaaaaaacaaaagtagcgcatcggtggtcttcacgacgtacacccagaagcacccgtccatcgaggacgggcctccgtttgtggagccgctgcttaacttcatctggttcctgctgctggctgtggacggtgggaagctgacggtgttcactgtgctgtgtgagcagtaccagccatccctccggcgggaccccatgtacaacgagtacctcgaccgcataggacagctgttcttcggcgtcccgcccaagcagacgtcttcctacgggggcctgctcgggaaccttctgaccagcctcatgggctcctcagagcaggaggatggggaggagagccccagcgacggcagccccatcgagctggactgaactggccaggccacgtggagacaccacggtcgacgacggctggagggacgtttcagaggcgagtcctgggtggctcctcgccttgggggctcctggccctgaggctggcggtggccgcatgccggcgcgtgtctgtttctgtgcggcggctcagggtggcgcggctgctgctcactgtgctgctgggacccaagagtggggcgtcgcccctgctggccgccgcgtcccccgagattgacccacaataaagcacaggccttaccgcggcgtcaccctctcccactcctttgttctgggtcctttcgggagggctgatgggcagcacaggaggcccgtcctcggggggctgcgcacatcacgctccttgccgggcgtccggcacagctgcggtcaccaaagcaggtgctggccctcggacctgagagcccagccagggcccatgtggtctgcaaatgggagcggctgtttttgaacacggggtcattctgcagtcaggacgaaccggtccccgtcgcagacggagtgcacgtgccctgcgccacatcctcacgctcggtggagggacgcgtgcggcgggacggtgcctacgggtacttgcagccgtgtcccatgtggcatcccagagctgcgccctgctggtctctgtgagcgccacgctgctgtgctggaaatgccgctttaaaaagggataccgtgggactctgcccgtctctttcataacgcaatatttatttgtattgggtgacgattgattctttcgacctaacattttgggttttaaccaaataaccggtccaggagtgagcagctccgttctgtcagatgctactccaaatgttaccagaacgatgacaaaaggggagacgctctattttttcacagttaaatgacagttgtagattgatacgcagttgtgcatgggaaggggaaacgcacagctttatttactgtaaagtggaatttcaggaaggcttgtgtgaaccgttgcgcataaataaaccctttctaccgg

SEQ ID NO: 17857 - protein, 328 aa, Homo sapiens
MAAAAAAMAEQESARNGGRNRGGVQRVEGKLRASVEKGDYYEAHQMYRTLFFRYMSQSKHTEARELMYSGALLFFSHGQQNSAADLSMLVLESLEKAEVEVADELLENLAKVFSLMDPNSPERVTFVSRALKWSSGGSGKLGHPRLHQLLALTLWKEQNYCESRYHFLHSADGEGCANMLVEYSTSRGFRSEVDMFVARAVLQFLCLKNKSSASVVFTTYTQKHPSIEDGPPFVEPLLNFIWFLLLAVDGGKLTVFTVLCEQYQPSLRRDPMYNEYLDRIGQLFFGVPPKQTSSYGGLLGNLLTSLMGSSEQEDGEESPSDGSPIELD

SEQ ID NO: 17858 - DNA, 1908 bp, Homo sapiens
ataattacgttgctatggacaccgagtttccaggtgtggttgcaagacccattggagaattcaggagcaatgctgactatcaataccaactattgcggtgtaatgtagacttgttaaagataattcagctaggactgacatttatgaatgagcaaggagaataccctccaggaacttcaacttggcagtttaattttaaatttaatttgacgtaagtgggaaataactgtataacccagactttttttttttttctttaatcttaggaattgattttcctcaagtatggtgacatgctaggtgaatttggtgtagttatcctggaaatatataaaacgtaacatttcaaaagcatggttttcttttttactatgggaccaaaaaaaatactttgatgttaaagatgttatatttaaaatatgactgcagctttttttgtatttggaagactgggtattgaaagtacttctgatagaaaaaataatcctacattagttttactttcaaaaattttgtgtgcaatttgaaatatagccttttataatatttatccttcttgtgaagatttttgttgcattcatattccagtttatgagtagattacatgtcaaatgcagtaagacgttttctggaaccttgggtacgttttcctttcaagtcagtattatcattaggttgccacttcagcccacaaaagctctcttaatttacatataggagaagtagtagtatccttgaacctggtgtttatcatatgtcagaatcttcattctaactcaagccctgggtcttcacccagtttccttagttataatatttctgtattattaatagaagtagtcttgatagctaagggaagttttagatgtttttagagaggggcagattatttgcaaactaagttgggtaaataaaataatacattcttattacagcaggacctcaaatgacattttcttcaacattgtttcatggtaaccttcataaaaaataaaattgattcctgacccgggccactacctgagtggagtgtgcacgttctcgtgtatatgtggattttctcccgggtcctctgatttcctcccacatcccaaggctgtgcacgttaggtgaaatggtgtggctaagttgtcccagtgtgagtgagtaggtgtatctgtgtgagtgcactgtgccacggaacgacatgctgaccagggttggttcccacattgtgccctgagctgccagaataggctctggctttcttcacccctcaactgaataatggagcaaataattatcttgtttttattaattgttcttaaatttacatatagctcacatttatttcattgtttaatattagaagtattttggtctttatctagaagtttgatgatttttttgtgaccagaaatatgccgtaggaacttaactcttgtttttatcaattagcctgtggtaaaaattggtttcgttatccatcttttggcttaaagttgcaatttccaagaacttattgataacgttgagtgagtacttaactgtatgttgcaatattgcattgttcttctgtttgacatcctacatttgtgtcatacatcctaatatctggtaggtaaaatagtgaaagaaactgtaggcaattaatggtagtgccaatgtatgaattctttcttcctgttctttgtcagataaacaaagatatttagtatacacaattttacgaaagtagggcttaggaaaagcagagtaatgatgcctgtggtatagtagtgtggcttgtaattacactgtgtttagcctgactctccatttcactcttttgggtttaataatatactctccatttggagaccaaggcaggaggattgcttgaggccaggagttctagaccagcctggtcaacatagactctgtctctac

SEQ ID NO: 17859 - DNA, 2329 bp, Homo sapiens
aaggtctgaaaaataaatcatatttagaacgccattggtagcttaaaaatggttttaaacctgaatttgaagaaaatgttgagaccacgatgtaaccaaaaagaaataattgggttatttctattccaaatgtctttggtgactgtgtgattttaaaccaaattggtttatctatctaggcatttaaacaagttctcagtgttctaaagaagtacatgtactgaccctgacaatcatgttcttttaagcctttagattattgactatccaggttgttccacagagtctctttttttcccccttctttcttgaagatctgtgagtaatggactaattgctattaaatttgggagctttacatatgccacaacagaaaaagtcagaagaaggtaagtcttgaatcttgtttggatgaaatgtagatacatgtgatatgtgtatatgtttaggaataggatcagactcagttatggtggtaatataggtaaaagggctttgccacttcccacatcaagggcaggattctttgtgtatttatacatagagaatgatttgacttctgattgaatagaaccttactgccctgcagtttatgtcatacggtttcctataattaatactcctgagctccctgttgacaaagaaagtaatgtggttcccatgggcagatggcctgcagggctgaagttcttgttacgaccaaaaaaaattatgaggtgatgccattcttagtgatgggagattttcttaggattcaaaatggtaacagtacctaagccatccctgaagcttcgcaagggaaagaagtgactaatcataggctgatctttttctcacttttttcctcacataaaataagtttttttatgataaagtctttggagttgctgtgcctatttttcatgtgtagtatcttatttttatttctcagtctagtcaactctgctgaatgtgtatataaggtgtcattcatagaatttccacaggcttaaggcctaaccattgatggccaggggctttctagaactgaaacaacttcacagatttttgggggtcatgattacccatttttaagatttggttatatatgtgaataatcagtacaaaaagtaactgattttaatacaaaccaatgatatattttaaatgttattgtacagaatgtcacttaacttttaaatttttttctgcttgctgccagtataacatgcatacaatattttctcagtagtcacgatcatctttgatataacaaaacttattttaattctagcatctacagttgtttagatgcacagttttatgatgatgaaactgtaacagtagttcttaaagacactgtaggacgtgaaggaagagatagactcttggtccagctgcctttgtctttagtatataacagtgaagattctgcagaatatcagctcactgggacttattctacaaggctagatgaacagtgtagtgctattcccacccgtaccatgcatttcgagaagcactggagattactggaaagtatgaaagcacagtatgttgctgggaatggttttcgaaaagtgtcctgtgtggtaagtgtttagagatcgttcagcaactaagaaattacaagaagtaacgttgcttctttggaaccttcatcaaatacatgatatataaggtccttttgtgcaaatatttttactgtgatttatagcttgtattgattatgatcatgtggtggccttagctatttagttcttgttctgataaagcttactaagtagttaataataatactagattttaatctcacgaaattgccactgttgttatgtggagatctttttatacaaaatgaaggctgaatttattgattttgttgtaaattgatgggaatataactttcctataaaaccattctttgattcagacttctgatttctaattctttatatatgataagccattaatttaaaaatgcttttatggccttttcttttttagttaagctcaaatcttcgtcatgtgagagtatttgaaatggacatagatgatgaatgggagctcgatgagtcttcagatgaagaggaggaggccagtaataagcctgtaaaaataaaggaagaagtgttgtcggagtcagaggcagagaaccaacaagctggtgctgccgctttagctccagagatagtcattaaagtggaaaaacttgaccctgagctagactcctaatctagcttgccattattgtgtgtgtaattatggccaaaaggacataggagatggactaagatgtcttggaccacctttgtgtaacaaagaaataaacagtaaattttattttttc

SEQ ID NO: 17860 - DNA, 2005 bp, Homo sapiens
tttaaaaaaaatgtgccatttggcttagaattaataattttttttaaagcaaaaatggaagcttagtcttcaaggactgataacagctggtaatatttaccattgtttggtgggaatggggttctcatattaggctagcacgctaaacattttcaattacgaaaatgtattaggctcgtgtgctaccctaatataaaaaccccatatttcctcagttgaaatagtcagctgactatcctgaaaagcattgaccctcttttatattttatctgactttcagttcatttttttaatgctagtgggaacttctccaatcagtgtatttttttagtttccttttttggggaacaggaggagctcagtaatttttatgaaatgctttgacctcatatccattaactaattatggtcctagtcagaagaagctagcacccttccctggtgaagttgatacaaatccattgtatgttcctgtcctgcaatgatttacattcagttacagtactagtcaaaactatatatatatgaattctacttaggatccaattttgatatatttaaaaagcaattgagactcatgatagactttatgagcaggtttaacttgtgtggtcgaataaaagcctttaatttaaatggaaaagtaaaagtaacttttttcagtgacttgattttttttttttgttttaatccatttgggttcacgtcagatcatcggtaacaaaaagtggtatctttcagctttgtaaaagaaccctcttaaccaagttcattccctcaaatgggaactaacgtctagagagcaaagaaacttctggaattagtggcttgctgataatctcattttataatttgttcagcaatccagcaagaccaacttcttaaaaaaattaataacagtagttttatgaaaactaagtaagaaaacagtttccacctatttctgaggtctcctttagaaggagtaacagacagcttttatttctcttaaagttataaaaatcacaatcgcaagtcacaatgaatactgggaagggaaattacttttgcagagtgatcaagtaaatgatagcgggggctaaacttttttagtaaacttgtgaagattacatacagtaaagtgcataaatcttgagtgtacaattcaatgaatttttataagtaaacacacttgattcaagaacattttcaggaccccataagtccccttcatgtcctgtcttcccagtcattacccataacccccaaggtgacccctttcactatagattagctttgcctgttttgaactttaaataatgtatattccccacaactggcttctttcctttaacattgagatacaaccaagttgttacttgtaacaattttttgtttgtgtgtttgtttatttatttttgagaccagagtctcactgtcgcccaggctgcagtgcagtggtgccatcacgcgtcactgcaacctctgcctcccggattcaagcaattctccacctcagcctcccaagtagctggaattacagatatggctcgtggacagcagaaaattcagtctcagcagaaaaatgccaaaaagcaagctggacaaaagaagaaacaaggacatgaccaaaaggctgctgccaaagctgccttaatatatacctgcactgtctgtaggacacaaatgccagaccctaagaccttcaagcagcactttgagagcaagcatcctaagactccacttcctccagaattagctgatgttcaggcataaggttgtttacaggtgaattcatgacacctctgactcttctactgtctcagaccttaggtaacatacctgcagctgcttttctaacaaactgttgatcagcaaaaataaaggggctacagaaacactcatttttatgctgttccctcttgggcttcatgcaaagacaattctgtgtaaatgtacagttgactctgatttggaaatatgaaaatcagtccatccttgttataaaaaatttttttacaattgt

SEQ ID NO: 17861 - DNA, 1741 bp, Homo sapiens
  CDS (659)..(1054)
atatagcaaatagaagagaactaatttgtctcagatttcttaaatgtgaagccttttctttcaaaataaatgtttagatgaggctggttgtagactttcataaagtacctgtgaaactatttttgttttcagaaagtgattactattaatataaaccaagatttacttgtaaaaagcagtgttctcagggtttatattatggaacagtagcttcaaatactttgtcttatgacagtaattcacttcctttctttttcacagagtaagttcctctcagtttatacagagtgattttacttattttatttggtggtagtggtggaaggtgggagtattataaataagcctggaaaaatatatagtgccacattaatagtggttatctctggataaaatttataactctttctcttacttacagtgaatatattttgtaataaacaaatcaagcttataagattacaggtcttcagaataagaccatagatacattggtaaaagattaataatttctctaaactaggctattgagaaaattaataaacataaaagacaaaagcattcagctcttcgaagtatattaagctgattagaaaaatctgaaataggtggcgccaagatggccgaataggaacagctccagtctgcagctcccagcatgaacgatgcagaagatgggcgatttctgcatttccaactgaggtaccaggttcatctcactggggcttgccagacaaataggtgcagcccatggagcagggcggggcatcgcctcacctgggaagcgcaaggggtcggggaattccctttactacaaaagggaagccgtgagagactgcacctggaaaatcgggatactcccaccctaatactgcacttttccaatggccttagcaaacggctcaccaggagattatatcccgcgcctggctcagagggtcccatgcccaaggagccctgctcattgctagcacagcagtctgagatcaaactgcaaggcgacagcgaggctgagggaggggcatctgccattgccgaggctcgagtacataaataaagtggccaggaagctcgaactgggtggagcccacctcagctcaaggaggcctccctgcctctgtagactccacctctaggggcagggcatagctgaacagaaggcagcagaaacttctgcagacttaaatgtccctgtgtgacagctttgaagagagtagtggttctcccagcactgagtttgagatctgagaacggacagactgcctcctcaagtgggtccctgacccccgagtagcctaactgggaggcatctcccagtaggggggcgactggcacttcataaggctgggtgcccctctgagatgaagcttccagaggaaggattaggcagcaacatgagctccttgccagcagcggaacaaagctgtatggagaatgactttgacgagtcgagagaaggcggcttcagacaatcggtaataacaaacttctcccagctaaaggaggatgtttgaacccatcacaaagaagcttaaaaacctttagaaaagagtagacaaatggctaacgagaataaacagcatagataagtccataaatgacctgatggagctgaaaaccatggcacaagaactacgtgatgcatgcacaagcttcagtagctgatttgattaaatggaagaaagggtatcagtgattgaagatcaaatgaatgaaatgaagtgagaagagaagtttagag

SEQ ID NO: 17862 - protein, 132 aa, Homo sapiens
MNDAEDGRFLHFQLRYQVHLTGACQTNRCSPWSRAGHRLTWEAQGVGEFPLLQKGSRERLHLENRDTPTLILHFSNGLSKRLTRRLYPAPGSEGPMPKEPCSLLAQQSEIKLQGDSEAEGGASAIAEARVHK

SEQ ID NO: 17863 - DNA, 2217 bp, Homo sapiens
  CDS (567)..(878)
tttagcttgtgctcaagtcctcttgctgtgttttcagaagcactcacatgttctttcttttcctgagtgaaaagcaaaggtcccacggtgtgtgctgtggtgcaccgcctggctttgggggtcccggaggcaggctgcctagactcacagcctcgggaccgttgccacggcctgtcttctcgttcaggcctgcctctgacagcactcaccatgaggacattccatccttcaccccctcctctggcacaggccaccactgcggtgctgtgccttcagatgggaggtgggcgcggtggccgcctccttccctccaggacctgcccgtgtgaagaccccccggagtgctgagcttcagggctgcgtggaaagagtttttactctctttttctagcctgtataccaggcttttccccacattgtcaggtagagcaccagcttccctgaccgctgctgctcggggagggctggggctggccgggggtcctgtggaggagtacatggaggactccaggtacagcgcaggagtcacggcttttgttttttgacattggcccccggttctaccaatgacagggtgccctggctggagctgtcatcacacacacccctcagctcggaggctgtgggctcctcaaagctggagaaagaggccaagatttttctgcacacggagtgtggggataggagccgggccaagcgctggcccctcagcggtgagccctgcccactcttaccgagcaaggtgggtggctctggcacgagtcccccagggggagagcatggctaccagggagctgcagcggagccctccagccctcaccccaggccagccccaccccggcctctttgagaattctcagaactttgtacctttcccctgatttttaaaccctttttctaaacagactgactttcttacaaaatgcatttggaaaccagacctttgctacccaccaatgtctctgggttttgtaccagtccctgctctcaggccaccctgcccaggacccgggcccgcctccccctccacactcaggatgtcctgctccatctggccggctcactccgtgtggcctgcctttgctgaccgttttggggttccccgccggagctacaggggcattttcttccctaaaaccaacagtgtcccactgacctccccaagtgtttgctgcgtggcagatttcctgttcttgttcgcagtttgccgactgaagagtgtgggatttccgaggcccaggtgagcacgtccatctcaggaggcgtggagggaaaagacatgtcatgaagggttttttttatgtgactgatttttttttaaatcgatgttcaaactaataaatatttttttatgaagaggaaaaatgtgtagattacatttcacattttgtatttttgtttgtgtctgtttgtattttggtgtttacaacaccaaagtgggaaatacagtccattggggatggtgttatttgggggcggggagggggcagggacaccacgatttttctgtcaagctctggatcctgaccaggttgtacactggggctctctgagctttgggacacaggacactgccagggctacgtagagaactgactcagaagacgcagcttactgcttccaactttgcacatcttcctctttaaaaaactgagaaaatgcaaaaactggaactttttgcaatattataaaagaagtaatcttattttagctcattctgtgacatgtgcgactcttaagaaagccatacttaatggtggtggttttttttagatcttatattgtgttttgtatgcagcccttttagaactacttgtagtgagggtgctgtgtgtgcttttcttaaatatttatttttttcaacatgctttcaacctgtcaacaaaaacaaaacacacaaaaaaagggcagtgtttgaagattgttgatttttttctggggataatctatattatattgacttcctattacttattataaacctgtgtttgtattggagatgtgtctactattgggggaagaggttctcgtaatcgctcggtgggaaatcatggctctgccgtcctgcctctctgtggccgtgggttcacgtggcctctgcggtgagtctccaagtttctgcctaggcgcctgtgcgtttcctttctgtgacgggattagcttagacatccttgcaaagcgatcactttcaataaattgggaaattgctgctccagc

SEQ ID NO: 17864 - protein, 104 aa, Homo sapiens
MTGCPGWSCHHTHPSARRLWAPQSWRKRPRFFCTRSVGIGAGPSAGPSAVSPAHSYRARWVALARVPQGESMATRELQRSPPALTPGQPHPGLFENSQNFVPFP

SEQ ID NO: 17865 - DNA, 1747 bp, Homo sapiens
  CDS (432)..(782)
ttcaaaatcttctcaggcacactgatacacatacctcagatttttaattctccggttgtgttcaccaggtgcttggtcatgattaagaattccgtgatgtgtaccccatgtgtttaaatttgctgctgagttaactttgtggcggcctgtggactagacctctgcacatgcaatgcagaacggcagggccagatttgaaatcctgctatcttttcggctgccttgtaaaaataacatcaggcgatggggatacgatgccagaggtcacctgtgataagttctgtttatggccattttacttctaggaagacaggaagtgtcaggatctcagggatctaggaagccaaaatgtttttccactctgaaataaagtgactgaccaggagttcccggccacgcagccctgtgggaactgccgcacggccacttttatgaagtggacacgtgttggtcccactgaaaagaaactccccacccatggctccctcacgctgcagcagaggccctgccacagcacctgtcagcccctgccagcttgcaggggcgcaggcgcagagcggtttgtgcccttgctggagccagggaagggcacagggtccctcctggagtcatgggaggtgcagccgaggttctatattaaaatacagaggctagcacatgtgcttggggaatgcagctacagtagtggaatgaaagtgctgtccgttccttacccccccagcttctcacctgtcctccacacgcatatccctggctccctttccctagtaaggagactgaattgaaattgtggcttgcccgaggctgcatacctgtgctctttctgaagcccaagtcactggctctagaattctaacctgtgaggaagccactgaggatgtttgtcaaaatacatatttctgtgccttgccccagttccacggcccaggaatctgcagttttcacaagcacccccaggtgattctggtggtgtctttgcacttcttcaaggcagtactgcctggaacgcagaatcccagcctcctctatcctccttgcctaatggcctggatgctctcagatctacaggggaagggaaggtcacacagtcatcgcaatagtaacctcagctgataaatcctcccccataaaacttattccccagtgttttttaataggaaacaataaaactgtaaccagcccaaatatccatcaaagagaaaatggagaagtaaatcatcgcacattcacctggaccagatctattgtaaagccaataatactgaagccccttccaaggccctgggagtcctaacagtgcactggcagtgtctataatttatattatgaaatttgcataaggaaaacattttgtctcatttgtgcaatttctccttctaaatatacgtgtcactttgtacctgatttctataagacccaggacctacaaaccctgtgtctgcccctgcagccacccagggaaggactgcacagcagcaagacagattgccatggagcatgttgtgcccaactagggacagcgcagatagattctgtaatttgcctaacaatgtctataggatgatcccatttgtcaaaaaaaaaaaagaactgggctttattgatgtcacctaaatgcacctaaacttcttttttgccccatgctcttctgtactcttgatctttccccaaatttttaaaaacatgacactcattcccttatttttcctacttagaaaagtgtagatggttttatcataggaagttc

SEQ ID NO: 17866 - protein, 117 aa, Homo sapiens
MKWTRVGPTEKKLPTHGSLTLQQRPCHSTCQPLPACRGAGAERFVPLLEPGKGTGSLLESWEVQPRFYIKIQRLAHVLGECSYSSGMKVLSVPYPPSFSPVLHTHIPGSLSLVRRLN

SEQ ID NO: 17867 - DNA, 2287 bp, Homo sapiens
  CDS (1621)..(1968)
ttgtactaatttacactcatgagatatttttaatggttacattattttagtatacagattgtcataggttagaattaacttaaaatttgcatttctaaaagctatcttttaaaatgtattgaactggcttgagttggtttgaaatgaccattcccttcttactaataagcttatgcagattcattcacctttcttttctcttttctgtttttctacagagaaagagaattgggcttatcccgccagaaaagcacagaagccacagtgcttcttgttgaaagacagaccctcataatgttacctctagtagaaagatagcatatgcttgttttgcttgtttgggttcatcatactctattgcttgggcagaagagcacatatgaagagaagagaaatgggaaatggggaagacaacgcagagcaccatatcttggggtgtatatagaagctacaggacaagtgtaatttttatcattgcatggggagcattgacataatttctactgcagctgagcattttttaatatggataataggattctgcaagtgatacatttggtcagagaacttaataaactagtcaagtgggataggtcctgtgacagaattgtgtgatacaggtcaaacaggagttgggttatggggaaaatgccagttgaaatatgttttgatctttggagaaacctattttttcatttaacctgttctttaaatccagtatgttccagaacatacaaaaatgtttaaatgttccatttgtaagaggatatcatgtattttatatcaatttaaatgcagttatcctaatcatttttctttcatttttaccctttattaactcttcatttgtttacaaaacaaatccactctatgaacgcaatctctaattatgtgttttctttcaggtatccaaaccttgaaacctttgctctagatgtcaggcttgtttttgacaactgtgaaacatttaatgaagatgattctgatataggcagagctggccacaatatgaggaagtattttgaaaaaaagtggacagatactttcaaagtgagctgaagttataataatctctttatttttttccttctaaacaaggacaaatgagaccagcaatgtgaactgtatttacataaacgtgcaaggcacatacataatgactttctttttccttaagtataaaaaaaaagtatcagaagaatgataccatttttaaaggcttcattcctacaacaaccaaggccctcggttattggtttgtgtgatttatcagctaatttaggtagaacagggaagcacacccaaagaattttcaaaggaaagggtgttatagtgcaatagcaattaaaatatatcaaatcgcactgaatactcaacaccagagctctaatgtgggaaatggttctcctttccctctcaataaatatctatttttcatttttttactttgtagcttattttttagtgaatgtatttaattttatgaattatttatgattaaaccacatccagaatcttcgttttctgtgaaaaggaagaactagaaaattgctttaaatcttgaaaatacaaggaatgttttaaaatataaaacaaagccaagttaaactgtttacactgatgtgctataaaagcaccaaaaagaaactttactgtagagttacaagtacatttatatatatatgttgctgcatcacttgtgtagttaaattgtatttcaaaacagtgaaaaaattgacatgtatatactgttcattcttgtttatattaagtcttgttttaaatatgtattatgtgtatatattgtttgcagacattattgttcatgccttagaggattgtagcattttactttcgtctgaaggtaatgatagctatacagtctgtacagtaattatcctctaccaacactgtggcgtctccttaatcttggtagtgcctgcctttgaaacagggtgtaggggatattagttttccatttttctattttgttatataattttaagccaccagggcctaaattaaagtataatcatttgtatccatgtggaataaaattgtgacaatttcctacgcacacagtattttttcatagaaacatttccctcccatttgccttgcctcagaaataaatttaaaagacgtttgtaaccactgtgttttatctactgtgtgttgtggtggcctgttggaggcaaatagatcagattttttttgtacctacgtaagagtacttgaagttttatttaaaataaaatgttgtggaaaaggtaaaaaaaaaaaaaag

SEQ ID NO: 17868 - protein, 116 aa, Homo sapiens
MCYKSTKKKLYCRVTSTFIYICCCITCVVKLYFKTVKKLTCIYCSFLFILSLVLNMYYVYILFADIIVHALEDCSILLSSEGNDSYTVCTVIILYQHCGVSLILVVPAFETGCRGY

SEQ ID NO: 17869 - DNA, 1949 bp, Homo sapiens
aagaatagtgttccacagacatctcagagtctacacataatcaacaaactgaccctggtcttctacatcccatgcttgataatgccacatcaactcagttgtccaggccagggacctggtaatatttgaagagttctccttgttcttcagccagttgtctcaagtgccaattctacctctcaagtgtgtatctaattgtttccttccttgctactgctactactttagccattgccactccccatgagattactgcattgatatgatggggctctcctggttactaatcttaaactccttcagtcaacttccccactactctctgagtagaaagtctaaaatacagataatcatgacctcccaccatccaccaccctgaaagtcattttatgtctccttatattattgaacacaatgtctcaattcaacgtcgtacacaaagccatccataatttgaacagcatcctttctctccattctcccacatttaggttatgtcctggcccacgctaccctttcataagtctaccaacactccacatcctttcacatccccatagtttggatgtgctatttaatttgtcttctccaagcatttgtacttcctgccaaacacacatactttcttctccagaataactcatattcattcttgaagacttgattcaagttttttctcctctgggtgccttctataaaccttctttcctctgctccaatttgggaagtgctgttccctctatactctcatcaaccatagcagcctagcctacgtctattatagatttgtcgtaccttgttgtaattaactgtatgtttattaataatgatagtaatgataattttggtatctgtaggtaattgaatataaacttctgtgttaaagttgtaccggaaagccatgcttggagtccaaagcttcaaggtggctcttcttattagagacttgggggagacttggacaggaaggatgttttttggcagagctaactggcagtccccataggctgtctctggtttggacagcacccttgcgtgggcgcttggtgcttgattagatcacaccttttggtgttggccctgtcatcagactgtgggaggatcacagatagcacctcccatactgccattcaacattgccccattgtgctcaaatacaagctcatcgcctgtacttggatatgttctttcttcaaagaccccttggtccattacgtgcgctgactgccagtgggcctaccttccttctgggcaccgtaaacaatatcatttaattcttagagcaaacccattaagtgggcagcattatcatctctattttaaatgtgaaaactggccagagttgacacaatttgcctacagttatatgcctaagaagagaggttcaaacttgactttcaactctgtgtcattagtgcctcaaacagggtctggctaataggaggcactcattaaatatttacaaagttttggttaaataggaggaataagtttttaaaatcgattgcacagcatggtgacaatagttaataataatgtaatgtatatttcaaaattgctatgagagtggattttaaatgttcatagcacatgtaaacaacataagtaagtgaggttatggatatgttaagtagcttgatttaatcattctataatacacacatacaacgcctgggtgcagtggctcatgcctgtaatcccagcactttgggaggctgaggcaggtggatcacgagatcaggagatcaagaccatcctggctaacacggtgaaaccctgtctctactaaaaatacaaaaatttagctgagcgtggtggcgggtgcctttagtcccagctactcgggaggctgaggcaggagaatggtgtgaacccgggaggcggagcttgcagtgagctgagatagtgccactgcactccagcatgggcgacagagaagtctccgtctc

SEQ ID NO: 17870 - DNA, 1983 bp, Homo sapiens
cgggttttagcatgtataggagattccaaagcagagttacctatatcaattttagtactattattttcatattctactggataagaaattacttatttggaactaagaattattcttgcaacagaagcttatcagtaacactatttgattgctttttgctgtgtgcacaggtgaggacctgtctagacttctatactatgtacattgtattaattttgttcataaattaggtaattgagttatagatactaatttaatatttaaaaaatttagattgttgattttaaatatcagaataaccaaactgtaacaacagtgctgggattttggtatttaaaaagggcagagtataccagaatattgaaaactggtattgaaatcactacatataattgaattatgaaaaagtacctttaagataataaagcactacataaatatgagctcatatcatatatttgacagtagggcattatttttacaggttaacattcaattaatctgactatgaattagaaaaatcttgaatttgtagagttcatttaactttattaaagcaatttgccaactcagctacagaaatacagaaaatattactatctggagaactacccagtcgtaagtttatcatcgttgaaattgcttaagcagagattaggtgaccattcctcaggaatagtatacgaaggattcctgcagtggtggaggtgtgtatttgattgctgtcagtgtgccttctgatactaacattctgtaattccctgctcatttatcacacaacaaaacatgagacaaaaataactccataaaatatatgttgattataccatataggttgtatacatatagactataaatatgagctttcaaaaacgttttgccattagctaataactaacaaaatcagttttattagggtggttttgtgtttatattgcatggtgttcaatgagcttatatctgtagttttcatcaaatgtggaaaattttgggccatttttgtattatttttctgccctttcctgtcctcctgggactttaattacagcctgttgtaaaccacttgatattgttccttttggttctttttttatatcttctgtcactgtatttatgttttcctttaagtaattggataggcatataatgacttttagcatacttacacagtatctttttcatttctcagtctgtttctggtgactgatttttctcctggtttcgggtttcattttctgcttcttgtaatatctactaattttatattagatgccaggcattgatgatttcacattgttggttatagatttattcttataggcagttaaattaattgcagttcagtttcttcttttcaagcctttgttagggtaagtatagagtgagcttcaccccacagagagtttaacaccatttctaaggcatagctattgtgggatcactagaaaattctgtgagtgatcagctgggacactcaacactggctagttggacctcagatgcctcacaggcctgtgtggcactctgcttgacctcgtagagttttgctctaggcttacatgtcttaatatccagccacctctcaaggggctcctatgcagatttctggaattctgtttttacatatctgttagctctctggtactctgctctgcaacttcagccacttcagcctccctgaactccagcctctgtcttctcaactacatgaaaccaccatgctttgtttgggatcccctaccctgctctgaggtctgtgcctgcaggtagaaatctagaatgatggatgggcctcacttcattcctctcaggggtcatagtcttaaggtgcatgtcaatatctgcagttgtttcatatatttttgactaattttctgtttcttcacagtaagaagctaaatctttcccctgttactctcaaagccagaagtaaaggataaagcattaaaataaaagcaaagaaaatattttaaaatctaatat

SEQ ID NO: 17871 - DNA, 2075 bp, Homo sapiens
tttattttctgatctcagaagaattgtatattgggataagtttttaattctataacttaaaagtaaaaatcctttgtaattttatgttctaatagttttagcagtttggtgtgattacacagagcacatgcatattaaccaaaataagatcatattatataccattgtataattttttctttttattaccaaattggtacattgaatactacttcacctttttatggctgcttagtgttccattttattatgattttaataactcccaattgatgaacattggggttgttcccaaatttcccctattatgggtaaagttatgttcataatgtctagctatatttctgtgtacatttataatctttaggctaaattcctggaggtagaattgctagatccacatgtatgcacagtttaaaggtgctttttcatagcaatttatggccccaagaaagtgagagtgagtgtctttgtttatgttgctatgaaaggacacctggagctgggtaatttataaagaaaagaggtttatttggctcactgttctgtgggctatgaaagaagcatggtgccggcatctgtttctagtgagggcttcaggctgtttctactcatggtggaaggtgaaggggggagcctgtgtgtgcagatcacctggcaagagaggaagaaggaaagagggaggaggaggagaggaggtagtgggctttttttttaataatcaaggaaccaatagagggataactcattactgaaaggacagtggcaccaagccattcattagggattggctcccatgacccaaacacctctctctagaattcacctcaaacattggggatcaaatttcaatatgaaatttgggaggacagatatctaaaccatagcagtgagtttccatctttcctcacaaaaacaatggctgtcatcatttaaaatagattttatgcagtttgtctagttaagcaacaatttgttcttgtaaattgtatttaaaaagttatcgttaagccaggcgctgtggctcacacctgtaaccccagcaccttgggaggccacagcaggcagatcgctagagcttacgagtttgagaccaccctgggcaatatggtgaaacctcgtctctacaaaaaatggaaaaattagccagaaggtggcacgtgcacctgtagtccccgctacttgggagaccgaagtgggaggatggcttgagtctgggaggcagaggttgcagtgagccaaagtcacaccacttcactctaggcgatagagccatacctcgtctctaaaacaaaaacaacagcaaaaaaattattgttgagggtgaaccttcatttatatggatattggcacttgtgctttcttcagttgtcttctgtgcacagcatactttgagttctactcaaggcttgagtcttgttacagtgattaaaactggctgaaaggtgagcctgttgaataccacaagtaatatttaggaatacttagtcaaaatatagtcaaaagaaatgaaagagttatctatcttttgatctttcttcctgaaaatttggtccaaggcaaataccttataatcctatttaaagaatattcacaggctgggttcagtggtaatctcagcactttttaaggcccaaggtgggtgaatcacttgaagccagggtttgagactagtctggtcaacatgacaaaaccctatctctactaaaaatgcaaaaattagcttggtgtggtggggtacacctgtaatcccagctacttgggtgcatgaggcctgagaatcacttgagtccaagaagcagaggttgtagtgagccatgattgcaccactgcactccagcctgggtgacaaaatgagactctgtctcaaaaagcaaaaaggatactcacaaattcagtacctccatcctatttcattaaagctctgattaaacatatatgtttatgggccgggtgtggtggctcacacctgtgatcccagcactttgggaggccaaggtgggtggatcacctgatgtcaggagttcgagatcagcctggcaaacatggtgaaacctcatctctactaaaaatac

SEQ ID NO: 17872 - DNA, 2490 bp, Homo sapiens
  CDS (1156)..(2133)
aaaagcgctagggttgcaagtggcaccagagacgtgcccttgtcccggggtccatttgagggtgagcgtgttggtgccgagctgtttttttgttttgttttgttttgttttgtttttgagaccgaatctcgttctgtcgcccaggctggaatgcagtggtgtgatcttggctcactgcaacctccaccttccgggttcaagtgaatctcctgcctcagcctcctgagtagctgggattactggcacccaccaccacgaccagctaatttttgtatttttagtagagacgggttttcaccatgttggccaggatggtctcaatctcctgacctcaggcggtctgccttcctcagcttcccaaagtgctgggattacaggtgtgagccaccgcacccggccagtgctgagctgttttgacaacttggaccccgggtcctctgtgggtaggaaaatcagctccctctttgctcctctggggcagctgcacctcgggccagctttctgcctgtctgcctgccggcactgctgggtcgctgtacccaaacgcacagccggtgccccgtgctagaaggtcttcagtttccagaagaaccaaagcatctttggacctacctagggaaggacctgcctgtgacctttgccctgtcctggagggtccagctttgggctgaatggcagcacccacgctgggccgtctggtgctgacccacctgctggtggccctttttggcatgggctcctgggctgctgtgaacgggatctgggtggagctgcctgtggtggtaaaagaccttccagagggtgagtgggagggaggtacagggaagcgtggggcaggtatgcccagaaaggtggcctgtggcagctctttgtcccttagccactgtgctcctgacatggcatcattccttccctgcaggttggagcctcccctcatacctctctgtggttgtggcgctgggaaacctgggtctgctggtggtgaccctgtggaggcagctggccccgggcaagggcgagcaggtccccatccaggtggtacaggtgctgagtgtagtgggcacagccctgctggcccctctgtggcaccacgtggccccagtggcagggcagctccactctgtggccctcctaactctggccttggtgttggcaatggcctgttgtacctctaatgtcactttcctgcccttcctgagccacctgccacctcctttcttacggtctttcttcctgggtcagggtctcagtgccctactcccctgtgtgctggccctagtgcaaggtgtgggccgcctcgagtgcccaccagcgcccaccaatggcacctctgggcctcccctcgacttccctgagcgttttcctgccagcaccttcttctgggcactgactgcccttctggtcacttcagctgccgccttccggggtctcctgttgctgttgccatcactaccctctgtaaccacagggggctcagggcctgaacttcaactgggatccccaggagcagaggaggaagagaaggaggaagaagaggctttgccattgcaggagccaccgagcaaggcagcaggcaccatccctggcccagaccctgaggcccatcagctgttctcagcccatggtgccttcctgctgggcctgatggccttcaccagtgccgtgaccaatggcgtgctgccttctgtgcagagcttttcctgtttgccctatgggcgcctggcctaccacctggctgtggtgctgggcagtgccgccaacccccttgcctgcttcctggccatgggcgtgctgtgcaggtccctggcagggctggttggtctttctctgctgggcatgctctttggggcctacctgatggcactggcaatcctgagcccctgcccacccctggtgggcaccactgcaggggtggtccttgtggtgctgtcgtgggtgctgtgtctgtgtgtgttctcatatgtgaaggtggctgcaagctccctgctgcatggtgggggtcggccggcattgctggcagctggtgtggccatccaagtgggctccctgcttggtgccggtgccatgttccctcccaccagcatctaccacgtgtttcaaagcagaaaggactgtgtagacccctgtggcccctgagcctgggcaggtggggacccaactccaccccacctgtcttcatcgtgaggctgccacagtgcctgactacttgtggcccaggcaggcttcccccaacacaggaacgctcatggacacctgcacactccacagaagacgttggcatgtgaggccagggtgggcaccaaagaccaggcccagagccaggggacaggttggggctgtgggcttggacccagggcctgagacctttgtgggatttgtgcaataaagtgtttttatttaaaaccaaaaacaaaaacaaaagcctaatgaaaaccttataagaaatatataatgaaatcaggaaactggattaaataatttttcatacat

SEQ ID NO: 17873 - protein, 326 aa, Homo sapiens
MACCTSNVTFLPFLSHLPPPFLRSFFLGQGLSALLPCVLALVQGVGRLECPPAPTNGTSGPPLDFPERFPASTFFWALTALLVTSAAAFRGLLLLLPSLPSVTTGGSGPELQLGSPGAEEEEKEEEEALPLQEPPSKAAGTIPGPDPEAHQLFSAHGAFLLGLMAFTSAVTNGVLPSVQSFSCLPYGRLAYHLAVVLGSAANPLACFLAMGVLCRSLAGLVGLSLLGMLFGAYLMALAILSPCPPLVGTTAGVVLVVLSWVLCLCVFSYVKVAASSLLHGGGRPALLAAGVAIQVGSLLGAGAMFPPTSIYHVFQSRKDCVDPCGP

SEQ ID NO: 17874 - DNA, 1812 bp, Homo sapiens
ttagcccttccctttctgcttccatttctatcccaaaatatgagccacaaagagaaatttggggaattagaaggaagagacttaagggaaaatgtatatgtcattggtgtatgtgtcagttttcagtcataacttgggttgggggaagtcagtgtaccctttactcttgctgaggaaatttcttctgagccttagccacatcccacttgcccagggcatcattcttttcttttttttttctggcatatatctctacttcagattcaaacttggccattacctctggccagccaagcagctgtcccctgagaggggggccaactctcctgcccctcactgcctgcctcccaaggctgccctagggctcagctgaagaaggcggttgtgctttgctgccccctgttgctcaagtcctgcttttccataggagctgccgggctgtatgtctggatgtgacttctccaggcaggtcctcctctcctgcccgcagtgctctggctcctcagggtaggtttctgtccaggacatggcccctgaaagggcttggaaaaagcccccttgcgtagtactggctgagcttctacttgctgccccaggaacctccagagagtgacccaaacatctggtatagcctctaatcttacctagtcagtcatgtttctcttcaggcctcttctaagaacagtttcctggagaaacagaatagagttgtggtcactacactggagtcttcctggggtaggagtgggtcctttctaaagtagaaggggctgtgtagcaagggggctgtgtgagcatttctagaaatgttgtctgctgaattttccactgggaaagagcaagtcctggcggagttagcagcagctgggcagtaggcaatagatagcatcagggtctctggatgctcagtgggggtggcatcagggaacactggtttccccagtaacgggcgcctgggcctgcagtggcagtcaattccacagaggatgccccggagcttggcatctctcactgtgctgtcttcccattcctgagactggaatatggagctcatgtgggctgggcagcttcccagcagtggttggtcaggatgtgagagtgctgtggtccaggtacctgtggacaagtgacctgccacactgcaagacccaaaatgacactggactacattcgttgacacagttacagctgtaccaaaattttttttccaaggttcaagttggaacatttgtaagccaagccctcatgggtccaagcctattttcttcaccacaccacactgagtgagggcagtggctcattacagaccacagtatctccccacctccacccatgtagatgagaacctggagcctgccaaggactagtgtccagaatggtgcccaagtcacctcctgataggtaggaagtggccaaaatgaggtgtaggacctcatgtcctagaggtcaaagctaagagtccaaggcaaatggccacaaggcagaaagagccaaaccagagcccccctaaaatggggagaccaggatggatagataagaagaagggcaggctttggctgggcgtggtggctcacacctgtaatcccagccctttgggaggccaaggggggtggatcacgaggtcaggagatcaagaccatcctggctaagactgtgaaaccccgtctctactaaaaaatacaaaaaaaattagccgggcatggtggcgggcgcctgtagtcccagctactctggaggcggaggcagaggttgcagtgagccgagatcgtgccactgcactccagcctgggcgacagagcgagactccgtctc

SEQ ID NO: 17875 - DNA, 1742 bp, Homo sapiens
caactcactgatgaaaaggaataaaccacaaatgcctgcaacgccatgatgaatctcaaaacatgctgagtgtagagaagccagacacaagagtagatactcctatacaattccacttacatggaaatctagaaaagacaattcgaatatatagtggcaaaaagcagaagagtggttgcctggaaccagggtgggaatgaagattaactgcccagaggcataaaaaatggggtggtgggggcggtgatggaaaagtgctatgccttcactgtacctttgtcaaaacttgttgaactgtatacttcaaatgggtgtgtgttttattgaaggtaaatttgaccccaataacatttatttttaaaaattaagagcaaacagaaaaagcttagactaggaatctttaatttgaactataattctgtctactgtttccactgaggtggtctttcagcaaatgactcagtagttttaagcctcagtttcttcagctgtaaagtgggaataacaacaggcaccccatggtgttgcctatgaaatgcagtgatgatgacctaatccttagtgagcgccctatgtgccaggcactgtgctgaatgctttgcagaaacgaattcatcttatcagatagttctgaacactgcaaagcactatacaaatgtaagttacaggaattcttgcactttgcaggtgcttgttaaattgtgaagaagaaagcaaaacataagtgtaaaggattaccaaactgcactagtatgaagagagccatgttcctcagctgtacagggctgatgaatggggaggaggcctgcgagcctaccaggagaaccggggagactctctgtctaccgagagcctggatatcctcccgagtggcccctcatgagactatctaccaacgtgtaacagactgtctgtgacaggccatgggcataatatgtattagtatctctaagaaagaggtggcttttcctatacaaaatttgttggtgacagttggtcaacacttatgtacctgataagccatgtgggtacagtcgatcctcagtacaaatggcagtggtatgctgggtagctaatgatgacagttattaccgttactactattattatcaatatcctgttttgcagaggaggaaaccaaaaccaagaaggattgttcctttccccaaatcccaagctagcaagatttcccgatcctccctccatgccctttcctaacgtctctgtgatttgggagcttctgagctggagttctgtaaattcccaaggaatgggcagttcagaaaaataccaaaaattctaacattattagactttaaagagatttattgattccttttgaatggcagcagatggaacattctggactggggaaggacagtctgtgatgtgaaacccttccccaaggtagacaacaaaagcgttttttaaatgaacacttagtagaacaatctagaagaggaaaaacctcataagtaggaagcctagctgggcggttgggagaaggagtataagtgatttattacagcttatgaagagactgtgtgtgggctgccagggtcccagctctttctcagccccaactgagaaagggtggggtggtttgcctctgcctttgctgtgggtcacaaaccttcagtggcccaaaaggtggcaagcctgacagagacctggagaaatcaaggatatcaatgttttaaatgcttttattcataagcagggtattggtggtgggtctgctg

SEQ ID NO: 17876 - DNA, 2356 bp, Homo sapiens
atttacaattgattaaaagtatccatgtcttggatacatacgtatctatagagctggcatgtaattcttcctctataaagaataggtataggaaagactgaataaaaatggagggatatccccttggatttcacttgcattgtgcaataagcaaagaagggttgataaaagttcttgatcaaaaagttcaaagaaaccagaattttagacagcaagctaaataaatattgtaaaattgcactatattaggttaagtattatttaggtattataatatgctttgtaaattttatattccaaatattgctcaatatttttcatctattaaattaatttctagtgtaaataagtagcttctatatctgtcttagtctattataattgtaaggagtaaaattaaatgaatagtctgcaggtataaatttgaacaatgcatagatgatcgaaaattacggaaaatcatagggcagagaggtgtgaagattcatcattatgtgaaatttggatctttctcaaatccttgctgaaatttaggatggttctcactgtttttctgtgctgatagtaccctttccaaggtgaccttcagggggattaaccttcctagctcaagcaatgagctaaaaggagccttatgcatgatcttcccacatatcaaaataactaaaaggcactgagtttggcatttttctgcctgctctgctaagacctttttttttttttactttcattataacatattatacatgacattatacaaaaatgattaaaatatattaaaacaacatcaacaatccaggatatttttctataaaactttttaaaaataattgtatctatatattcaattttacatccttcttcaaaggctttgtttttctaaaggctttgttttcctttttattatttttttcttttttatttttttgagacagtcttgctctgtcgctcaggctggagtgcagtggcacgatctcagctcactgcaacctcctcctcccaggttcaagtgattcttgttcatcagcctcccgagtagctgggactacaggcatgtgccactatgcccagctaatttttgtacttttagtagagacagggtttcaccacattggtcaggctggtcttgaaatgctggcgtcaagtgatctgcctgcctccgcctcacaaagcactgggattacaggcatgaatctggccttacgtaatatattttcttaatggctgcataatatcacatcaaataggcatttttcaaacctctttccttattaaacatgtagactatatccattttttactaaaataaataacatttcagataatatctttgcactgataatgttgccaagccatttctaaagtgaccttatcaatttaattaccattggatgagggtgttgctttcatcgcaccattgtaaattgtcttttttatttcaatttgcgtttatttataactggttgcaaaggtacacagaacacacgctccttcaacttatctttgataaacccaagcaaggatacaaaaagttggacgacattgagtagagtcatggtatacggtgctgaccctacagtatcagtggaaaagataaggaaaatgtcactactcacctatgttatgcaaaacagttaggtgtgctggggctggatactgctcttttacttgagcattggttgattaaagtttaggtaccatccaggctggtctagagaagtctttggagttaaccatgctctttttgttaaagaagagagtaatgtgtttatcctggctcatagtccgtcaccgaaaatagaaaatgccatccataggtaaaatgctgacctatagaaaaaaatgaactctacttttatagcctagtaaaaatgctctacctgagtagttaaaagcaattcatgaagcctgaagctaaagagcactctggtggttttggcataatagctgcatttccagacctgacctttggccccaaccacaagtgctccaagccccaccagctgaccaaagaaagcccaagttctccttctgtccttcccacaacctccctgctcccaaaactatgaaattaatttgaccatattaacacagctgactcctccagtttacttaaggtagaaagaatgagtttacaacagatgaaaataagtgctttgggcgaactgtattccttttaacagatccaaactattttacatttaaaaaaaaagttaaactaaacttctttactgctgatatgtttcctgtattctagaaaaatttttacactttcacattatttttgtacactttccccatgttaagggatgatggcttttataaatgtgtattcattaaatgttactttaaaaat

SEQ ID NO: 17877 - DNA, 1893 bp, Homo sapiens
tagctttggtaaatagacatatctgctacaaaagatggatggatgtttcatataccttctcttcttcacattttaaaatattttgttttctttttttgttaaaatttagttccagcgtgcagcaccatgagaatacaatagaatggtagagtgactgacttaagctaataataacattctaagattaattgaaacataaatgacccccagaacaaatatctgagtgacaaaaattctggtctttaaaaatgttatctatagttagataaagtttggggcagtggaggctatcttaaaattaatcatccaatgaatatcagcaatggatttacagttttccctctgactttctaggttgtcctggaaaagacctagtgtttctgtagatctgggctcctaaaactctctccgaaaaataataaactagaagggtgctagatatatgttcagtgatgattagaatctttaacattaaacaattattgtttaaaagcaataaatctggctatattctgtccatggctcatatgtatttaaaaagaatggaaagaattttgagagtaaattttttgaatgttattttccttttaaattggaaacttatattggatcatccttaagacatggatggaaaccactggaagaggaaatctatacccaatgcctttgagaaattgttaagctacattattggttctctaagaaatagcagtttatagatgacattttagaaaagcaagctcctatcttaccagaggcttacacaggggtgactctgcaaatacatgtaaacaaagtggaattggtgtgagtttgttttaattccaacagctgatgatgctaagtagaaacctagtgaaacaacccttaataaataaaaagcaatagtttgttcccccagtttaattcagtaaatattaagtattaataacatgtgatggaaatagtatctgaaattctcagcctgtggtctggccttgctcttagaggaagaagatgcctctcttccaagttctgattatggtttatgtgacctttggttaataggttaggaggtcagatttgccagaaaaccagtggcaccgtggttgttccaggaggatattttgtcatgttcattaaaagtcctacaagaaaggtgacacatgcttatcccaactttacagtaagtcaagcaaaggaagttctcatgagaaagttggattaaacaaacagcagcaactacaatcgtataaggtttagtggatttttactcctttccgctgcaaaggagtgcaaaagaggaatgtctctaacactaggtaattatgctttttatgttttttctcttgtgtggcactctgcctgattttattacaacaaaacatttatgtttctgtattatgtgtgtgtgtatatgtattttatatatatgcattttccgtcccaccctgccaagtcatgatttcttatgcactgaacgtaggggcattagagtagaaggttgcctcaggttagttttgtgtggggttgaatgccttttatttctgacttcatttctatctgccaatggatcaatgcattttactctatattatcaaaatacaatatagtgtaagaagtggatcctggctaggtgcagtggctcatgcctgtaatcctagcactttgggaggctgaggcaggaggattccttgagcccaggagtctgagaccagcctgggcaacatagggagactctgtctctgcaaaaaaaaatttaaaaattagccaggtgtcatgagacacacctgtagtcccagctactgagaggctgaggtggaagagttgcttgaacccaggagtttgaagctgcagtgagctgtgatcacaccactacactccagcctggacaacagaataagaccctgtctc

SEQ ID NO: 17878 - DNA, 1706 bp, Homo sapiens
  CDS (1215)..(1619)
ggagaacttccccaacctagcaagacaggccaatattcaaatcagtaaatacagagaacaccacaaagatactcctcgagaagagcaaccccaagacacataatcatcagattcaccaaggatgaaatgaagaaaaaaatgttaagggcagccagagagaaaggtcggtttactcacaaagggaagcccattaaactaatagcagatttgtctgctgaaaccctacaagccagaatagagtggggggccaatatttaacattcttaaagaaaagaattttcagcccagaatttcatatccagccaaactaagcttcattagcaaagaagaaataaaatcctgagagacaagcaaatgctgagcgattttgtcactaccaggcctgccttacaagagctccagaaggcagcactaaacacataaaggaaaaaccagtaccagccactgcaaaaacataacaaactataaagaccaccgacactatgaagaaactgcatcaactaacaggcaaaataaccaactagcatcataatgacaggatcagattaacacataacaatattaaccttaaatgcaaacgggctaaatgccacaattaaaagacacagactggcaaattggatagagtcaaaatccatcattgtgctgtattcaggagacccatctcacgtgcaaagacacacataggctcaaaataaagggatggaggaatatttaccaagcaaatggaaaggaaaagaaaaaaagcaggggttgcaatcctagtctctcataaaacagactttaaaccaacaaagataaaaaaagacaaagaagggcattacataatggtaaagggatgaatgcaacaagcagagctaactattctacatatatatgcacccaatacaggagcacccagattcataaagcaagttcttagagacctacaaagagacttagactctcacacaataataatgggagactttgacactccactgtcaatattagacagaacaatgagacagaaaattaacaagaatattcaggacttaaactcagctctggaccaagcagacctacagaactcagaacttgaactcagctttggaccaagcagacatctacacaactctccacttcaaatcaacagaatatacattcttagcagcaccacatcgcacttattctaaaattgaccacataattggaagtaaaacactacacaccgaatgcaaaagaacggaaatcacaacagtctctcagaccacagtgcaatcaaattagaactcaggattaagaaacttactcaaaaccgcacaactacatggaaactgaacaacctgctcctgaatgactactgggtaaataacgaaattaaggcagaaataaataagttttttgaaaccaatgagaacaaagacacaatgtaccagaatctgtgggacacagctaaagcaatgtttggagagaaatgtatagcactaaatgcccacaggagaaagcaggaaagatctaaagtcaacaccctaacatcacaactaaaagaactagagaagcaagagcaaacaaattcaaaagctaccagaagacaagaaataactaagatcagagcagaactgaaggagatagagacatgaaaaacccttcaaaaaaatcaatgaatccaggacctggttttttgaagagattaacaaaatagatagatcactagccagaataat

SEQ ID NO: 17879 - protein, 135 aa, Homo sapiens [sequence omitted]

SEQ ID NO: 17880 - DNA, 2416 bp, Homo sapiens
gtgatcgaaagcatggcgtcggtggtgttggcgctgaggacccggacagccgttacatccttgctaagccccactccggctacagctcttgctgtcagatacgcatccaagaagtcgggtggtagctccaaaaacctcggtggaaagtcatcaggcagacgccaaggcattaagaaaatggaaggtcactatgttcatgctgggaacatcattgcaacacagcgccatttccgctggcacccaggtgcccatgtgagttgctccgttgctgcccccctttttccttttctaggttgacctctccttgcccctaagcatggtaataacagttgcatgtattgagtgcttaccaaatggcaagcattgtgctgattcccatgcctacacgatctcatttcttccttaccacatccctgtaagtaaggtgaaatgccagagacctagacggggtggaaggagcaagtgactgctgggatttgcaccaggtctgcctaactcccagatcactatgatttgccctggtgttgcattggcctggtattcttggttctcctttctaaccctcagttcttggaggacaagatacctggtgatttaaaatattattttagtcttgggaaactaatttcaatttattagtttttcattattctaagacttcttcctttgtataaacttacttgcagatggttgaaagatagcttgaatttaatgaaatagaattcagtgtgccaggagttaggttcataccaggtggggatttcagtttcagcaagttggcatcatttttatagggtaggacagttctttgttacagagacataacgatactgtactctccacattattttaaatattagttgcctttgtaaacagtttcccctcccccacccctttttcgataattttagtaggtacaaaaaggttgatagtaacctgtatttatttcaaagatgctaatttgtatgtgaattgattatgtatgtagtagctttttaccttttagaacttaagacattagatgtgtggctatgtcaacaataataatcaaagctaacacattttgagctagacagtattctaggccctttatgattgttgagcattaatcctcaaaatgaccctgtaaaatagttaatattatccccatttgacagacgaaaaaatagaggcacagtgaagtaacttgcctaagaccacacaggagtaagtagcagtgctggtatttgaaccaggcatcctggctccagagcccattcttttaatcagagagacagagaataatgctggactacctgggtaaaatttgccacacacccagcctgaagttctaaaagaaaaagctaaaaaatatggttaaaaactgtatatacaacacagtttaatctctctgcttcatatttcacatctgaaaagtggcgttggaaataatacctctttcactaggtgagaattaaatgacttaatgtgtattaaagggcttacatgggtattagctaatgcagtagtatgattgttttattagcatatgcattatccatatagctttggtttatattttccatagagcctaaactttatagatcactatctaaatgaaaatttacatcaaactagtgttttaatatgacagttctagtgttgtttaagtctaagtgaagatttagggcatcttcctgggttttgggatttgtgcagtgtggcttctgaccagctgcatagacatggctccaggtaacagtccctgggactgagcagtggcccatgttggctgttggagctttcttttccctcatttgttatgagtcaataaagaagcagaaggtttggacgtgctagccagtgggaaagggaacctgagatggagctctctgatcaccctttcagccccagggcccggctctgtgtgagaagtctgtcccaaaattctgggacggaccacctcactgaccagctgaccagctgaccaggtctgtgtgttgcaggtgggtgttgggaagaataaatgtctgtatgccctggaagaggggatagtccgctacactaaggaggtctacgtgcctcatcccagaaacacggaggctgtggatctgatcaccaggctgcccaagggtgctgtgctctacaagacttttgtccacgtggttcctgccaagcctgagggcaccttcaaactggtagctatgctttgatgtcctgttgaggccatcggacaaagactggagcccaggtgacaggagatggtgataccagaagtcaagggttggggtggcgacacggcctcccgaggaagaggtctgcttgatggtgactctgcaggagactctgaagtgactgctgggaaaccctttgggagacctgacctggggccaaaaataaagtgagccagcgtcatgaacgcatgctatttagggac

SEQ ID NO: 17881 - DNA, 2235 bp, Homo sapiens
  CDS (65)..(1981)
cactcgccccgtcacgtggcagctggagtacccaggccaggcccctgaagcagagaaggacaaaatggtgtgggaaatcctggtgtctgagcgggacatcagagcccttatcccactggccaaggctgaggagctggtgaatacagcaccactgactggagtgccccagcatgtccccgtgcgccttgtcactgtggacggcgggggggccttggtggaggtgacagagcatgtcggctgcgagtctgccaacacacaggtcctgcaggtgtctgaggcctgtgatgccgtgttcgtggctggcaaggagagccggggcgcccggggggtgcgagtggacttctggtggcgccggctccgcgcctcgctgcggctgaccgtgtgggcccccctgctaccgctgcgtatcgagctcaccgacaccaccctcgagcaggtccgcggctggagggtacctggccctgctgaagggcctgcggaacccgctgcagaggcgtcggatgaggccgagcggcgcgcccgtggctgccacctgcagtaccagcgggccggtgtgcgcttcctcgcccccttcgcggcccacccgctggacggcggccgccgcctcacgcacctgcttggccccgactggctgctagacgtgtcccacctcgtggcgccacacgcccgcgtgctggactcgcgtgtagcctctctggagggtggccgtgtcgtggtgggccgggagcccggtgtcacctccattgaggtgcgttccccactgtctgactccatcctgggggagcaggcgctggctgtgacggacgacaaggtctcagtgctggagctgagggtgcagccagtgatgggcatctcgctgaccttgagccggggcactgcccaccccggggaggtcacagctacgtgctgggcacagtcagcccttcccgccccaaagcaggaggtggccctctccctatggctgtccttctctgatcacactgtggccccagctgagctctacgaccgccgtgacctgggactgtccgtctcagccgaggagcctggtgccatcctgccagctgaggagcagggtgcccagctcggggtggtggtgagtggggcaggcgccgaggggctgccgctgcatgtggctctgcacccgcccgagccctgccgccggggccgccaccgtgtgcctctggcctctggcaccgcctggctggggctgccccctgcctccactccagcccctgctctcccatccagccctgcttggagcccaccagccacagaagccaccatgggtggtaaacggcaggtggcaggcagtgtcgggggcaacacaggtgtgaggggcaagtttgagcgggcagaggaggaggccaggaaggaggagaccaaagccagggaggaggaggaggaagaggaggaggagatggtccctgcccctcagcatgtcactgagctagagctgggcatgtacgccctgctgggagtcttctgcgtggccatcttcatcttcttggtcaatggtgtggtcttcgtcctgcgctatcagcgcaaagaacctcccgacagtgccactgaccccacctccccccagccccacaactgggtctggctgggcactgaccaggaggaactgagccgccagctggaccggcagtcccctggcccgcccaagggggaggggagctgcccctgtgagagtgggggaggaggggaggcccctaccctggcccctggccctcctgggggcaccaccagctcctcaagcaccctggcccgaaaggaggctggggggcggcggaagcgagtagagtttgtgacatttgcgccagcccctccagcccagtcacctgaggagcctgtaggggcccctgctgtgcagtccatccttgtggcaggcgaggaggacatccgctgggtgtgtgaggacatggggctgaaggaccctgaggagcttcgcaactacatggagaggatccggggcagctcctgaccctccacagccacctggtcagccaccagctggggcaacgagggtggaggtcccactgagcctctcgcctgcccccgccactcgtctggtgcttgttgatccaagtcccctgcctggtcccccacaaggactcccatccaggccccctctgccctgccccttgtcatggaccatggtcgtgaggaagggctcatgccccttatttatgggaaccatttcattctaacagaataaaccgagaaggaaaccag

SEQ ID NO: 17882 - protein, 639 aa, Homo sapiens [sequence omitted]

SEQ ID NO: 17883 - DNA, 1731 bp, Homo sapiens
  CDS (72)..(1373)
ttagggcgggagcccggcgagggcgccggtgctttgttctgtctgaggccaggaagtttgaccgcgctgccatgccgaaccgtaaggccagccggaatgcttactatttcttcgtgcaggagaagatccccgaactacggcgacgaggcctgcctgtggctcgcgttgctgatgccatcccttactgctcctcagactgggcgcttctgagggaggaagaaaaggagaaatacgcagaaatggctcgagaatggagggccgctcagggaaaggaccctgggccctcagagaagcagaaacctgttttcacaccactgaggaggccaggcatgcttgtaccaaagcagaatgtttcacctccagatatgtcagctttgtctttaaaaggtgatcaagctctccttggaggcattttttattttttgaacatttttagccatggcgagctacctcctcattgtgaacagcgcttcctcccttgtgaaattggctgtgttaagtattctctccaagaaggtattatggcagatttccacagttttataaatcctggtgaaattccacgaggatttcgatttcattgtcaggctgcaagtgattctagtcacaagattcctatttcaaattttgaacgtgggcataaccaagcaactgtgttacaaaacctttatagatttattcatcccaacccagggaactggccacctatctactgcaagtctgatgatagaaccagagtcaactggtgtttgaagcatatggcaaaggcatcagaaatcaggcaagatctacaacttctcactgtagaggaccttgtagtggggatctaccaacaaaaatttctcaaggagccctctaagacttggattcgaagcctcctagatgtggccatgtgggattattctagcaacacaaggtgcaagtggcatgaagaaaatgatattctcttctgtgctttagctgtttgcaagaagattgcgtactgcatcagtaattctctggccactctctttggaatccagctcacagaggctcatgtaccactacaagattatgaggccagcaatagtgtgacacccaaaatggttgtattggatgcagggcgttaccagaagctaagggttgggagttcaggattctctcatttcaactcttctaatgaggaacaaagatcaaacacacccattggtgactacccatctagggcaaaaatttctggccaaaacagcagcgttcggggaagaggaattacccgcttactagagagcatttccaattcttccagcaatatccacaaattctccaactgtgacacttcactctcaccttacatgtcccaaaaagatggatacaaatctttctcttccttatcttaatgatggtactcttttcaatttctgaaaacagtaacaggcccaacttccttcttactacagtcatattaaacagatcacatcaatgacaaatgtcactactataaaaactacttaatttgtaaggaaattgtttcatagatttaaaaaaattgtggttggagagcatcttggcatttgtgctttttttcttgagggattgttctgcttcctggctgtatgatgggtatatcattaaagtttggagtcctatatgaacaaaactgacatttttagagttgtacttttgggaatgttatagattgatcattctttctcctgataataaaggtattgaatatctgttatgaaaggttct

SEQ ID NO: 17884 - protein, 434 aa, Homo sapiens
MPNRKASRNAYYFFVQEKIPELRRRGLPVARVADAIPYCSSDWALLREEEKEKYAEMAREWRAAQGKDPGPSEKQKPVFTPLRRPGMLVPKQNVSPPDMSALSLKGDQALLGGIFYFLNIFSHGELPPHCEQRFLPCEIGCVKYSLQEGIMADFHSFINPGEIPRGFRFHCQAASDSSHKIPISNFERGHNQATVLQNLYRFIHPNPGNWPPIYCKSDDRTRVNWCLKHMAKASEIRQDLQLLTVEDLVVGIYQQKFLKEPSKTWIRSLLDVAMWDYSSNTRCKWHEENDILFCALAVCKKIAYCISNSLATLFGIQLTEAHVPLQDYEASNSVTPKMVVLDAGRYQKLRVGSSGFSHFNSSNEEQRSNTPIGDYPSRAKISGQNSSVRGRGITRLLESISNSSSNIHKFSNCDTSLSPYMSQKDGYKSFSSLS

SEQ ID NO: 17885 - DNA, 2023 bp, Homo sapiens
aaacaaggcggtgtgattgaaggtgggtaacgtggtcaagtgacaggggtgggtctgcttagataagatggcctgggaaaccttttctgaggacatggcttttgaatggaggctagaaagatgagagagacccagccatagaatgatttcagttaagagtattctatgaagaaagagcagcaaatgctaattccctaaggtagatataaggttggcatgttggaaagacagaatgggtttgcttctaagattctttccagtggaatttcagaaattttgtgattctatttcattaactcctgaggtttggctacaagaccagaccctactcttgttttatatgtgtagctggcagaatataggtttaatagtgagacaagaccaagaactacatgccagctccattgttcaatttctgtgtggtcttaagcaatttagctaacctctccaagtcttaaaacagcatggcttcaaatacataagagtttgaatttgttgtgtttgatgctgtcatgaacttttgattaagagagtgatatgatcaaaattaagcttaggaaatattgcagctggatgtaggatggattatagcaccaggagggaaagaatctaagaagctattgcactggtccattcaaacattggttagagttgcatgtcctgctgtgaaaagagagatggcagagacctgtgcaggaagcctttgtaagacagatcagcaggaagctcctgctgccatggaggtcaaggctcaatgtgtaaagcagttaaataaacgctgactcacttggaacttccagtttcttctttgtttgatgaaagaatggtattcccagtttcacgtgttagtcagaaaccttaaaaccaatagctaagcatagactactacataggtactgtaaacttattttcaaagtcctggtttttaacaccatttttaactactaaaagatgtatttttaaatgttgaaatttttttttgacaatctggtccagcatcaatgtcaggaaaatgatcactgtaaagataactgttacagaactccatgatgccagcagaacaggcagcaggtgaggattatagtacccgacgctctgtattttctaagcaggagactgtttacttcccaagacttacgagctgtttgtatgcagccgcaggaactccactagtccctgcctaagcacgctgtcatgcatgaggctaaaataggcctggagcatacaagtcttctctcgccatttatctcagctctttctcttgtcaccacccaaagtggttttaactagagtggtgcctaataaatgtggggagcaggcagggggaggtgacagaccaaaataaatcacctgtgtggagcaactcaattcagaggcgttcacagaagaactggaggcggttaggatagggaaagacgtggttcattggcagactgcatctgttttcggtaatcctccgttacaaacagttcggttaatccaaattcctgaaatcaacatgccagcaataaatggtataacagtggcagagatgtactttaacaaagtctaaaaaaaaaaatttattttcaaaaaaattttgcttttttctttcatattgctttataaagattgtttacaaattagcagtatccaaaattctagttaagatctatttatacaaacacttcacatttacagataagtttcagcagaaatgtatcttgacaaagtatggaaaagttaatttgaggcttcaatttcattttcttcatttctttttaaagtagactctttgtgaagaaacgagccagtgactgaaacaccctggtggaaacctgttgacagaccttccactttctcttcagaataagtagctgtggtggatattattatttgaagaaagaaaaaacagattttagggtggaaaaaacagtcaactcacacaaagaatggaaaaaaatactgagttaaattaagcaaataccttttacaagtgaaaggaagaatttttcttctgccgtcaataaaaccattgtgctat

SEQ ID NO: 17886 - DNA, 2074 bp, Homo sapiens
  CDS (90)..(542)
atgttcatgtagggagtcgggccccgggccgccaccgtcacctcggccgctgccgctgtcgccatcgccttgtttccccatcccccgccatggccgaggacctctctgcggccacgtcctacaccgaagatgatttctactgccccgtctgtcaggaggtgctcaaaacgcccgtgcggaccacggcctgtcagcacgtcaataggagtgaaacatccacatctgataacacagaaacttaccaagagaatacaagttcttctggtcatcctacttttaagtgtcccctgtgtcaagaatcaaattttaccagacagcgtttactggatcactgtaacagtaatcacctatttcagatagttcctgtgacatgtcctatttgtgtgtctcttccttggggagatcctagccagattaccagaaatttcgttagtcatctaaatcagagacatcaatttgattatggagaatttgtgaatcttcagctagatgaagaaacccaataccaaactgctgttgaagaatcttttcaagtaaacatctgaaggctgtagacatctctgcatctttgtacctgcaagtgccatctttaagggggaaactacatgaagtcaccgttacagtaacttgatgtgtatattaataaaagtaattcagtcattttagtttttgattgaaaataaaggtagggcttctaaaaacttcatcatcttgataagttaaaaaatgaaagttatgacattagctttaaaggtgtaaaaaagatgtttcactaatgtaacggtgaaagagaatccctgttgtactttatctttttgtaatattatttttgaatttttcattattatgttgcttttgaaatttgatgcattcctcccatttactttattattgtacacatttaacacacagtagcaaattttgaacgatgtgattgatataacctaacaaatctgagccagttattattagagttgcagaatagaaacttgaagtgctaaatggaataatccaaaggaaattttttaaatgcaggttctagctgaaaaattcaactataagaaaattgtatttatataacatttactatttttgaagactagtgagatttctgtaataattttaattctttaaaaagtgaaagcttgttgtaaagatattttctttttgttattagaaggaaatacaaagagaaaaatttctttctttcatgggcatttgataatttcagtctttgactgatttgtaagcctagaatatactaagctgaataacagctctttggcctcagaattttcagtagccagtatttctgattaactaagttgaaactcttattagaaactttcagttggtgatattgtattctagaagatataaatgagaggtttggcttcatctcagtttagaaatttattcaaagctaaagatgtatatatacatatacttttgtgtgtatatatacacatatgtgtgtatgcagtttgtcaggttatatatagaatttctattaaggattttttaaatggacaagcaatagggggttgaagtgtttatctgatttgtttaaaattttgtatatcaccaaatttttaaaaagtgatagtcacagtgctaagttatctagttggctactattacaccttaaaaattgagtttacacacacacaattacctgtttatatggtgctcatttgttattctcaaatataatgtgtgaccgtgatatagtgagaaagattctaccaaccactgtttcactactttttagttaaaattgggtatgttcttaatattcattagtgagaatcacaaagtattttgtagaaggcccaaatcacagaataaaggactaagagtggatttgctgacattccatactaatatacattgtttatgctttctttaaaataactagaagaacataaaagaaagagaatctcagaagtagtttgctgctaatatatacatatattgtataaaaaggtatattttggttttgttaaaacccttgttgacttttctacactgaacatttttttttaacttgatttaataaaaatgttaattttgg

SEQ ID NO: 17887 - protein, 151 aa, Homo sapiens
MAEDLSAATSYTEDDFYCPVCQEVLKTPVRTTACQHVNRSETSTSDNTETYQENTSSSGHPTFKCPLCQESNFTRQRLLDHCNSNHLFQIVPVTCPICVSLPWGDPSQITRNFVSHLNQRHQFDYGEFVNLQLDEETQYQTAVEESFQVNI

SEQ ID NO: 17888 - DNA, 2041 bp, Homo sapiens
  CDS (93)..(1280)
acagcaagatccgagccttcatcctccccaaggcagaggtgtgcgtgcggaaccatgtccagccctacatcccatccatcctggaggccctgatggtccccaccagccagggcttcactgaggtgcgagatgtcttcttcaaggaggtcacggacatgaacctgaacgtcatcaacgagggcggcattgacaagctgggcgagtacatggagaagctgtcccggctggcgtaccaccccctgaagatgcagagctgctatgagaagatggagtcgctgcgactggacgggctgcagcaacgatttgatgtgtccagcacgtccgtgttcaagcagcgagcccagatccacatgcgggagcaaatggacaatgccgtgtatacgttcgagaccctcctgcaccaggagctggggaaggggcccaccaaggaggagctgtgcaagtccatccagcgggtcctggagcgggtgctgaagaaatacgactacgacagcagctctgtgcggaagaggttcttccgggaggcgctgctgcagatcagcatcccgttcctgctcaagaagctggcccctacctgcaagtcggagctgccccggttccaggagctgatcttcgaggactttgccaggttcatcctggtggaaaacacgtacgaggaggtggtgctgcagaccgtcatgaaggacaccctgcaggctgtgaaggaggccgcggtgcagaggaagcacaacctctaccgggacagcatggtcatgcacaacagcgaccccaacctgcacctgccggccgagggcgcccccatcgactggggcgaggagtacagcaacagcggcgggggcggcagccccagccccagcaccccggagtcagccaccctctcggaaaagcgacggcgcgccaagcaggtggtctctgtggtccaggatgaggaggtggggctgccctttgaggctagccctgagtcaccaccacctgcgtccccggacggtgtcactgagatccgaggcctgctggcccaaggtctgcggcctgagagccccccaccagccggccccctgctcaacggggcccccgctggggagagtccccagcctaaggccgcccccgaggcctcctcgccgcctgcctcacccctccagcatctcctgcctggaaaggctgtggaccttgggccccccaagcccagcgaccaggagactggagagcaggtgtccagccccagcagccaccccgccctccacaccaccaccgaggacagtgcaggggtgcagactgagttctaggccagtgggtccctgactgctgcacatggcacaggccgttcccttccggacccaggcaggctcagctctggggagggcaccctggtctgtgccttgtgggtggaggcggggcagggctgtgtggcaccgccagggagcgggcccacctgagtcactttattgggttcagtcaacactttcttgctccctgttttctcttctgtgggatgatctcagatgcaggggctggttttggggttttcctgcttgtgccaagggctggacactgctggggggctggaaagcccctcccttcctgtccttctgtggcctccatcccctcatgggtgctgccatccttcctggagagagggaggtgaaagctggtgtgagcccagtgggttcccgcccactcacccaggagctggctgggccaggaccgggagagggagcactgctgccctcctggccctgctccttccgcagttaggggtggaccgagcctcgctttccccactgttctggagggaaggggaaggagggggtcttcaggctggagccaggctgggggtgctgggtggagagatgagatttagggggtgcctcatggggtgggcaggcctggggtgaaatgagaaaggcccagaacgtgcaggtctgcggaggggaagtgtcctgagtgaaggaggggttcccatcatccctccctgatattgtattgaaaatattatgcacactgttcatgcttctactaatcaataaacgctttatttaaagcc

SEQ ID NO: 17889 - protein, 396 aa, Homo sapiens [sequence omitted]

SEQ ID NO: 17890 - DNA, 2047 bp, Homo sapiens
  CDS (37)..(1593)
gaggcccagctcgcgcagtcgttcgggtgagcgaagatggcggccgagagggaacctcctccgctgggggacgggaagcccaccgactttgaggatctggaggacggagaggacctgttcaccagcactgtctccaccctagagtcaagtccatcatctccagaaccagctagtcttcctgcagaagatattagtgcaaactccaatggcccaaaacccacagaagttgtattagatgatgacagagaagatctttttgcagaagccacagaagaagtttctttggacagccctgaaagggaacctatcctatcctcggaaccttctcctgcagtcacacctgtcactcctactacactcattgctcctagaattgaatcaaagagtatgtctgctcccgtgatctttgatagatccagggaagagattgaagaagaagcaaatggagacatttttgacatagaaattggtgtatcagatccagaaaaagttggtgatggcatgaatgcctatatggcatatagagtaacaacaaagacatctctttccatgttcagtaagagtgaattttcagtgaaaagaagattcagcgactttcttggtttgcacagcaaattagcaagcaaatatttacatgttggttatattgtgccaccagctccagaaaagagtatagtagggatgaccaaggtcaaagtgggtaaagaagactcatcatccactgagtttgtagaaaaacggagagcagctcttgaaaggtatcttcaaagaacagtaaaacatccaactttactacaggatcctgatttaaggcagttcttggaaagttcagagctgcctagagcagttaatacacaggctctgagtggagcaggaatattgaggatggtgaacaaggctgccgacgctgtcaacaaaatgacaatcaagatgaatgaatcggatgcatggtttgaagaaaagcagcagcaatttgagaatctggatcagcaacttaggaaacttcatgtcagtgttgaagccttggtctgtcatagaaaagaactttcagccaacacagctgcctttgctaaaagtgctgccatgttaggtaattctgaggatcatactgctttatctagagctttgtctcagcttgcagaggttgaggagaagatagaccagttacatcaagaacaagcttttgctgacttttatatgttttcagaactacttagtgactacattcgtcttattgctgcagtgaaaggtgtgtttgaccatcgaatgaagtgctggcagaaatgggaagatgctcaaattactttgctcaaaaaacgtgaagctgaagcaaaaatgatggttgctaacaaaccagataaaatacagcaagctaaaaatgaaataagagagtgggaggcgaaagtgcaacaaggggaaagagattttgaacagatatctaaaacgattcgaaaagaagtgggaagatttgagaaagaacgagtgaaggattttaaaaccgttatcatcaagtacttagaatcactagttcaaacacaacaacagctgataaaatactgggaagcattcctacctgaagccaaagccattgcctagcaataagattgttgccgttaagaagaccttggatgttgttccagttatgctggattccacagtgaaatcatttaaaaccatctaaataaaccactatatattttatgaattacatgtggttttatatacacacacacacacacacacacacacacactctgacattttattacaagctgcatgtcctgaccctctttgaattaagtggactgtggcatgacattctgcaatactttgctgaattgaacactattgtgtcttaaatacttgcactaaatagtgcactgcaagaccagaaaattttacaatattttttctttacaatatgttctgtagtatgtttaccctctttatgaagtgaattaccaatgctttgaataatgttcacttatacattcctgtacagaaattacgattttgtgattacagtaataaaatgatattccttgtg

SEQ ID NO: 17891 - protein, 519 aa, Homo sapiens
MAAEREPPPLGDGKPTDFEDLEDGEDLFTSTVSTLESSPSSPEPASLPAEDISANSNGPKPTEVVLDDDREDLFAEATEEVSLDSPEREPILSSEPSPAVTPVTPTTLIAPRIESKSMSAPVIFDRSREEIEEEANGDIFDIEIGVSDPEKVGDGMNAYMAYRVTTKTSLSMFSKSEFSVKRRFSDFLGLHSKLASKYLHVGYIVPPAPEKSIVGMTKVKVGKEDSSSTEFVEKRRAALERYLQRTVKHPTLLQDPDLRQFLESSELPRAVNTQALSGAGILRMVNKAADAVNKMTIKMNESDAWFEEKQQQFENLDQQLRKLHVSVEALVCHRKELSANTAAFAKSAAMLGNSEDHTALSRALSQLAEVEEKIDQLHQEQAFADFYMFSELLSDYIRLIAAVKGVFDHRMKCWQKWEDAQITLLKKREAEAKMMVANKPDKIQQAKNEIREWEAKVQQGERDFEQISKTIRKEVGRFEKERVKDFKTVIIKYLESLVQTQQQLIKYWEAFLPEAKAIA

SEQ ID NO: 17892 - DNA, 2272 bp, Homo sapiens
  CDS (1360)..(1818)
ttaatatcctaaccttgttatctcttgcctcctcctctctgtttttatttgttttcaaggtttttcataaaaacaaatactagttttgaaggattttttcttacatttaactgctcaaacataatatttttggggacaccttcttatggaggagtttgaaaactttttatgttcttgagtttgtccaatatcagctgcttttgggaaaggaaacaaaaaagtgaaggaaatattttcaggaagtttttctcaacctacaaaagctttaaaaataagaaattgacaagtaactagactatgatatgcctttgctttcatcacaaaagttcatcagcaaacaggaaaaaaaaagacccctaaaaagcctaaagctttaaattgtctccaaattcttaaaattagtcatctgtcttagatgtacatttatttgtcagcaaccttgtctgatttgaaatagatgatatgataaaacatgcattaacatgagtagtttatttttgttgggctccagagtgtaagaatattttattttttgtttgacataaaaagtgaagttgacttgcgtgaataacaatccagcatgctttcattctttctgaataacacagaataactgtgctacagcttctggattagttgtctatttccagttagaggagtgtgtgacatttatggtttgggaatagcatatttctaaagcataatataatacaagaaatagtgatgctctgttttcacaaatttatcttttcattcacccatccatccatttaacagatatttattgagtgcctatcttaggtgtaatagtatttaagactgaaagaaggagaatttctaacctgtcataagagtaaggtttcgtaaattcatctttcctgaacttaggcattagtttggcaatatgtgaatatgatgaactctaaacctagctgatctgtatatgtatgatgtatatatgtcatatgtatgatatatatgaaatattcccataactgcatatgaacacatatgccatatacatatataccaacgggctgaataacatactcttttgtcttggataatctgttttctgggttatgtatctgttgtctttggcctactcagggatttttatttctttaaataacttatcttttggacatatttttatattatttggaaaactttccaatattcctgttacaaagtggtgtctgttttcagtgatggctatttcatcagtgcttgaaatagtgtgcactgtgttgcacaggtttttcatttttctattgagtagatatttttaaattaacatacacatttttctctttaaagggtcatatctattaggcctttccctgctggtaacttaaaatgattatttgtgaattttttactaagtttcatcaagatcttaaaaagagagaagaaaataaaaagtattatttatatgtcagtgccaactttgaaggtaaaacagtagtagtaacttttgggagaaattctaaaaactactttaaaaagaagcgtgcacataaaataaatatctttctatccaaggcttgtcattttatatgcttttattgtaaatttaatatatactactttaaaaaattgaactatacagaatttataaaatacaactttctctacttaccccacctcttatttttaggggtaaccactgttaatggtttggtatgtgtccttccagacactttctacaaatatacaaataagtgtgtttgtgtatgtgtctgtgtgtgtattcattttatacaaatagaaaaatattcttactgtgctgtgactctttgtcattttattatatattaatagatacctttccataagcgtttaaatagatttacctcattcttttataaattactgcataatccattgtaggagtatactttaacttattgaattagtcccctgttgaatggactacaagattattttcacttctctattacaaagaaagcaagagtgaagacccttttgcatatatttttgtcaccttgcatgaacatatccataaggttgtacatttgttttttacaagatctttgtaataaacattttaatgtaatttcaggagatgaggtcatagagataatatgagacccttttttggataaaaagaaagattgtacaggagtgcataatttttaaagaaaatcgtcttttgaagggtaatttcctttctgcctgattagccaaataaataccttgccaaaacttacaataggaaattttttttcaataaaaataaaatttgagg

SEQ ID NO: 17893 - protein, 153 aa, Homo sapiens
MIICEFFTKFHQDLKKREENKKYYLYVSANFEGKTVVVTFGRNSKNYFKKKRAHKINIFLSKACHFICFYCKFNIYYFKKLNYTEFIKYNFLYLPHLLFLGVTTVNGLVCVLPDTFYKYTNKCVCVCVCVCIHFIQIEKYSYCAVTLCHFIIY

SEQ ID NO: 17894 - DNA, 1266 bp, Homo sapiens
cagtttcatttcactcattaagctcagcacactgctgcccattcccagggtggacagcccatgcagaggctttgctaggtgaaaaagcttggtttgctaaaagtcacaggcagaatcctgcaggtccatgcccttagatgtgccaaattgtaagttgcatagattttaggggtttggggcaaaaaggaaacttatgtttaagtgctctagggaaggaggcattgtttccaggtggtttcattgtcatatgatctccaggttcagaaggcaggtagtgtctggagaaacgattcctggccctgagaagttgaccattaatttctgacagatagtttaagtgcctcctgtgacatacaaaagagacacacactgtccttgtgaaattcatgagctgcaggaggagacactaatcagatcatcccagaaacgtggaaggagggccagggatggagccaaggagctaaggagggctttcctgaggaggtggcattggacccgaggcctgagttgtgattaggattacagaaaggggatcaggcaggggagcctctggaaagaaggacccaaatgtgggaagagagtatggcctgatgaactagaagcgggcagaagagaacgaggggaaagagggtggtataaaattaggtccttgggaacacagtagggttgttggtgtttatctcaaggaaaatggaaacaacagtgaaggactcttggcaaggaagggacttggtcccacatgcctgagcgtagctttcgctgttctgtggagaaagtcaggaaaggggatttgcgaggtgtttagctttccacagggcaggggtatggacagcagaggatggcactgctcaccgcttccccaactcctgcaggatcagcgacatccgactcttcatcgtggatgcccggccagccatggctgccaccagctttatcctcatgactactttcccgaacaaagagctggctgatgagagccagaccctgaaggaagccaacctgctcaatgctgtcatcgtgcagcggttaacataaccgcccagccagctgcctggcctccctcctgtgtttcccatggccagtggccatgccccatggggatcgcccctcctgcccccttgtgcatacccagcagtccagtgcaacgtctcctccatagctctgggttcttagatcttggttggacgtttgttttctccttagttgcatttcctgggtttttgtgatgatcaatggactttaatgaaaaaaaaaataaaaacaacc

SEQ ID NO: 17895 - DNA, 1289 bp, Homo sapiens
cccatgacaatgcagattttggcaaagctgcatctgctggtgagcagctagaactgaactttttgatcatctcaaacaaaaagtctggacgtattaaacaatatctccattcccctccctgccaacccctgatgacctctcttcaactttcggagaagctaaaacttacttatgaggaaaagtgtgaaattgaggaatcccaattgaagtttttgagaaataagaatcacggccgggcgcggtggctcacgcctgtaatcccagcactttgggaggctgaagcgggcgaatcacgaggtcaagagattgagaccatcctggccaacatggtgaaaccccgtttctactaaaaatacaaaaattagctgggcctggtagcacgtgcctgtagtcccagctacttgggaggctgaggcaggagaatcacttgaacctgggaggcggaggttgcagtaagctgagaccacgccactgcactccaacctggcaacagagtgagactccatttcaaaaaagaaaaaaaaaaaaagaaataagaatcactaactgctcttatagaaattatgatattcaagtaaaataatgaaaataaagcactttagttttcaaattattagtattttttctctgtagatagtcttcatctaattttaaaattgcaatgataatataatagtttgagtatttgtatacatgatgaatttgagtatatatgatgaatattcatgtactttttatagaatctatttattagagatcccagtaagacctatatattatagattaaccattagtgatttatgtataatgagtagaaaaagacagcaggaattaatatttttgttgttaaagattatttttaaatagtagtaatgaagtaattttaaatcaaataaactttgaaatattgtttataattttattttaataagtccaatttgaaattttaaaatcttccaggccatagcctatctagagacataactagagtaatactaagagccagaactcagctgattgtggtggcttacgcatgtaatcccaacactttgggaagccaaggcgggtggatcatttgaggtcaagagttcgagactagcctggccaatatggtaaaaccctgtctctactaaaaatataaaaattagctgggtgtggtggcacacatctgtagtcccagctactcaggaggctgaggcagaatcacttgaacccaggagatagaggttgcagtgagccaagatcatgccactgcactccagcctgggtgacagagggagactccatct

SEQ ID NO: 17896 - DNA, 1895 bp, Homo sapiens
  CDS (1168)..(1719)
ttctctctttgtttaggcagatcattatttatttaactgtagttgcattgtgaattatttgtattatgttgttccagatcattttctcatagtggctttgatttggctctgccttggtgtttgagcccaaagttgaatctttttctctttgttttcttgaagtgcaggatataatctgaaattccatttgttgagtctcttacatcaccatgtgtgtgatgtggaatgaagagatgtgaaagatggattcatgagaccaagcgtgggtgataatgaactctgaaaacattttataaaacaattatccccattcttgttctctgttagcactttgtttgcaaaatacttcttaattatttgttagcgatacatgtcagctgaggtcctttttatgcccctggtctagatggtggtgatggattaaatgggtttctgtaggtcccagagattttaaggctaatgataattaagtattgttattgggccaggcagtgttctaggatatttaccgtttttacactgatttgtccctcccaacaaccttctgggatgggttactattaccgtattcattttacaaatgaaattgggattcaggatggttaaataacttatccaaggttacttagccagaagttgtcaagtccagatttgaacccatgctgtctggctccagagtccatgattctagtcattgcgctatactgtactgtgtagtttctgaattacatatggtcatttggtgcccaagcttgcaccatatcctaaggagttttaatttgtactttgtttggtgtctccctgtaatgatataaatggcactgaaacatatataggctggggacagttaatttcaggttccactggaataggaactgttgattagactgtggaccctgcgaagacatgagctcagctcagtgacagtggagtgtccagatccagtcagtgcttttggcttttttgagtttcactctgtgtgaccttttagatgcttgtaaagtttgcttattgtgggtttttggttttttaaaattatctatttttttttttttgctatgaacctcatttaacctgtcttttagtgactaccgtaaaaaacaagaatacctcaaagctcttcggaagaaggctcttgaaaaaaatccagatgaattctactacaaaatgactcgggttaaactccaggatggagtacatattattaaggagactaaggaagaagtaaccccagaacaactaaagctgatgagaactcaggacgtcaaatatatagaaatgaagagggttgcagaagctaagaaaatcgaaagactaaaatcagagctccatctgctggatttccaggggaagcaacagaacaagcatgtgttcttttttgacaccaaaaaggaagttgaacagtttgatgtcgcaactcacctgcaaacagccccggagctagtcgacagagtctttaataggcccaggatagagaccttgcagaaagaaaaagtgaaaggagttaccaatcagactggacttaagcgaatagctaaagaaaggcaaaagcagtataactgcctgacacagcggattgaacgagagaagaaattgttcgttattgctcagaaaattcaaacacgcaaagatcttatggataaaactcagaaagtgaaggtgaagaaagaaacggtgaactccccagctatttataaatttcagagtcgtcgaaaacgttgacgtgttatagataagccttgtcattctgtatcaaaaatctgttgtcgttttctagtaacttcaaattccattactccaaatggcatggttttccggtttgtaaccataactaaattgtcagtctgacatttaatgtctttctatggacaacattaaatctccctcccttctgt

SEQ ID NO: 17897 - protein, 184 aa, Homo sapiens
MTRVKLQDGVHIIKETKEEVTPEQLKLMRTQDVKYIEMKRVAEAKKIERLKSELHLLDFQGKQQNKHVFFFDTKKEVEQFDVATHLQTAPELVDRVFNRPRIETLQKEKVKGVTNQTGLKRIAKERQKQYNCLTQRIEREKKLFVIAQKIQTRKDLMDKTQKVKVKKETVNSPAIYKFQSRRKR

SEQ ID NO: 17898 - DNA, 1821 bp, Homo sapiens
  CDS (578)..(892)
agtttttgtatttttagtagagatgggtttcaccatgttggtcaggctggtctcgaactcctgacctcatgatccgcccacctcagcctcccaaagtgctgggattacaggtgtgagctaccacgcctggcctattatgatttttaatgaagtttgtcataaccaagtacttgtcattttctgatgagaacactgaaagtttagggcatgtagtgccaacttttggcagtatttcttcacaggtggtggcgtgttcttccatcaggagtcatgtaatgtttggtgatctctcgtgatgttagcagctgttgctgtttgatgccttatcccttaattcattaagggttgcaaaatggagatatcctaatgctatcattttttcatctgttaggtgaagttttacttacataaaaacttcatctcttcttgcttctgctaatggtaaccattctttttcagtatcataataagcttgttaaacaaatttgatgtgttttatagtgccagctaaagtagaagacatcattaagaacaactatgacatcttcccataaaacttcctttgttactatactgcatggattattggtttgatgctgtagagccctattcatgttctcattttcttttccattactggctgatagtaataggatatgcaaaagcatttgcctcagtgttaaaatgtaaacatggcagacattgtttcctcttttcacagatggaactttctgctctacagtccatgatggctgtgcaggaagaagagctgcaggtgcaggctgctgatatggagtctctgaccaggaacatacagattaaagaagatctcataaaggtctttcaaaactttttaaagaccactggaaatgttcacagctcagaatacctgtagggcctcttcagacaatatttgcacacatcgaatcccttggccagtgattatccatatcccacttgaaagtataggcagaatatttcaagacatttgttcccgtgctactctgctgaataatccttttattactattttcacatccatacttattttttgacttctaggacctgcaaatgcaactggttgatcctgaagacataccagctatggaacgcctgacccaggaagtcttacttcttcgggaaaaagttgcttcagtagaatcccagggtcaagaaatttcaggaaaccgaagacaacaggtaagttactggaatataaaccttatttatttatttacatttttttgtattctttttttttttttttagtagagatggagtttcaccatgttggtcaggctagtcttggactcctgactgcaagtgatccatcctcctcggcccctcaaagtgctggaattacatacaagcatgagtcaccacattgagacaaggtctcactgtgtcacccaggcaggagtgcagtggtatgatcacagctcactgcagcctcaaactctggggctcaaggaatcttcctgcctcagcctcctgagtagctggagctgcaggtgcacaccaccacgcccggctcaaaccttatttttctactgtgaaataaaccatggtaaagctgtcaatctcagctatttgtggagggttagttgatggtatttcctagagaaactgtgctctaaaatttcctactttggtcggtagcagctatagatgcccctttctgacatttgtagttctgaaaagagcagcagttcttttggacacataccaatagttatccctcacactcatacctaagtcacctccctcaactgaatctttctcttttatctgcatttaaccatgttcagatctctcccagtt

SEQ ID NO: 17899 - protein, 105 aa, Homo sapiens [sequence omitted]

SEQ ID NO: 17900 - DNA, 1561 bp, Homo sapiens
  CDS (385)..(1281)
gaagaaaggcgagcagaacagaggaagtatggagtgttctttgatgacgactatgactacctgcagcacctgaaggaaccatctgggccttcagagcttattccctcaagtaccttcagtgcacacaacaggagagaggagaaagaagaaacgctagtaattccaagcactggaattaagttgccttcatcagtgtttgcttcagagtttgaggaagatgttggattgttaaataaagcagctccagtttcaggacctcgactggattttgatcctgacattgttgcagctcttgatgatgattttgactttgatgatccagataatctgcttgaggatgactttattcttcaggccaataaggcaacaggagaggaagagggaatggatatacagaaatctgagaatgaagatgacagcgagtgggaagatgtggatgatgagaagggagatagcaatgatgactatgactctgcaggcctattgtcagatgaagactgtatgtctgtgcccggaaaaactcacagagctatagcagatcacttgttctggagtgaggaaacaaagagtcgcttcacggagtattcgatgacttcctcagtcatgaggagaaatgaacagctgaccctacatgatgagaggtttgagaagttttatgagcaatatgatgatgatgaaattggagctctggataatgcagaattggaaggttctattcaagtggacagcaatcgcttacaggaagttttgaatgactactataaagagaaggcagagaattgtgtaaaattgaatacccttgaacccttggaggatcaagacctgccaatgaatgagcttgatgagtctgaggaggaagaaatgattactgtagtccttgaagaagccaaagagaagtgggattgtgaatctatttgtagtacatactcaaatttatataaccatccacagcttatcaagtatcaaccaaagcccaaacaaattcgaatatcttctaaaacaggaatacctctcaatgtcttaccaaagaaaggactcacagcaaagcaaactgaaagaatacagatgattaatggcagtgatcttcctaaagtatcaactcagccacgttctaaaaatgaaagcaaagaagataaaagagcaagaaagcaagctataaaagaagagcgcaaggaacgaagagtggagaagaaagctaacaaattagcatttaaactggagaaaagaaggcaagaaaaagagctgctgaacttgaagaagaatgttgagggtctaaagctatagacagtggagcatacagggcaaggcactttattaggggctcctcatctttggttattgactagaaacttcagaaagacaaaactgtttgccatttttactggcagataagaggaaaatacaatatttgtattatttttatactagtaagtgtcccctgccaaccatcttgtaaatattgtaatactttaatttttaatattataagcttacatttgctctgaagtaaatgacttcatgaatgtgaaatgtttgataaattaaaggaaaatatcttcat

SEQ ID NO: 17901 - protein, 299 aa, Homo sapiens
MDIQKSENEDDSEWEDVDDEKGDSNDDYDSAGLLSDEDCMSVPGKTHRAIADHLFWSEETKSRFTEYSMTSSVMRRNEQLTLHDERFEKFYEQYDDDEIGALDNAELEGSIQVDSNRLQEVLNDYYKEKAENCVKLNTLEPLEDQDLPMNELDESEEEEMITVVLEEAKEKWDCESICSTYSNLYNHPQLIKYQPKPKQIRISSKTGIPLNVLPKKGLTAKQTERIQMINGSDLPKVSTQPRSKNESKEDKRARKQAIKEERKERRVEKKANKLAFKLEKRRQEKELLNLKKNVEGLKL

SEQ ID NO: 17902 - DNA, 1770 bp, Homo sapiens
agattgtgaatatttacctaatgataatttttagagaaggagatatcatagatgagtatgattgggaagttcagaaaactaaaatttgatttttacagccatccaactatagaatcattagaatttagtcatttatggataaattaaaatgaacacctggactcttgttaaaatcagaaagtccaaaccaaagataggcacttcccattcaccattctgttttaaagcagtaaaaattgaggtgcccttggatatccacaagcctaaattgagtacacccttgaaccagagcccctcagttaatggggtgaccgacatggggtagctgatcccagggggcattcccctctcgagctggccctgcactgggtggcctggggattgtgcttccttgcacagtggtgcacatttctatgtgtggatgagattttcttgtcaacttttcctgccaagacactaaatgcttttcagtgctaatactgacctgatagtagagatttctttccctgagtcggatggtagcaggatttacttggtaacccttgatttaaaatacctgtttttttgtttgtttgttttcttttgttttttaaggaaataagatcaataggcggagggaaattgtttctatatgcacttattaaataatttttgttaacaaccctgccctgggataaaagtgaatggaagtacatgactgagtaacagtaattaattctttgccctgatcgtttatttggggactgtatatgctttcttgactgacaatagaatgttgtattagttttcattgtgtctttatttgcagttcacagcacttttgttttgcatatgctacaaactaaaagtttagcaattacgttatattccaattctggagtccagattgtacaaattagatgaaattctaattcgtcattttaggaagaaatcaattacctaaaattactggctcttttcaacataccctttagtatgtaaaaaaataagcttcaaatgcgtgggttaaagttaactatcaatcccagtttaagaatgatatttctgtaagaaaactgctttattttccaagttgtagtatttaacataggctgagtcacaaataagtttttaattgtatcttaatgcagttgtctctgcctttcaagtcactttgattgaaacattttaagcagaacaaatatagccaataatttaaaataatcaccccaaaaccatttctcaaacctgctaaaactttgagcatgtgaataattttctcctcttcacattcttcttatgtgggaaggaagtgaatttgaaatattaaaatctgccctttggaataggctactttggccgtttataacttgatttctactcggggaggaaggtacattcccaatagctttccaattgggatatcctgtgatatgattggcaggctgtccgagtagttacacttaataaaatttgggttcgaaagcagattcctggaagttcaaaaataactaaaacagccccggataggttagaaagtgaacttaaatcattctcagaattagaaaataagaagttattttttatcttcaaagataaaaagggggccgggcacggtggctcacgcctgtaatcccagcactttggaaagccgaggcaagtggatcacgaggtcgagagattgagaccatcctggccaacatggtggaaccccgtctctactaaaactacaaaaaattagccaagatcacgccattgcactccagcctggagacagtgagacgccgtctc

SEQ ID NO: 17903 - DNA, 2200 bp, Homo sapiens
agaaggtgaaatagaccctaccccctgatggaggatccacttgtatgtataaggatgggaagctttgcaggcagccatctttggaagccatccaccacagtggctcaatcaacctggtgatgacacagagtgaagtccccactttccaagaattttccttcacaagaaagttcctttcatttcacccacacaggaatgttgactttaaatgagaccaagacctaaaaggccacattcacagataggtaacagggcatctctttgacaagcctcaatcgctcttgggggcttcaatttcctcatctgtaaaataaagatagcctagagttgagttctacagccttaaacctcaaaggaaaagcctttatacaggtgttctaatttgcaactatcaccagatatttcccataaggccaggtgcagtggctcatgcctgtaatcctatcacttcgggagaccaaggcaggtggattacttgaggttaggagttcgagaccagcctagccaacagggtgaaaccccacctctactaaaaagacaaaaattagccaggtgtggtggtgcactcccataatcccagttactgaggaggctaaggcacaagaatcacttgaacctgggaggcagaggttgcagtgagccaagatcatgccactgcactccagcctgggagacagagagagactctgtctcaacaacaacaacaacaaaaaattatttcccgtaggattttccaaaggagggttaggaatgtgaagtcaatagttcacaaatgcactcctacttttcggaggtatattaggaatgcatatcttgttggtacctacacaaagcctcctttgaattttaacttccagattttttctcttgcttatggtctgccaccatgggtaaagcacccccacatacatcagcacagagcccacatacatcaattttttcataacccccaaagagagcagtcagccaaatcagaaagtttcagggagatatcaagatagaaaaggctagatacccagtctgagaagtcagacaactccacaaaactaataataataatgtcaccattcataggtattattattcatatgtagaatatagaggagtcaggatttggaggcaggcctgggacctaggttcaaatcctggcatcaccacctacatctgtgtggcctccatagggtactttggtaataataaatattcaatgaggtcatataagctagtgttggcagaggcccagcccatagaaagctcacaaccaagagtggctgtctttattgtcacattgattttcagtctaagaagttgcaactcagaaaacaataagtcatctatgttgcaaggctgtttgctcttcttccatccagaaagtggctgttagagaaagaaactcacactgaccatgtgtctactccttgctaaacatttcccatgtgcagccttgagtaagcctccaagtattcctgaagttattgtgaatatgaagaaattgaggctccgaggcttagattacttgccccaggacagataaccgagatgaggcagagcggggattaaaaccaggtggccctgatgggacaaaggctcaatgtaaatagaagagtcagcccatgtgtccacatccaatgaagtaaacatggaaaatgcaagatcacccatttgacctttaccattaacctatctaggcctcagtttcttcatctgtaacacaggggcattgaaacgtaaaacccaaagtttcatgaatgcatgatttggggtttaaaactaaaatagtattatttcagtgttctgaactgtatgttttcattaagtatcattttaaaatcacattttctaatttcatgtctctgagaagtctagatcccttatcaactcatagtggttgagaatctcaaaattattcaaaaatatccttgaggtgtggtgtcccaaataacctgggacataaactagcatagctggagcactaactttcaaaataaaattaatcaaggaataatagtcagctcttctaaaacaaatacatatataaacatatgcacataggctgtagcctcagaataccatttactctaagaatgtaagctattctcctatgctcaaaataatgtaaatttaaggattgagaacttcagtggtaaactgtcacctgtatctctatggtttaaacaaataaagaaaagaataagaaaac

SEQ ID NO: 17904 - DNA, 1489 bp, Homo sapiens
  CDS (106)..(804)
aagacaaatgaaaaactgtatacagtatgtgatgtggctctctgtgttataaatagtaaaagtgctttgtgcaatgcagattcaccaaaggacccagtcctcccaatgaaattttttacacaacctgaaaaggacttctgtaacgataagagttatatttcagaagagacaagagtacttctgttaacaggaaagccaaagcctgctggagtactaggtgcagtaaataagcctttatcagcaacgggaaggaaaccctatgttagaagcactggcactgagactggaagcaatattaatgtaaattcagagctgaacccttcaaccggaaatcgatcaagggaacagagttcagaggcagcagaaactggagttagtgaaaatgaagagaaccctgtgaggattatttcagtcacacctgtaaagaatattgacccagtaaagaataaggaaattaattctgatcaggctacccagggcaacatcagcagtgaccgaggaaagaaaagaacagtaacagcagctggtgcagagaatatccaacaaaaaacagatgagaaagtagatgaatcgggacctcccgccccttccaaacccaggagaggacgtcgacccaagtctgaatctcagggcaatgctaccaaaaatgatgatctaaataaacctattaacaagggaaggaagagagctgcagtgggtcaggagagccctgggggtttggaagcaggtaatgccaaagcacccaaactgcaagatttagccaaaaaggcagcaccagcagaaagacaaattgacttacaaaggtaaaaatgcatttgcaaagggagaaaatgaaggccaaacagaagcaggctccagcttctgcaaaaacttggattcacaaatgtccctgaacagaaaatgaagctcacttcagaacacacactctctgccttgaaaactaaagagactattacttccttttcacatgaccacaagtcctctgatggaaatgtacagcagaaactcttgagagagaggctaaaagcaactctgttctcccccttcccctagacttttcttacgaaaagtcaataattaagcaaattgcttaacacttggttccagttcctgcctatctggagtttaaatgcgtaatacaccattaatttccacgctgcagtttttattttaaagaaagtaacaagatgtctttacactgacactgaaaattcatccattttagagccaggaattcccatgttacacaggaaaaaatagaagtctactgaattaattttttaaaagaaaagagatcagattaaatatttctttgtttttccttttggaaacttttatgtataattctttctgcctgcctacttttctgcaaaaatgagatgtacagatttcggttccctgctatgaaaagtgatgtggtagcaattttataaatgttgctttctgatttttatcagagtgagaaaattaaaattattgatttgcaagt

SEQ ID NO: 17905 - protein, 233 aa, Homo sapiens [sequence omitted]

SEQ ID NO: 17906 - DNA, 2365 bp, Homo sapiens
actatattttttaaggttttattaaaaagccttagaaagttacatattggtttagaggctaaaattgtgttgatgctgtttactcacctaattacatagttttaatcatttgtacataattttaaaaacttactttgtattgattttgaatacagtgaaaatcttattgcaataaactattttagtaaaatattattttgttgagttaatatttttcagctattaatttacttatcccatagcatttttgttattatttcggaagagagagcatgctagtttaagtttcattttaattggtcgtgtacttggtgcttttttgttgttgttaacttgttcatttagtaaaaagcaaatagctttactttctgaaaaagaaataattcattatctctagtaatacatctgtaattcttcatttagaagggtaattagggcaaaagtaaataaatcattatatatcattagtatgttgacatatattttcagtaacattgttttatgttcctccagcgtaacatgtagctgaacagtagaaggtagaaaataaattatgacatctcttctaaggcctggctaggcctgaagctcactgccagggagtttgtgtctagaatgtttttaaaaataggtagtggagccatagccctcaccatagacacctctgagcccactggcattgtctctgagcagaagatggctgtgccactcacatatgctaatcttggcaaatctgccaagcatgtcttcaccaagggatatggatttggcttaataaaacctgatttgaaaacaaaatctgagaatggattggaatttacaagctcaggctcagccaacactgagaccaccaaagtgacaggcagtctggaaaccaagtacagatagaccgaatatggcctgacatttgcaaagaaatggaacactgacaacacactaggcaccgagattactatggaagaccagttagcatgtggactgaagctgaccctccattcatccttctcgcctaacactgggggaaaagtgctaaaatcaagacaggatacaagtgggagcacattaacctgggctgcgacgtggatttggacattgctgagccttcagtccgaggcactcttaagtgctgggttatgaggattggctggccagctaccaggtcaattttgagaccacaaagtcctgagtgacccagagcaactttgcggttggccacaagactgatgaattccagcttcacactaatgtgaatgacgggacagagtttggcagctccaattagcagaaggtgagcaagaagttggagactgctgtcagtctcgctgggacagcaagaaacaggaacactcgcttcagaatagcagccaagtatcagatcgatcctaaagcccacttctccactaaagtgaacaactccagcctgataggtttaggatacacttaaaccctaaagccaggtttcatactgacactgtcagctctcctgggtggcaagaacatctatgctagtggccacaagcttggtctaggactggaatttcaagcataaatgaatgctgtagaattgtttaaattattttgcagcatagataccttcacaatttagtgtatcttttaatgttgtatggctgggatgcaagtattgctaaatgtcatattggacctccaggttaaagatgattcagctttaaggtgttaccctttcaggggtacagaagaaacccagttccaaaaaggtcccttcagtggtagatttggggaacttggtggcccctgtagagatgccaggtttcttttttatctagaaatggctgcaagtggaagctgataatatataggcaccttgtaaattcatattgagtaaatgaatgaaattgtgatttcctgagaattgaaccttggtttcctaaccctaactgatgagaggcttgttgcttgatggtgtgtacaaatttacctgaaagggaccttttaaagacagatcttcatgacttgttcccatcccaggtcttcattacctcttttacacaaaaagatctacagggtgtggtcactgtttcttttgtgctgttttggggtggagagggtggatgtgatgaagccaataattcaggacttaattccttcctgagttgtggtttttttgtccttgcatcaggtataaaatagcttccaggagctctagctataagcttggaagagtctgtataattgtaatcacagggtgacagcactcagaatctaaactgggcttatgtggtattctcaccactcaatttattttttagcagtttaatgggtacattttagagtcttccattttgtgtggaattagatcctcttcctcaaatgctgtaattaactt

SEQ ID NO: 17907 - DNA, 1862 bp, Homo sapiens
  CDS (923)..(1639)
tttatctacatgtgacagttttctatcattgggttttttaaaaaatctgtgtattcaactagaacttgagctccacggaggcaggaacttttgttttgtttttcttcactgctcttttcctcgcacctgtctgaagcagtgattttagccagaatctagatttcctgattctggtccagtgctctttccatggttctgtgtgacctcatacatcaaccttatttcacaaacgaggtttttaagttccttgagcacagtcgattgtgttttttactgcttctgctccgtccctgcataagacaggactgtgtcatgtacccagtgatggactcctggtaaataccatggcttgactaaatgacctccagtgctccctgtggtcttcaccaacacgcatcagacgacaggctcagccacgggatacttcgctttctgtaggagtaagagacaagttgctatcactgaacagatacacagtggcatttggaaactgcatgcagtttgaaaaaatcgtgatacagcaggagtctagttttcaataaatagcttattcatattctggattttgaacagttcatgtaactgtaactttggggtagtggataatgagactgaaattaatggttcctctgctggtttccgtctgttttttttttttttctcccaggaggttggtatttctgcacttaaccacctgatgtttttagggggagtatatcccagataaattctgttgtaagtcaaagagcatccatgattggcttggctctttcttaagcaactactaagatgctcctacatttgggtttgaacgttttttattctcttggctatgaagtttcttaagtgactctagtaatactgatggttccccttgtgtttacaggtgatctgcaactctttcaccatctgtaatgcggagatgcaggaagttggtgttggcctatatcccagtatctctttgctcaatcacagctgtgaccccaactgttcgattgtgttcaatgggccccacctcttactgcgagcagtccgagacatcgaggtgggagaggagctcaccatctgctacctggatatgctgatgaccagtgaggagcgccggaagcagctgagggaccagtactgctttgaatgtgactgtttccgttgccaaacccaggacaaggatgctgatatgctaactggtgatgagcaagtatggaaggaagttcaagaatccctgaaaaaaattgaagaactgaaggcacactggaagtgggagcaggttctggccatgtgccaggcaatcataagcagcaattctgaacggcttcccgatatcaacatctaccagctgaaggtgctcgactgcgccatggatgcctgcatcaacctcggcctgttggaggaagccttgttctatggtactcggaccatggagccatacaggatttttttcccaggaagccatcccgtcagaggggttcaagtgatgaaagttggcaaactgcagctacatcaaggcatgtttccccaagcaatgaagaatctgagactggcttttgatattatgagagtgacacatggcagagaacacagcctgattgaagatttgattctacttttagaagaatgcgacgccaacatcagagcatcctaagggaacgcagtcagagggaaatacggcgtgtgtctttgttgaatgccttattgaggtcacacactctatgctttgttagctgtgtgaacctctcctattggaaattctgttccgtgtttgtgtaggtaaataaaggcagacatggtttgcaaaccacaagaatcattagttgtagagaagcacgattataataaattcaaaacatttggttgaggatgcc

SEQ ID NO: 17908 - protein, 239 aa, Homo sapiens
MQEVGVGLYPSISLLNHSCDPNCSIVFNGPHLLLRAVRDIEVGEELTICYLDMLMTSEERRKQLRDQYCFECDCFRCQTQDKDADMLTGDEQVWKEVQESLKKIEELKAHWKWEQVLAMCQAIISSNSERLPDINIYQLKVLDCAMDACINLGLLEEALFYGTRTMEPYRIFFPGSHPVRGVQVMKVGKLQLHQGMFPQAMKNLRLAFDIMRVTHGREHSLIEDLILLLEECDANIRAS

SEQ ID NO: 17909 - DNA, 2441 bp, Homo sapiens
  CDS (612)..(1919)
cttcagtgaaattggaatatagttcattcaaaacgaatcaggagaaagaattcaacaaactttccgaaagacacatgcatgtacagcttcaattagataatctcaggttagaaaacgaaaagctgcttgagagcaaagcctgcctacaggattcctatgacaacttacgagaaataatgaaatttgagattgaccaactttcaagaaacctccaaaacttcaaaaaagaaaatgaaactctgaaatctgatctgaataatttgatggagcttcttgaggcagaaaaagaacgcaataacaaattatcattacagtttgaagaagataaagaaaacagttctaagccctggtatacagtggtgaacgtagagcttacatccagttgagagacaagcaattgacatttactcatttattcaaacatttattgatatccaacaagccaggcactgatctggtgaattccagaacatttagagttgaaacagtgaacaaaacatccctgtcctcgtggattttaacttctagcacagggagacagagaaatcttaaaagttcttgaggctgtacgtcaggagaaacagaaagagacggccaagtgtgagcagcagatggcaaaagtacagaaactagaagagagcttgcttgctactgaaaaagtgatcagttccctggaaaagtctagagattctgataagaaagttgtagctgacctcatgaaccagatccaggagctaagaacatcggtctgtgagaaaacagaaactatagacaccctgaaacaagaactgaaggacataaattgcaaatacaactctgctttggttgacagagaagagagcagagtgttgatcaagaagcaggaagtggatattctggatctgaaagaaacccttaggctgagaatactttctgaggacatagagagggatatgctctgtgaggacctggctcatgccactgagcagctgaacatgctcacagaggcctcaaaaaaacactcggggctgctgcagtctgcccaggaagaactgaccaagaaggaagccctgattcaggaacttcagcacaagctaaaccaaaagaaagaggaagtagaacagaagaagaatgaatataacttcaaaatgaggcagctagaacatgtgatggattctgctgctgaggatccccagagtcctaagacaccacctcactttcaaacacatttggcaaaactcctggaaacacaagaacaagagatagaagatggaagagcctctaagacttctttggaacaccttgtaacaaagctaaatgaagacagagaagtcaaaaatgctgaaatcctcagaatgaaggagcagttgcgtgaaatggaaaacctacgcctggaaagtcagcagttaatagagaaaaactggctcctgcaaggtcagctggatgatattaaaagacaaaaggaaaacagtgatcagaatcatccagataatcaacagctgaagaatgaacaagaagaaagtatcaaagaaagacttgcaaaaagtaaaatagttgaagaaatgctgaaaatgaaagcagacctagaagaagtccaaagtgccctttacaacaaagagatggaatgccttagaatgactgatgaagtcgaacgaacccaaactttggagtctaaagcattccaggaaaaagaacaactgagatcaaagctggaagaaatgtatgaagaaagagagagaacatcccaggagatggaaatgttaaggaagcaggtggagtgtcttgctgaggaaaatggaaagttggtaggtcaccaaaatttgcatcagaagattcagtacgtagtgcgactaaagaaggaaaatgtcaggcttgctgaggagacagaaaagttgcgtgccgaaaatgtatttttaaaagaaaagaaaagaagtgaatcttgaggattccggtcagctacctaggcatcaccttgtttgaagatgtttcttctcttttacaagtaagacctactcctggccacttaggagagctgaatttatggaccttaattattaaatgtttataaggtggtggtaaccacctcaagtttctgatgaacattctgcatccatatacaccctgtgacagtcagcagtctgctattaagtggcctacttcaaggctttgaatcaacttaagggaaaaccttttgtctttgtaaaaataaaagcctgtagctaaggtttacagtggacattagccagatcattttcttcttagattatgccataatctcctttgattcttatggaagttctaacaatatatggtggttccaacacctgcagtgagtttaatgactgacttagtagcaggtacaagaagcaaacttgttaatatagattatttttgtattcttactttaggtattttcttgagcattttccatgactgtaaataaagccattttttaagataat

SEQ ID NO: 17910 - protein, 436 aa, Homo sapiens
MAKVQKLEESLLATEKVISSLEKSRDSDKKVVADLMNQIQELRTSVCEKTETIDTLKQELKDINCKYNSALVDREESRVLIKKQEVDILDLKETLRLRILSEDIERDMLCEDLAHATEQLNMLTEASKKHSGLLQSAQEELTKKEALIQELQHKLNQKKEEVEQKKNEYNFKMRQLEHVMDSAAEDPQSPKTPPHFQTHLAKLLETQEQEIEDGRASKTSLEHLVTKLNEDREVKNAEILRMKEQLREMENLRLESQQLIEKNWLLQGQLDDIKRQKENSDQNHPDNQQLKNEQEESIKERLAKSKIVEEMLKMKADLEEVQSALYNKEMECLRMTDEVERTQTLESKAFQEKEQLRSKLEEMYEERERTSQEMEMLRKQVECLAEENGKLVGHQNLHQKIQYVVRLKKENVRLAEETEKLRAENVFLKEKKRSES

SEQ ID NO: 17911 - DNA, 1746 bp, Homo sapiens
gaacatacattttattcgaccatcctcactggttagggattcagaggaaggatgagccgggcaactgtccagaagtaacaatgccctgacgtcctcgtcatgaaatcttagaacattaagttgaaaatgtcggacctcaggaacaaagttttgaaaaaaccattctgaaaacaattctctggtgaaccaaacatctttactgggtttatatatcacaggcaatgtacttgtgtcctctttcacacttttgggcagttttgattttccaataatgattgactttaatttatgagttccgtctgcatttgcacataaaaaggcagacaacctttctttgtttattttcttccctggtaggcagatatctttcctacttgcctgagaattttctggcattgacttccaaaagaggtctgtttcatccccactgtatagctgagctagacacagtttctcctctttgattatcatggacagtttttgtcgaaatggctcaacattttcagaaactgaacttaggacttgttccccacatccttttcggttcccaattgcatgccgatttcgaaatctaaaaagccaaccagtgctagctttgaaatctgttcgcccaaaacaccgtgcaaatctctctgcagcagcctgaagctccacgcctcttaccggaacaccggctgagcgtttctgttggtaccacatgtagaccgcatcatctacatcaccatatttggctcccgttgtcctctttctcttctcagcccctactaatggcatgtcctgcttcagtacaaagtccagaactaacttcttattttttttaatgtcataaaatgttgacttactgattccaaattcatccattacacttttaagtgatcgtccagcttcaattctacttagaaccttcattttctcctccaaattcagtgttgtatatttccctctcttattcatactgaatttaactctgaaccaccaacaggagaaaacaaagggaaaagccttaatgaattggcaaaaaaaaaaacccacattttttaaacaaaacttagctgaaagccccagaaggcatgggcattgtattggaggataatggactgaaggggctaaccatgactgaagagctagtctagaggtggaggtcttatgcactcagaaagctgccagttgcaaagtcctgtctggctcttgctcctgcaagccatgagtgatcatttttcagaatgccccctacctctcctctcttttgacagatacaacagcctcagtcaggaatgacaggaatacctgcatactttccctaactcaataccggaaaacggacaatatgaagagaggagggatggagcaagatgtgcccacaagacaggtgtgataagtttccataaaaactgatgcttcagaagaagggagcgtgaaagactcaaaggcaatgacagagtaatcttgtgtgtagcagagatgcaatgtggcttctccccttccaaaaagacctgattttacctcactgccagaaaagagaatggtgctcaaattgctttgtacatagtgttcactgggcagcagttcatctacctggataagggctccgagctacagggaccctgacattgggatgtatggagagttggaattcaggaacagttgtaccgaatcttgaagtgaagaagaaagtagtttgttgtacatatgaatgaaatccaacttttattgcattcaatatagtattgtcaagcaccgtgcttt

SEQ ID NO: 17912 - DNA, 2497 bp, Homo sapiens
  CDS (305)..(970)
tcccaatgctggtcggtactgggagacagtagagaggttgaagatcaatcagttctatggcgccccaacggctgtccggctgttgctgaaatacggtgatgcctgggtgaagaagtatgatcgctcctccctgcggaccctggggtcagtgggagagcccatcaactgtgaggcctgggagtggcttcacagggtggtgggggacagcaggtgcacgctggtggacacctggtggcagacagaaacaggtggcatctgcatcgcaccacggccctcggaagaaggggcggaaatcctccctgccatggcgatgaggcccttctttggcatcgtccccgtcctcatggatgagaagggcagcgtcgtggagggcagcaacgtctccggggccctgtgcatctcccaggcctggccgggcatggccaggaccatctatggcgaccaccagcgatttgtggacgcctacttcaaggcctacccaggctattacttcactggagacggggcttaccgaactgagggcggctattaccagatcacagggcggatggatgatgtcatcaacatcagtggccaccggctggggaccgcagagattgaggacgccatcgccgaccaccctgcagtaccagaaagtgctgtcattggctacccccacgacatcaaaggagaagctgcctttgccttcattgtggtgaaagatagtgcgggtgactcagatgtggtggtgcaggagctcaagtccatggtggccaccaagatcgccaaatatgctgtgcctgatgagatcctggtggtgaaacgtcttccaaaaaccaggtctgggaaggtcatgcggcggctcctgaggaagatcatcactagtgaggcccaggagctgggagacactaccaccttggaggaccccagcatcatcgcagagatcctgagtgtctaccagaagtgcaaggacaagcaggctgctgctaagtgagctggcaccttgtggggctcttgggatgggcgggcacccaagccctggcttgtccttcccagaaggtacccctgaggttggcgtcttcctacgtcccagaagcagcccccaccccacacatgacccacaccgccctcacgtgaagctgggctgagagccctttctcccatccattggaggtcccaggagtgtcacccatggagaggctatgcgacatggctagggctggttctgccatctgagtttggtttcctggaatgaaaaggcattgccatctccattcctctgccctcttgagccagcacaggaaggtgaggccctgggatagcgcgcctgctcagataacacagagctagttagctagtagcaaccgtgttttctccagatctgtctagatacaaaggtcagaaatcttatttttatacttttatattgtggaagaacagcatgcaacactcacatgtagtgtgtggatttacttgaacatgttctttttaacatgtagttatgaaaatctccttttttgcctctactggtgaggaaacatgaggatcagaggccacatttttaattattgttagtgtatttggaagtctgaattggagatgtttgtacctctgtctaaacagttcccttgagaacttccaagcctccggcatcttttcctggtgagtgtttctcctgtgcttggttgtgtataatggagctaactcctaagcggtggggtgaatgtggccgccttagttctgaagctactccagttatgttctgtttcttcaagctgtgatccagaaagatttttgtgcccccagatgcctcttgataggagaggcaacatactccaaatagttgggttcttcagggaagctattagaaactcaggtgacttgttagagcactaacttggtcagagccaaatcctggcaaacgctgcctgaccttcactctgtggttggggcagtgagaaccactgaggtccaatgatgagacttggaggtctggatccagtctctctttgttttaatgtgacttaggtgctgtcaacattagcaagataatggaaatcacgacgccagtgggtgcttacctccctgctaggcatgcaggggctggcggttggcaggggaaggaggcccagtgagccgggtcccttaggggagggagagtttgtcctctttgccccacagtctacccttcagggccttgtggcagtgccagtgttcggggggtgtctgggccactgagtacccactcggtcgtggttgtgctggcctcttgggtgagtgaacctgtgaagcccaggaggtggtgttggctgcagggtacacaaatactgagtggtggtcttttgttacaggcttagcaacaaagctgtgccctgggcatggggggctgtagtgtagctacagttgtgcgtttgtgaaatggcttagctttccatgttgctgagaggaacctggacatggtcccgggcatctgaatgatctgtaggggagggagttcaaataaagctttattttgttc

SEQ ID NO: 17913 - protein, 222 aa, Homo sapiens
MAMRPFFGIVPVLMDEKGSVVEGSNVSGALCISQAWPGMARTIYGDHQRFVDAYFKAYPGYYFTGDGAYRTEGGYYQITGRMDDVINISGHRLGTAEIEDAIADHPAVPESAVIGYPHDIKGEAAFAFIVVKDSAGDSDVVVQELKSMVATKIAKYAVPDEILVVKRLPKTRSGKVMRRLLRKIITSEAQELGDTTTLEDPSIIAEILSVYQKCKDKQAAAK

SEQ ID NO: 17914 - DNA, 2277 bp, Homo sapiens
  CDS (77)..(2167)
caagaaaattgttttgtgtgatgtagaaaaacctgagagcttacactctttttctgtggaggctccagtttcctgtatgcattggatggaagtgacagtagaaagcagtgttctcacatcattttataatgctgaggatgaatcaaatcttctcttacctaaactacctacactgccaaaaaactatagcaacacctcaaaaatatttagtgaagaaaattctgatgaaattattaagctcttgggagacgtcaggcttaatattctcgtccttggaggaagctctggatttattgagctttatgcttatggaatgtttaaaattgctcgagtcacagggattgctggtacttgtcttgcattatgtttatcaagtgatttgaaatcattatcagtggtcacagaagtctctaccaatggtgcttcagaagtttcatactttcagcttgaaactaatctgttgtactctttcttacctgaagtaactcggatggccagaaagtttactcatatttcagctctgttacagtatataaatttgtcactaacatgtatgtgtgaagcatgggaagaaatactaatgcagatggattctcgtctcaccaagtttgtgcaggaaaagaacacaaccacatcagtgcaagatgagttcatgcacttgctattatgggggaaagcaagtgctgaacttcagactctcttgatgaatcagttaacagtaaagggcttgaaaaagcttggccagtctatagagtcatcatactccagtatacaaaaattggtcataagtcatttacagagtggctcggagtctttattataccatttgagtgaatcgaaaggaatggcttcatggaagcaaaaatatgaacctcttggactagatgctgcaggaatcgaagaagctataactgctgtgggttcttttatactcaaggcaaatgaacttcttcaagttatagatagtagtatgaaaaacttcaaagcattttttcggtggctttatgtggcaatgttgagaatgacagaagaccatgtgcttcccgagctgaataaggtaatgactcagaaagatatcacattcgttgctgaatttcttactgaacatttcaatgaggctccagacctttataatcgaaaaggaaaatactttaacgttgaaagagttggtcagtacttgaaagatgaagatgatgatcttgtgtcaccccctaacacagaaggaaaccagtggtatgactttcttcaaaatagcagccaccttaaagaaagtcctttgctgtttccttattatcctcgaaaatcattgcattttgtgaaaaggcggatggagaatattattgatcagtgtttgcaaaagccagcagatgtaattggaaaatcgatgaatcaagcgatctgtattccattgtatagagataccagaagtgaggattctacacgtagattgttcaaatttccttttctgtggaataataaaacttcaaatctacattatcttctttttactattctagaagattcactttataaaatgtgcatcttaaggagacatactgatatttctcaatctgtgagtaatggactaattgctattaaatttgggagctttacatatgccacaacagaaaaagtcagaagaagcatctacagttgtttagatgcacagttttatgatgatgaaactgtaacagtagttcttaaagacactgtaggacgtgaaggaagagatagactcttggtccagctgcctttgtctttagtatataacagtgaagattctgcagaatatcagttcactgggacttattctacaaggctagatgaacagtgtagtgctattcccacccgtaccatgcatttcgagaagcactggagattactggaaagtatgaaagcacagtatgttgctgggaatggttttcgaaaagtgtcctgtgtgttaagctcaaatcttcgtcatgtgagagtatttgaaatggacatagatgatgaatgggagctcgatgagtcttcagatgaagaggaggaggccagtaataagcctgtaaaaataaaggaagaagtgttgtcggagtcagaggcagagaaccaacaagctggtgctgccgctttagctccagagatagtcattaaagtggaaaaacttgaccctgagctagactcctaatctagcttgccattattgtgtgtgtaattatggccaaaaggacataggagatggactaagatgtcttggaccacctttgtgtaacaaagaaataaacagtaaatttt

SEQ ID NO: 17915 - protein, 697 aa, Homo sapiens [sequence omitted]

SEQ ID NO: 17916 - DNA, 2132 bp, Homo sapiens
ttgatgttttaaaatgggcagttttgagcaataatctgtcctaacagaacagtagcaataagttttaggataccatcttgaatgtctagttggtgtgcaatagcttttctttctaagatggcaataatgattcatttctactacattttgcaaaagtgtttttgttgcttatacacattttcaataaccaaggtagccttcatatgtagccttaaagcattacctcttgattgtatctttagattgatataaagtacttgcatatagagtatttgaagtgatagattattagatttgctctatgtctgaaaagagagctattctgcagtgcctaaatatcatttaaacagtaaatattaataggaaatattgctatatctgaatatataatacaaaagtttgatcatggtgacacaaatgttggacatttttttccttataaaaggctctttttttatatattgtacaatatatttggagattcagagcatagtgactatagtcgaaaactgagattgcacttccaaaattggccacaagtaaataatcttatgaagggattctttatcatgtttcaaacaagtgggttacaagcagactttgagacacttttccacagaaacaatactatgaattggtgattgagttcccaggccaagcctccctcaacaggttcaactctaatatacctaacctgtgatactgaaggtgcctgcctgagttttgggtctctgagacagggtagtgtgagtagtttggaggaaggacagtgcaactttccaccccttttcctaagaacaaggtctttctccttttaatttttccactcattttcacctcctaatgcccttgagatccaggtgcactcctgggagttttgttcacctctcccaactgagaaccttcccactgggctccatcctccctcctgaggtccttcatattccagagtcacccacccttctcctcccattagtcagttctctaagtacagctgatgtcatgtggtgctgagaagaaagcagatcacacttcatcacagaaagaatgccttgtgattatcttctccacatctgaaattccttttgacacctgcattgggccgactgccattcccatgactgctgcacctgcgtttttagagaatgcctcataacccactgattctcattcacagagaatgggagaacggaatgaagaaagattccagcagcttatagaaggatagcaatattttgggacagggaaaatcctgtcatacctcatctcttcctcaggaggagttctgagctggtcctgcttttcatagttgtttcttttcttccacttaagaactcatagatttttcttactgtcctaaggaagtccttacctctgaggtatctcctcaatgaatactgttttcaaggctgaaatagttcattatgttaataaccttctttatgttctcagggaaatgcttaggtggtgtcacaaaatgtgccttttcttttcttttttttttttttttttgaggcagagtctcgctctgttgcccaggctggagtgcagtggtgcgatcttggctcactgcaagctccgcctcccgggttcacgccattctcctgcctcagcctcccaaggagctgggactacaggctcccgccaccacgcctggctaatttttttgtatttttagtaaagacgggtttcatcgtgttagccaggatggtctcgatctcctgacctcatgatccgcccgcctctgcctcccaaagtgctgggactacaggcctgagccactgtgcccagccaaaatgtgcctttgcaaagtttgcgaaatcagattttgtatcccaatagaaccaaaatatttatgaggatgctagcattttccaagcatagtaattagttcacaactgagaaatattatgtctgtagtagataaatattagttgtgcattttaatttaattctcctttttccattttgtctcatgaagtaccttattgcaaaaatcccactgagtaatagctcataaattataatctttcaaatagccatgctaccagcgtacaacagtgatacatgtaaccccaaatgtgatgtgagaggacgattactttgtaaataaaacttgttattgacatttt

SEQ ID NO: 17917 - DNA, 2280 bp, Homo sapiens
gtagcactgcttttttgaggccagtagcaacatccagagaccattcttccatactttactccctcctttttcagacttgtttgtaaagtacagaatctgaatttagcctttatgattgtatatgatccacagaagacctgatttatgaaattttgtactaaaatcatttggaaatgattgtattgtaaactgaggctaaatttttttttaaacctgtttcatgtgttataaaggccagcttgtaaaagaagctgcaacagactttctctgctcatgatttgcactcttagggttttgttagcccttttgtactactttctttttaaattgagaacatggttctttacatataaatctgcttcaaccttaggatgttttcagaccagaggcaacttattcatgaatttttatgaaaactatctactaggacagataagctgaacagtgatgatctgtagacatttaaggactgaatgtaatggttgatatatgtacattctgatatttttaaatctttaactttttaaagttaaaaacctacagctgcttaggtccagcttcttaactctttttgagacacttcctgtcctatctccactgtgcctgcctaaatttgttctcaccaagcactgcctgtgcatgcagagaaaatctgtgcatcctcttttatatttttaaaatactgtttaacatttgtgagaattttatgaaaatgcttttgtatgagctgtggctttttcccattgtgaagcattgaatatcacattttggaacatgttatagggtgagtccctggatctttgctcaccagatccaagcactgcttctcggtgtcattgcagtgtgctgcttgtcacccagaatactactatcatgtgaattctttttgtcgtcagtgtcttttccttagtctttttgttgttgttgttgttgttgttttaatcattccttttttaagaagaagtaattttccatttatgaagcagtatgaattagatgtattttcaaaacaggtccctaagacaattcttcagatcatttttaaaatgactaagtcattttagtatgtcaagcaagataaaaattacatcataccgtctattttgcccatagtgccatttagagatgaaaaccagctttaactttgcaaagtgaacatgtacatggtctgctctcatttattcattcttctctcaaaagtcaaatgaatgcagagggagcttggtcaaactgcttttgtttcaactgcaggcaggggagcaaaaggacgccatgtgagcattaggaaaaaaaatactcactcttactaaccatttttatacagaaaatgagtcattttggaaatgattcttatgttcttttttttctccttttagaaaattctccaaaaggttttgatgttgaatcttggtcttggacctgttttttcctttgagggttttttgttttttgttttttctaggatttcattgtgatgttttggttttgttttttgctttttgtttaagttgtgctgacaccaaacacatccagtttataatcagtatattggaaagctggtattgatgtagaaccagtgcataactttttatggggttttgttattggtttttttttgtaaagtgtgaataaaaggtatgtttactcatttttcctgaacactgtgttggtaatgtgcatcatgacaatttccagtgaaggtgagctggagctggttggactaatgagactgaggaagcagcttttcctacgatctgcattatgtaatcacaggtccagagagctttatggaagcgggagaggaggagcacttactcatgttgtatttgttaatggaggatgtcatcttttcatagatgctggaactagagtgcacttgttagatgctaaaggtttgagctttacacaaaatgtcttcatctgtatttgttattgtctacaatatatttgaatttggggcagcatattaagatgtaatggcctgttatgtcttgaaaatacttgttttgcctcttccaggcatactgcattctgtggatcagtttgaacagcttctccaccttatttggacagtgataaattgaaccaagagtgtagatttacaagtgtaaccttcaaaagaggaagaactatttggggtctgtaggtaatgaacagtcacaccaaaatagactatgatgcttttgttaagaaaggtttcatgttttagatattttccgtgtcctaaataattttcaataatctataatccctaaaatgcaataaaaactagtatgtttt

SEQ ID NO: 17918 - DNA, 1964 bp, Homo sapiens
catgggaatttgtttggttttattttttatgcttgtttttgtttttaaaataatacataaatgtagtttgccttaagaaactgttatttttgctgagaatataaattatatacaaataaaaccataaagtccagtgaaaatacaagaatacaatgctgcattacagaactccaaatctgaaagtacctccctttatcattcagttctcagatcaaaggtcatttctttaaaggtaattttctgagttccctagctaaaatatcacatcactaaccaattcagttcactctattttctgtattatctttttcatatcattttatttctacatgaaatcatctgatttatttttaaaatttttattgtctatcttatttcacttaaaagagaggagcaagaaccatatctgtcctgtttattagtgaaacacctaaaagaatacctggaacatattaggcaatcagtgaatttttattgattgaaaccatagaatcaaaatagcttgatttctagctttgttgtttcatagtctaactttagacaaattatgttctctgagcttcattatctgctctgtaaaatatcttaaggcttgattgaagattaaataagctaataaatgaaaataactgacacaataccggacaaacaggagcattcaataaaatatgtattttagatggtatacgcaattaatcaaggcagtctgtttacaaagaaagaaatcagcggggagcggtggctccatgcctataatcccagcactttgggaggcagaggcaggcagatcacttaagctcaggagttctagaccagcctggccaacatggtgaaaccctgtctatactaaaaatacaaaaattagctgggcatggtggcaggcgcctgtagtcccagctatttgggaagctgaggcaggagaaccacttgaaccccagaggcagaggttgcagtgagccaagatcacgtcactgcactccaccctgggcgacagagtgagacccccccaaattaaaaaaaagagagaaatcaaggtatttttataattgttacagtattgttttgccacaaaaataagtttgctaagaaaattatgtttaactatcttaagcaattttgtttgtttgtttgttttgagacagagtcttgctccgtctcccaggctggagtgcagtggcaccgtcttggctcactacaacctctgccacacaggttcaagagattatcctgcctcagcctcccaaatagctgggactacaggcgcgtgccaccatgcctggctaatttttgtatttttagtagagacggggtttcactctattggccaggctggtctcaaactcctgacctcaggtgatctgcctgcctcagcttcccagagtgctgggattacaggcatgagccaccacacctggccatcttaagcaattttaagctcacgtttattttaataaacttcagtagatccttaaaacttctggtaagttgtttaatttttaatgtataattaagtaagtatttctaagtagttgcattttatttttgttttttatttctgtgttgggaagtctaagccctgatgaaactgcctggtggaccctgaccaccacccctgcagcacaagccccgcgtttaaaaattatagacccgtgctcacttcagcagcacatacactaaaattggaaccttatagagaagattagcatgacccctgtgcgaggatgacacacaaattcgtgaagcattccatatttttctgaaattgaggcagtaattaatagcctaccaaccaaaaaaagcccaggaccagatggattcacagccaaattctgccacaggtacaaagaggagctggtaccattccttctgaaactattccaaacaatagaaaaagaggggctcctctctaactcactttatgaggccagcatcatcctgataccaaaacctggcagagacaccac

SEQ ID NO: 17919 - DNA, 1822 bp, Homo sapiens
agtcagtctattttgataaaatcaactgaaaaaacatttgcataaagactcaatgtaggggaaagattcttgacacaaatcttacattaaaagtctgttaatatttttattaacttttacaagatcctgttgtttttcatttactataagtcctaagtcaaatatgcctcacaccaagcatctgaaaagttaagtacagtttagtgtcacatttgcttgagcacatttgagtttcagactcatttaccattgtggaatctgcttttggatattagagatgtttgttcaaataccagaagacagaataatactatcttctaggctaaaactaattaattactttcatataatggacaggagaaattcacatcagatagatattttaccagttaatggtgcagcagaatatcaaactattttcttaaaatgaatcagataagaacattgctcataaaaaataacttttttgtttgatcaaaattatttatagttttatatgtataatcctagtttatcctgagatgtatttgcttttgctttttaaacttataatttaaaaaaaaagagagagagtcagaaggttgtttagatggagaccataacaaacttctgtttccctaaactcaaattgttactctagtctattgaaatacctgatccacttgagatctgccagttctgacatttgcaattccaaccttggcctactgagaatcatttggtgaactttttctaaaagttgccatatataaaaagatgtatattattatttcttctaaataatgcattatttcttctaaaaatgtgctgatgccataaaatgtattattgatatttttatcataaagcagttgattttataccttttacatatctcaaagcaagagggagatttgagagactcaaggtaaaaggtatttttagagagtataaattggtggttgactttagacgaatgcttcccaatgcatatatatgcacactacacatatatatgcatatatgtgtgtatacacacacatttttataacgatacctaatttaaattaatgtattcaagaagataaatgactaaaatagaacagaggcatctctgtctcctgagataaaattatcagcttgactaatagaataaagcactataggcatgattttttgcttccttatatatgcataactgatatgagtaaaacctgaaatcaccacactactcttctctctaaaagcttatagtaagtgcttgattatttaagggcatgggcaggatgttatatatattaaattttgagtatatgttaaattttttgatataaaattaagtcactggttgactgtaaaagattgttgttttttctattacaaataacagatctttgttttatatccatctactcctgccttttttccccaaatgcaactggagaaacttgtgtgtatgctagcatctagtcaatattagtcacactctgtggtgctagatgctatcaaattactatattagtagtagtgacatagcaactactataattagaaaaagatgaatggcagattttatgtaggcccaagggcattatatagtctaggttagtgttgtagatcatagataaagcaaaagtcatagattataaagggaatgttgaaattcctttaggatggtgcctttgcaccacttctctataactccaacataaccagttttccctctagagttggaacagattatagtttagtagctcaccaaataaagtacgtagcttgtatttaccagctatggtatataaaaatatgaatcattaaatgctagtataaagcagttagtctt

SEQ ID NO: 17920 - DNA, 1691 bp, Homo sapiens
  CDS (814)..(1308)
agagcagaacttggactgagtcctgcaggacacaggttccgccgagcccgtcccttggcggtggtgtcactggatgctgggaagagatggtgggaagagcctccatccattggcgcgtcactaattagacaaggaggccttgggctcccttgagagagtcacggtctctcctccgttgacccgcccttcattgaactcctttacttggatattcagagcgctggacagagatcacttggcgctaacaccctcggaggtcctcacggcgctccgtcggaatgacacagtcggattcccaagctgcgaagggtgagggagggactgcagcgcaggaactgaggaggagaggcccgcgcgcccactggagccgagcggtgaggaataaccggaccgacccccgacggtgcgtgcctcacttttaactttctggaacgcacccaccactgcctggctctttattgcatcagcgccctttgaagttgctgaaggggagaatgttcatctctctgtggtttatctgcccgagaatctttacagctatggctggtacaaagggaaaacggtggagcccaaccagctaatcgcagcatatgtaatagacactcacgttaggactccagggcctgcatacagcggtcgagagacaatatcacccagtggagatctgcatttccagaacgtcaccctagaggacacgggatactacaacctacaagtcacatacagaaattctcagattgaacaggcatctcaccatctccgtgtatacggagaatgttctaaatttgactctgagatctctgaggatgcggcatggccccaagacactttctgttggtcactctatccacagagtcagtggctcagccctccatccaagccagcagcaccacagtcacagagaagggctccgtggtcctgacctgccacacaaataacactggaacctctttccagtggattttcaacaaccagcgtctgcaggtcacgaagaggatgaagctgtcctggtttaaccatgtgctcaccatagaccccatcaggcaggaggacgctggggagtatcagtgtgaggtctccaacccagtcagctccaacaggagcgaccccctcaagctgactgtaaaatcagatgacaacactctaggcatcctgatcggggtcctggttgggagtcttctggtggctgcacttgtgtgtttcctgctcctccgaaaaactggcagggccagcgatcagagtgacttcagggagcagcagcccccagcctccacccccggccatggaccctctgacagctccatctcctaggaattgctacactctgacacaaacatttactgctggatcgaccacaaagcagatgtggcttcttaggttcctctgggagctgctcctgtgggttgatggagcgtccctgaagcccccagccctggggatggggaaggacatggagcctgagccagagaaccagctctgagtcctgaggagacacaggcctggggacaggaagggatgggggtccctgctgaatatatagagacctcaacagactgccccgggctctgggtgggccaaggcgaaggcttcccatcaccacaggaagtgggggcttgcagggaaagtgaatgggcctatggcccacccggggtcacctggaaaggatctgaataaaggggaaacttcctctc

SEQ ID NO: 17921 - protein, 165 aa, Homo sapiens
MAPRHFLLVTLSTESVAQPSIQASSTTVTEKGSVVLTCHTNNTGTSFQWIFNNQRLQVTKRMKLSWFNHVLTIDPIRQEDAGEYQCEVSNPVSSNRSDPLKLTVKSDDNTLGILIGVLVGSLLVAALVCFLLLRKTGRASDQSDFREQQPPASTPGHGPSDSSIS

SEQ ID NO: 17922 - DNA, 2355 bp, Homo sapiens
  CDS (773)..(1183)
atctggcttaccactctccagggcctcctggggagcctgtcctgtgttcactttgtttcaggctggtctgtgccccgtgagccacatggcctagggtgatgccaggttgtcccgtcactggggtcccatctgtagattctttgcgcccttcccggctgctgcctggggccctttcctgctctcccgtccgctgtgggtggtccccagctctcctctgtgggttttaccggaaaggtggccccagctgttgacttccagtcactgtcccagacggcacaaggttttctgtaggaaagctgccattgccccggccccttttcttcctttgtcccgttgtcgaggttttttcaaatagcgtgttgttcagtatgcaaatcaattattttaagaatcgcttttgtaaatatctttgtgaatattttagtatcgtctttgataatattcaacattttcatgacctggttatagcctttgctggtgtttttaaaatacctggactcaatgacaaagaccgagtcttctttttttttaaacaaaaacaaaaaaagcaaccagggctatttgtacagttgaaggggtgaacagaatgggcggctgtgctgggagttggaagaccgggcagcccgctatttagagccatccctcagtcagctggcagggacaagccaacgccaggtagcatgtggccacccttgcccagtgtctgtggcctggcaagtggccacgccctgtgtcagaccatctgggaattaagctccagacagacttacagatgccttccttaggagttcttgcttcttgcgttgatactttgccccagaaaggcctgggattcattctggttcttatcagggtgtgtccacactctgctcacaggtggatccacggctttccagtgcagagagtcgagatgctccctgcagcccaggccccgggcacctcctgcaaccatctctgggctcagcacctgaggcgggtttcctgggtcccctctccagcaagcctccaccagcaagctcggcccagagcttcccttccggctggctctgaaccgtgcgtggtgcctacagcctgcagtctggagacaagctcttccggagtgctctgggagccaggccagggtgtgagggaggtgcagaggcatccggggcgggagcaagccccaggttgtgacaggtgcaggtagacaacgcccataaacagagatggtcctgaactctggagagatccttccctgatcctttcggacgactacttggagccataagtaacctcagcaaaaacgaggcctctgcaagccacttttccatgccaagcatccacccggcccacaggcatgtttctgccgccactccgcaagatggacagggagccagcaggcaggcgggaagggccaagtacaggcaatcacccccatcttcttggtttgaagctttatccatgtatcatgttccgtgtagccattttattttttaagaaactgctaatactttctccctaatggaagccctgatcccccagagagctacaggtctgctcccgacgggcctcgggcctgacccgtccacacagggccgtgtcaacagcagcgactcaagggacgtgtgtacatatgtaaatgagaaatagagacgtgtcaacagatgcattcatttctcttggaatgtgtattgtttttattttgcgaaacaaaacaaaacaaaaaaaaagcttggaactccatcacgtggaaaaactagatcctgttggttatagcatttgtgagttctccacgtctgtctctctcgctcatgtaatatactctgaccctgagtggaaaggggtttttgttctgtttttattttacctacatgtactatttagcttcagtgtactagtcctgccacctgtgtatttttagggtgctatggaaataatgaaaagaaacggggatttcagaagaaaattgtaaccaaattcatactttgtataatttttgatatcatgatcacaggtgattcacacgtacacacataaacacacccaccagtgcagcctgaagtaactcccacagaaaccatcatcgtctttgtacatcgtatgtacaatgcaatcatttcatactttaaactggtcaaaaaactaattgtgatttctagtcttgcaaagctgtatgtagttagatgatgtgacaacctctaatatttatctaataaatatgtattcagatgaaacctgtatattaggtgttcatgtggttatttgtatttaaagatcaagttatttgactattgctagacatttctatactctgttgtaacactgaggtatctcatttgcccatgttaatttttttctaaataaattgacaaaaac

SEQ ID NO: 17923 - protein, 137 aa, Homo sapiens
MPSLGVLASCVDTLPQKGLGFILVLIRVCPHSAHRWIHGFPVQRVEMLPAAQAPGTSCNHLWAQHLRRVSWVPSPASLHQQARPRASLPAGSEPCVVPTACSLETSSSGVLWEPGQGVREVQRHPGREQAPGCDRCR

SEQ ID NO: 17924 - DNA, 2359 bp, Homo sapiens
gttgtgtgaatgtttcaagcagaaattaatttaaatgtgtgtttaggaagtacttaacttggaagatgtatcatttttcttaaaatgcatgtttaaattttatttttttaagtaatttttaaaaagtttattaatgttaaatttatgatgcagaatgatagcatcagatgtctgcagctgaaaaaaatttactactatgaacccccaaaatattcagttgcaagaaaatttgattctaaaattattcatggtaggatacgtaacacaccccttcaaaacttttaagaaatacatttagcacatgtgctatgaaagcatacgtacaaagagaaaggggaaagtgatttataattcctacaacagaggccaagaaatagattaaaatattttcaagaccccaaaataatgtattatggttgggaagtcagtagaacactggaataggtgaagacctgacagtaatttttgtcttaagaatgctttctttaggacagaccctttaacctcacctctgtgcatctgtttttaaaatgattatatttgcctctgatatttgaaagcacttttgtagttttgatgatgaaaaatatattaaacgtgcatattaccattatttaggaaataattccttatatactgtgataaatcattgctgttacatacagtaacatgccttaattacatttaatgccttactgctttatgtaagtaaatccaagtttcagaattaaaaataagcattatttcatatggtccaatcagattcgttacataggctatataaatttgtctccattttcaccatcaagcacaaataattgggtcaaaactgcctttgaggtctgttgaagaaaatggttcattaagcaaaaaagagtagaggtattttatattagcagtaacagacaaattatttagtaatcccttaacctctgtttttcaaagagaaaatatccaatttagacttttttcctgatctctatatatagcatcaaattgggaaacaaaggccaaaggtgtatagattgcttgaaagggggtggtagtgcctctttttaagatctgttgagtcggctacagtctggctaagtaagaagcatttgcatactgattccatcatttaatctttaaaagtatgtgttttaaaaatgtaaccagaatgattcttcaatagaaatgagatttggtggagtctggattgcctgttttgtatataatatatacttaagatatataataccacctcattttctgggcattatttcctaattgttgatgtttcaggcttttgataagtcattttatatatttcaaatttaactcagaataagtaaatatttatggcaaatgcagttttatgtactttcaggagaagaccatcaggaaaagacaggacaaagaagtcaaacattaaagcccttgcaaatattagaggaccttagacaattaccaaaaagtgtttaatagggaagttgcaaatgattctcttagtaaattaaacatttaaaaagtagttttaatgtgccttgggcatcttgaaaagaagagtgtgatataatttatgcttagtgttaactggtcattttacattgtgtttattaagtctgctgaaaaatgaggttttaaggaagaaaatgcagattattttagggtaaacaggccaggtgtcctttgaagaactttgtttacatcaaattgatgaaattacagtcagtgattccttactttttttgctagttgtactttgaaattgttatgggttcgttttccaaaatatgtaacttattttttaaaggaataaggtgtgctgtgtatttgttgattaaaaatcatttgtcttgcagagtatccttttttgaaggaaatatacatccttataacacatcaggtagttttcttttttctgtatttaaattatatatttgaattaattgaatataatttgagttacatataattctatataaaggttacatattgaattatggttctaatctgtttaggaaagaaatgaattttctaagcatttaatacgtttggaataattttagtttctaaaaagtactaatgtaagttaagtttatatcaaatgcaaattaccttgtataactaacaagcacagttattgtttaacattatggattttaattgtgttgacacccttctttgaatttgttgctttacatgtgtgtctgtgtgtgtgtctgcatgtgtgcacgcatgtacttgtatgcaatgtaaaagtaacagcagaatcattgcatttggtttacttaaaattttggagttagcaagtaaacaaaaagctgatagttttatgaagtctcggttaaaataaaatttctttgctatctcactc

SEQ ID NO: 17925 - DNA, 2067 bp, Homo sapiens
ttttctctttgcataaattttggctccattctttccataacaatctaatcaaaactgggagttctcaagtgaatgcaaaaggagcaggccataactttatttgttagatacactgtcagaaacttgagatcttttggcctatgataataccattaatttttgcattgcttcagtttgccaagtgtttttacatcatctcatttgatctcaaaacagcttgacagagcaactgttattgaaatattacagatggaaagaatgaggctcagggaagttaaagacttggccaagatctgctcatcgtcactgtctgtacagtatttttttttagaggttgtaatgtctcagatttagtcctttaccatctatgttgatttgcttttgtctatttcctcattaattgaatatactttaaatatatatattaaagtatcaaaatatagagagacatttgaactgtattcaggtaatatgtttaaagatatttatatattgccatacaaaaacttaacatttaaaactgataatatctgtaatgacatcagaatgaaagaaaaaaaattgtacagtgtatattcctttgttttgaatccaaatctttttcataggtaatgacagatgccttaatgtgaagcttatttataatagcaataaacctaactggatttggatgaagaagtcttaatactgacatactggatttttaatgcactggtttgttatttggtattctatctctttttccaggcctccaggttgcacatttatttattatgttcaatactttggttcttagttcttaaagaatcaagaagttgtgtaatcttttaaaaatattatcttgcagataaagaaaaaaattaagagtgtgtttacaactgttttctcttttttacagtacatgtatttaaatcattgctataataaagttaagttcattaggaatataaaaacttgcagttctatgatagattgcatttattaaaaatgtttcattgtatcacatagaaatatggccaggaaggacttgagaagacagtttgatccattgcttttagacaggactgggttttgctgtccaattatatacaataatagtttttcttacaactaagctggccccagccttgtcttgatattaatacatgaaatttttataattgtctcattgtctcatttagaaacatccatatttttctgctttttctattgccattttttatttgtgcatgaattgattattgagaaaatgtagcagtttgcatatttaaaaattaatcattttgcattttacatttaaatatgctaacatcactgtcatagaattcccaaatttcatttgtagatactgaactaagggctaatgtcaggagctgatttttaatgataaagctgcagatgggctaaataaaagccaaattaatcctacaatcaggtattatgtttttaaaccaagttgagtgaattggtagtggacttgggaaatcttccccagcagaatctggatgaatggcacagaattgaaatctctttgtttcccaccatttccctttaagtgctctgctcctttgtaaaaagttaaagatttgaaagagaatctcatattcccgaggcattaggaagaaaggatttaatcccttcaatttggggcttaatcttgtttaaaaaaatgtaagtgaagatggaaggctggagagaatgattgctttttgtacagttaaataaggtcacaatattcttacatactttgttttacaactgtgttttcattttttcaaatgtctggccatttagcaaagttatttactatttactgtgtacatagaaagctttattatgtgtggtgtatctaaattttttttgctgaaatacattatggtcaatcaagccaagcctgcatgtacagaatttgtttttttttcaaataaattagttgttttcttatttttttggcttagtatgttgaaataaactatggtatcttcatcattttgtacatttcctttttgaggaaggtttctttataagtgcaagggctaccctaataaaggaatgtatatacttact

SEQ ID NO: 17926 - DNA, 1956 bp, Homo sapiens
  CDS (355)..(1122)
tgacaaaaaagaaagacacctgttggggtggcctgccagacccaggagtggagggctctgtgagggcccgggaattcggactcaggacagggattctccatggctaggcccagaaacacagggtccaaccactctccagcagggagacctgggggtgaaggggtgagccctgcgcaggtctctgttccttggtcttcactgggcagtgtggagaggtgtggccaggaggagcccgcgtttgtccagaccagggtctactctggcaccagagtgaccacctctgacctctcctttcctcgtcctgggccgggaacgacaccaaatgagggacatggaaaggggtgagaagcataaatgtgcgtgtgtttctgcagaggagggggcatgggcccctgccgggctgcgcaggggagggtggggtgggacttttccagagagggagccaggcctggcccgggccccgggagctcacgtcacccccacccctcacttctccagggaactgccaaagccaaacccagctcgggatgggattatgtgtactgggtagacccgtggagaggggctgcgagaagagatctcggtggcagagagaagcagaggcagagagggcatgaagaggggtcggcatcagagaaggggcaggcagtgactatcaccccatttcttcttccctcagctggagtaacaagagtcaggcagagcctgaagacttgggtggaacatgggcccttctctggagatcctggcctcccccgttcagtcagggtggagttgctgaccttagtggccggcccagccaggggaaggagtggccatcggcaacccccaccccaaccccaatccctgaggcgcccgctctggctcagccactctgacccctccctcaaattccgaaccctaggtctcagggagggcagtggggctgagtgtctgcccccaggcacattcctacccttctcttggtcattttctgccccagagctggcccacctcagcaatgcgagggctccctggattcctctcccgggtgcctttcagatccaacagaaacagattttttttttcctggaaagcagaactaagagtgggatgaggagcaggggcgggaaggactcaaagtgagaagaagggggcaaagagagtcaggcttggtggctggggtggcttccaagcctcacttctccagtgttcaaagctgaacttcagatggacttcccggctcttcagaatgagaggcctgtggctggggcatgaggcagccccggctgcacctctccttcccgcttccccagctggtagagacgcacaggaaacaagccctcactgaaccaactccagatgctggcacccagagtgggtgttacattgccggcttcttctctagagattaaaccgtcaacccatttagcttatcccttggccaaaaagtgtatgagatgtgcctggatgttccctaaagagcttatctaagaagggaagagaaagccgggaggcaagtaggacagagagatgactggggaaggtcttgtgtctggaagacccaaggaaggggcttctggtgggtcctcagagagagtgtctggcgcatcctcagtggagccttcctcctctactttctaggcacctctgggagggcaggagtgggagcagatgacaaccattttagaaggagccctctggctgggtgcggtggctcacacctgtcatcccagcactttgggaggccaaggcaggagaagcgcttgaggcctggagttcaagaccagcctgtgcaatttagctggatcccatctccaccaaaaaataccaaaattagctgggtgtggtggtgcacgcatgtagtcccacctactcaggaggctgaggaaggagagcctgtgagtttgaggctgcaatgagctttggtggcaccactgccctccagcctggatgacagagtgagatctccatctc

SEQ ID NO: 17927 - protein, 256 aa, Homo sapiens
MCVCFCRGGGMGPCRAAQGRVGWDFSREGARPGPGPGSSRHPHPSLLQGTAKAKPSSGWDYVYWVDPWRGAARRDLGGREKQRQRGHEEGSASEKGQAVTITPFLLPSAGVTRVRQSLKTWVEHGPFSGDPGLPRSVRVELLTLVAGPARGRSGHRQPPPQPQSLRRPLWLSHSDPSLKFRTLGLREGSGAECLPPGTFLPFSWSFSAPELAHLSNARAPWIPLPGAFQIQQKQIFFFLESRTKSGMRSRGGKDSK

SEQ ID NO: 17928 - DNA, 1887 bp, Homo sapiens
taaacaagtaaactattatggtttccattgcttacaaaatgattttcctttacattcttatcatgaacactattttaagcatcaaatgcaatcatctaaaatataaaggtcaatcatttataatagaaacaccttgaccacaagcccttgattgaacattttataatatttcatctacttattaaaacaaataatttcccttgggttggaggggaagtgatttcataaattaattagaaagccatctttagcatattgcttatgtctggatccatgtttctgaggaaaaagacattctcaggtgatgtatttttttcatgcattagtatgcatttttaaaaaataatgcatgtttctttaataattaattttcatcttctataagatgccatgtgaagaagttgtggaaatgtagaataaaaagctaaagctgccaaatttctgttgaactcttaaaaacagctcatgtttgtttgtcctctcgggttgtggcctagcctatttgcaatgtaatgaagctgcagggttcttgtatagctaaagcgttcaatgcatttcacgtgctgtggtggatgtgggtgctgtagacaggcttcttctcttcctgctctcaaaatacctcggcttgacatttggacagatcctgtcattgtttaagctgagcaaaaaaccacacaaaagttgtgtaagagatgagataacaaaggagcgagagaaatctcatgtgaatttccaagttttaattcgttctccatgaaggattttcatttcagtgaaagtcgcagcagaagagggaactttctggagtttttgagaatgccaaaccacatttttatcacacttctttggaaatcaatgcctttgcatagaaaatcaaattcagggaccacaaagaattttcagtgggaatgtctagtctgaggggtctgaggttgtttttactttattgtgttgtttaaatattttaaaaatatctttagcgtttggtcttttttttttctgtaaacatttaatttggtctgagaaaagctgaatgtttgggtgtgacgtttgactgaggtggattggggctgcctgtggacattagtgaacaggtggtaggcttcaggaatatccagttttaatcagttgcatttggtacagaattttgagtaatggtgaaaattgttgtctttggaaagcacaaaagaaacctggaaaggcagttcggctcaggtagctacacataacattgtgtatgattttcacttcaaagctgtctggaaggaaatgcagtcagctccagctagtactatttatgtacccagataactaagatattgtttcatggccttgccttagtcagaggcccttttctctgtcctgaacccccaggtatgggtgaaattggaaattactaatctattggaaatcagttcctgacatagtaaagtttgctttcataactgcagcaaaaaaggtcaacttgccaagtcactgctgccatgtgtgtactgtattattttcagaaaaaaatataatagtctgagtccaagttatcttgatttaaaattgatagagaaaagaaactgtcgagcaagttatataacaactaacaacattgcactttctgtatatgaaatcaatatttaaataacttatttttctccattgctgttcttaaaaacattgtaagtagctgtaatataccagtaccaatatgttcttgcaattgcttcagcccaagaaagctgtgtattgttttaaaaattgtaaaaattattgtgatgattcatttagcataaagagaggtggacggaagggttttcctatgtatcaaaacttgtctataattatgtcatctatgtacctagaaaaaagtaaataaatttcttcagttgaatatgc

SEQ ID NO: 17929 - DNA, 2022 bp, Homo sapiens
  CDS (1531)..(1935)
ctagaataaccactttagagaagaacataaatgatctgatggagctgaaaaacacagcacgagaccttcgtgaagcatacagaagtatcaatagctgaatcgatcaagcagaagaaaggatatcagagattgaagatcaacttaatgacataaagtgtgacgtcaagattagagaaaaaaagaatgaaaaggaacgaacaaagcctccaagaaatatgggactatgtgaaaagaccaaacctatgtttaattgatgtacctgaaagtgctggggagaatagaaccaagtttgaaaacactcttaggatattatccaggagaacttccccaacctagcaagacaggccaatattcaaatcagtaaatacagagaacaccacaaagatactcctcgagaagagcaaccccaagacacataatcatcagattcaccaaggatgaaatgaagaaaaaaatgttaagggcagccagagagaaaggtcggtttactcacaaagggaagcccattaaactaatagcagatttgtctgctgaaaccctacaagccagaatagagtggggggccaatatttaacattcttaaagaaaagaattttcagcccagaatttcatatccagccaaactaagcttcattagcaaagaagaaataaaatcctgagagacaagcaaatgctgagcgattttgtcaccaccaggcctgccttacaagagctccagaaggcagcactaaacacataaaggaaaaaccagtaccagccactgcaaaaacataacaaactataaagaccaccgacactatgaagaaactgcatcaactaacaggcaaaataaccaactagcatcataatgacaggatcagattaacacataacaatattaaccttaaatgcaaacgggctaaatgccacaattaaaagacacagactggcaaattggatagagtcaaaatccatcattgtgctgtattcaggagacccatctcacgtgcaaagacacacataggctcaaaataaagggatggaggaatatttaccaagcaaatggaaaggaaaagaaaaaaagcaggggttgcaatcctagtctctcataaaacagactttaaaccaacaaagataaaaaaagacaaagaagggcattacataatggtaaagggatgaatgcaacaagcagagctaactattctacatatatatgcacccaatacaggagcacccagattcataaagcaagttcttagagacctacaaagagacttagactctcacacaataataatgggagactttgacactccactgtcaatattagacagaacaatgagacagaaaattaacaagaatattcaggacttaaactcagctctggaccaagcagacctacagaactcagaacttgaactcagctttggaccaagcagacatctacacaactctccacttcaaatcaacagaatatacattcttagcagcaccacatcgcacttattctaaaattgaccacataattggaagtaaaacactacacaccgaatgcaaaagaacggaaatcacaacagtctctcagaccacagtgcaatcaaattagaactcaggattaagaaacttactcaaaaccgcacaactacatggaaactgaacaacctgctcctgaatgactactgggtaaataacgaaattaaggcagaaataaataagttttttgaaaccaatgagaacaaagacacaatgtaccagaatctgtgggacacagctaaagcaatgtttggagagaaatgtatagcactaaatgcccacaggagaaagcaggaaagatctaaagtcaacaccctaacatcacaattaaaagaactagagaagcaagagcaaacaaattcaaaagctaccagaagacaagaaataactaagatcagagcagaactgaaggagatagagacatgaaaaacccttcaaaaaaatcaatgaatccaggacctggttttttgaagagattaacaaaatagatagatcactagccagaataat

SEQ ID NO: 17930 - protein, 135 aa, Homo sapiens [sequence omitted]

SEQ ID NO: 17931 - DNA, 2622 bp, Homo sapiens
tgtgaaattgagaatcatgataaaatcctcatacctcctcctcttttgaccaaatctttctaaaatgcacaattataatttcttatctttaggaaaaagtaattatgttatatgtgttatatacactatgtaaatatagttcattaaatcattctttggtgtttgaagactttctaattcattacttcattccagacatcaatgacaacagcacataccgagcaggtacacatatgagctacctactaatatgccctgattttgattgtattttgtgaaaaccttggtatgggttatttttaaatgaatgttttcccaaattttaagctgaaactaggatgcatcaaaattatcttggtcataatcttgtcaatgatgtcatctaaaggccaccaggaacacacctgtagcccagcaaagttgaggccatcgactggctcatcacaacaaggaaggctgtgcaccactgggacccagcagcagctcagcagcagcagtgagagggccttgggaaagacttggagggtttggcttatacaaggtgatcttggggagggtcaaggaaacaggctgtgatggttaatattgagtgtcaacttgattggattgaaggatgcaaaggattgttcctgggtgtatatgtgagagtgtggccaaaggagattaacattttagtcagtggactgggagaggcacacccaccctcaatctgggtgggcatcatctaatcagctgccacagcagctaaaataaagcaggcagaagttggaatgagcagacttgctgagtgttccagccttcatctttctcccatgctggatgcttcctgccctcgaacatcagactccaagttcttcagcttttttttttttttttggactcttggacttacagcattggtttgccaggggctcccaggcctctagccgcagactgaaggctgcactgtgagcctccctacctttgaagtttgggactcagactggcttcttggctcctcagcttgcagtcggcctattgtgagacttccccttgtgatcatgtgagccaattctcctgataaactcaccttcatatatacatctatcctattagttctatccgtttagagaaccctgactaatacacaggccatgctcagatggagtgctgtctggaaatgggagtaattctgtggttgaatgtcttaattgtcctggaaggtgggagaaatggaatgaggctggtgctacaattgatgtaaaagcagcagctgctcacataagccggggtggaggatgcctaggcgtatttgtggtattgaccatgttcttgtttttgtttgtgaccagaccagattacagaggggtattgatttgccttgcccccgcccccaccatcacagtgtgtccctgtccagtgttggtgctgtgtggcattgcttgtgtccataggagtccatcaaggcagagcggcagagcggcaagcagagcggcaaggcaggtcagcttccggctcttccaggctgcatgtccccctcaatatcctttcaacccaatggaaatggattgaaagagtgaaagtcactggtctcaaagaatctacggaatttagcattttgaaaatcacagagcaattttgggtaggtattcacatgcactaaaaaaccaggcaaacatctgactcccaggataaagtgactgagagcagtagaagacttgttgagccttaaggaataagaggaaaattatgttatgaagtgcaggaacagcacagacccagacgaggggatgcagcccggagccagtaacccggcgcctcctcctccccagggcgcagcgctggctgctccccggataccgtgatcacacgtcccaggtcctgagagcgcctcataggtagacagttctttgggacttttgggacgcagcacttgaagagaggtttacctaaactttcctcctgggagcctgtcatcatttgaaagtaacagaagaaagctgtcaggctgaggaaagtttcaacaggcacttggtgagaatgggaagcatccattcattgggaaatcacggggacagaggaggaattcacgggatcagagcactgagaaactccagaggcttctggttcaccgccctgattccacagatgtgggtcagaggcagagatggaagttggaatggacaagcctgccctctcctcagctctccatggctctgtcctcaggctgtttctgcaatttgacatgaggcctggccccagggaaaccagtggggcctcatctcctccctgtgctgctctgaggtggagccttctcagggtcagtccagctctggagcccctctccagctcggtcaccaaagctgtctggtcccagggcagtgtggagtgacaggcacgccagccaatccaatcggccatttcatacccaatgcatgtgactgataaagagataacaccctgtctccaagacacaggctttacataaacagctttaatgacttcttcacttagggacaagactccttagtggtggaacctcaggcatccatgcaggatgtaagaaagctcccgtatatacatgaactgagaagtgtgtagaagagtaaatactgtaataggtaataaaatgtatgtattttt

SEQ ID NO: 17932 - DNA, 1947 bp, Homo sapiens
  CDS (525)..(836)
tgtatgagagaataaacaaacttactcagactgaagagtatgttttcaaaaattaaagaagtagcaattatatgggagctgttatttattaaagcaattatctgagcccttaaagggctgtttgtttttacaatgttgtataatggccttgcaggaaaattagatttcttattctctcttccagtgtacattgtcttgagtattgtcacatttagagaccatagggagatatgggactcctagtattcagtcgacactctgaacagattttctgtgtgatacattttttcattttaattgagtcccctcttcctcccctccaactgatagctttttataactgtgtgaaatatctagagaagaatgaagtaggctgagctacattttcaagcttaacattctttagaaaactaagaaaatgcccaatatttcaacattaaggtgtcaataggggctaaatgatcactttaagatgttttcagtttggaacttgaatgtgtgtttaattttttgtgaacagattgatgactcttccgcgtctatttctctggcccagcttacaaaggtatatatatatatatattcttgaaaatataagtttttttctaacatcatatttttttatgtggaacggttttttaagaggggttgggggaggacatattttgcaaaagcattgtacatattattactatcctgtaaagagtagttgctgttttgagaagataggggaatactttgtcagcctcagcgtattggagtattgttcatcttcaagacagaagaaacacttgaagctacacttaattatttttttttccctcatacattttgtttaattatacattggaaactaacaaggttctggaggaatttcctggttttggctataaattatgtggaccttttttaagcagccaaaacagaagatttcctttacacggacgattgcatggttatttcttgaatatttgacttgatcccatgaaggtcaatattttaaatgtgatgcagttgtttctttatgctatagacttgtagtctgtctgcattaggaaaagttttgaacaacctaatttgtttgaacacagactacatgaattgtgtaagtgtgtaaagctgtttgcaggaatataccaatgtgtatgtttggcagaggggcaaattgttacctcctgaatcactgtatatgccatgttttgcgataagattgcttgcattttctgctcaacaatgtgtatcttctgtttgggaaagcactagtgatggattactttttaaagcaatacatttagcttgcaaattgtgcctttaaaaaaaaaaataggcagacttttgagggccaagaaggaagctgtccagttttccaaaaatcctttttccctgctatcagaaatgtgaaaccaaatttagcaaccaagattaatgaaaagatgggttttccattagtgctgtccctatcttgttcttggctttgttatgtcctttcccctagactgtatcccgacaaaatgtcctagtaacaaattgctttttaagctcctgttctgggaaaactaagcattaaaattgattattctaaaacataaagtggactaaagccatcctattttataattttctaatgcaaagtggtttagtatagagttaacacttagaagtttatagtttactgtttttattcttatgtactgtaaggaccatatttgagtttttggtctattcctaccattgtttctttgtggggaggagttggggcggtttgggggattggttttttttttttgtttttttaaactacaggtatttgtaaaacaatgtttgggttcaaacaaattagttgttaaacatctgtaatccagttttctgtaaatgttgctgttgttctaagctctgttaatgttaagcattctttgtatataaaattacaataaaatgttaaaactg

SEQ ID NO: 17933 - protein, 104 aa, Homo sapiens
MTLPRLFLWPSLQRYIYIYILENISFFLTSYFFMWNGFLRGVGGGHILQKHCTYYYYPVKSSCCFEKIGEYFVSLSVLEYCSSSRQKKHLKLHLIIFFSLIHFV

SEQ ID NO: 17934 - DNA, 2911 bp, Homo sapiens
  CDS (133)..(2094)
gagggggcggggtcacgagccgccagccgccgggtggagggtcccggccgggagccgcggaaagagtagggctccccagacaacggggtccgacgagcagttgggcacgggctgagtccgcctgccggcagaatgtccctggctgcttattgcgtcatctgttgcagaagaataggaacctctacttccccaccaaaaagtggcacacactggagagatatcagaaatataataaagtttactggatcacttattttaggaggttctttatttcttacatatgaagttctggccctgaagaaggctgtgacattagatactcaagtggtagaacgagaaaaaatgaagtcatatatatatgtgcacacagtttctttagacaaaggagaaaatcatggtattgcctggcaggcaagaaaagaacttcacaaagcagtaagaaaagtattggcaacatcagccaagatactgcggaatccatttgctgatccttttagtacagttgatatagaagatcatgagtgtgctgtgtggctgctcctacggaagagcaagtcagatgacaaaaccacgcgactcgaggctgtgcgggaaatgtcggagacccatcactggcatgattaccagtataggataattgctcaagcctgtgatccgaaaactcttattggtttggcacgaagcgaagagagtgatcttcgcttttttctcctaccacctcctttgccatctttaaaagaagattcttccactgaagaagagctcagacagttgctggcttccttacctcaaacagagctagatgagtgtatccagtattttacatctttggctcttagtgaaagcagtcagagtctagctgctcagaagggtggtttatggtgttttggaggaaatggacttccttatgctgaaagttttggagaagttccttcagcaacagtggaaatgttctgtttagaagctatagtaaaacattctgagatatccacacattgtgataaaatcgaagcaaatggaggcctgcagctacttcagaggctgtaccgacttcacaaggactgccctaaagtacagagaaatataatgcgtgtcattggaaatatggctttgaatgaacatcttcattcttctatagttcgctcaggctgggtttccatcatggcagaagcaatgaaatctccccacattatggagtcctcacacgctgccagaatcctggcaaatctagaccgagaaactgtgcaagaaaaatatcaggatggcgtatatgtgctgcatccccaatatcgaacaagtcagcccattaaagcagatgtcctttttattcatggccttatgggagcagcattcaaaacatggcgccagcaggacagtgagcaggctgtaattgaaaaacctatggaggatgaagacagatatacgacgtgctggcccaagacatggttagcaaaagactgtcctgctctccgaattatatctgtggagtatgacaccagcctcagcgactggagagcaaggtgccctatggaaagaaagtccattgcattcagaagcaacgaacttcttaggaagctcagagctgctggtgttggggataggccagtggtttggatatcacatagcatgggaggtcttcttgtcaaaaagatgctgttggaagcctctacgaagccagaaatgagtactgttatcaacaataccagaggaataattttttatagtgtccctcatcatggatcacgtttggctgaatactctgttaatattcgctatcttctcttcccctcgttggaagtcaaagaactcagcaaggattctcctgcacttaaaacactacaagatgactttctggagtttgctaaagacaaaaacttccaggtgctgaattttgtggaaacactaccaacctacattggcagcatgattaagctccatgtggtacctgtggaatcagcagatttaggcattggagatctaattcctgtggatgttaaccatttgaacatttgtaagccaaagaaaaaggatgcttttttgtaccagcgtactttacaattcattcgtgaagctttagccaaagaccttgaaaactaacagttgtgctcttccagttttcatatgtgaattcagtgcaagaaacttggtgttctgtttcttcttttaagctctatgcaatcatgcaaacatagtgatcatagcgtcaacatggtctggagtgtgttgcggactacagaacattgttctcccttcaagcgctgtaaagcaccaacccggaagtggcaggcacagaaggaagggctggattgggcccctttggtgtaaagaagtccctgtgtgctgctttatggttcgcagtgttgggcttggtgactggagcaaagctgctgtgagagagtgtcctttcccatctgtgactttcctggtgcatccaggaggggcacggcaggttctgaggtaactcaacttaccataaaaatgccattaagagagtacctaaaatggagagaagaatgaactagaacattcaagactcttttacttctgggtattgatttgctgtacatttttaaagtttgagtttttagctcagttctaccttttatctgacacattattactagtgttaactttgttagacttattgtcatgtctgggtcagttccttgtatctattttcgtattcctgagaacaaatctttttcttagaaaaattctagcttataataattcttttcagactgtagctgcctatgcttggaatctgtcctagataaggataaagtagctaatccattattgatcacagtatgaagtaaaactattctaagccattatatgaattagcaattcttagtatcaagattctcagattctctttggctaaataaacctttcttcttccttgctc

SEQ ID NO: 17935 - protein, 654 aa, Homo sapiens
MSLAAYCVICCRRIGTSTSPPKSGTHWRDIRNIIKFTGSLILGGSLFLTYEVLALKKAVTLDTQVVEREKMKSYIYVHTVSLDKGENHGIAWQARKELHKAVRKVLATSAKILRNPFADPFSTVDIEDHECAVWLLLRKSKSDDKTTRLEAVREMSETHHWHDYQYRIIAQACDPKTLIGLARSEESDLRFFLLPPPLPSLKEDSSTEEELRQLLASLPQTELDECIQYFTSLALSESSQSLAAQKGGLWCFGGNGLPYAESFGEVPSATVEMFCLEAIVKHSEISTHCDKIEANGGLQLLQRLYRLHKDCPKVQRNIMRVIGNMALNEHLHSSIVRSGWVSIMAEAMKSPHIMESSHAARILANLDRETVQEKYQDGVYVLHPQYRTSQPIKADVLFIHGLMGAAFKTWRQQDSEQAVIEKPMEDEDRYTTCWPKTWLAKDCPALRIISVEYDTSLSDWRARCPMERKSIAFRSNELLRKLRAAGVGDRPVVWISHSMGGLLVKKMLLEASTKPEMSTVINNTRGIIFYSVPHHGSRLAEYSVNIRYLLFPSLEVKELSKDSPALKTLQDDFLEFAKDKNFQVLNFVETLPTYIGSMIKLHVVPVESADLGIGDLIPVDVNHLNICKPKKKDAFLYQRTLQFIREALAKDLEN

SEQ ID NO: 17936 - DNA, 3494 bp, Homo sapiens
  CDS (969)..(3335)
aaaagcttattgtcatatagcccattcattgggagatgaagacaaacaaaaaattgagagtaacacagtggaagatatcaagagctcagtgaaaggtcatcctcaagaaaatgaagagaattcaaaaaacatctctactatggaatctgatctgcccacagtagaggagctgatgaaacctatcagaatagattcctttgggatcagtggttttgatttacaacctgtcagctctgagaaagtggccgaaagaaaagaaactgaattttttagctctttacccctgaagatgaacccaaatattttgtctcaagactcacaacatgtgaaccttttttttgacaaaaatgatgagaatgtgattttacaaaagaccacaaatgagagtatggaaaacagctgtccacaagtaactgaagtaactgccacagaagaacatgttgataaaatgtaccttaatattttgaggaaaaaaataactgttaattcttcatcattatctcaggatgacaaaattaataaaacttacagatctcaacttagttctgaagaagaaggggctgtaatgggtaaacaggtaccatacaagaaggccagaagtgcacctcctttacttaaaaggaaaccccagagtggattatatgcgtcagttaggagctcaggctatggcaaacccagttcaccactcaagatgttttctactcttgaaaagaaaacttcagaggacattataaaaagcaaaaacttgagatcgatttctacctccaatcaacctaggaaaaaagaaatcttatctggaacaaaactcatcaagcctgcagctttggataaaccagctcacaaaactgaaagttgcctgtctactcgtaagaagtctgaaaatcccacagaaactgattcctgtattcagtttcagactgtaggattccttaggatactgtggtgagaacaaggagaagaaattacttatgtttaaaagagttcaggaagcagaggataaatggaggggtgcgcaagccctaattgagcaaattaaagccacattctcagaaaaggagaaagaactagaaaataagttggaagaactaaagaaacaacaggaaaaagaactcttcaaattgaatcaagataattatattcttcaagccaagttaagcagctttgaagaaacaaacaaaaaacaaaggtggttacattttggagaagcagctgatcctgtcactggagaaaagttgaagcaaatccaaaaagaaatacaagaacaagagacacttcttcaaggatatcaacaggaaaatgaacgattatataatcaagtaaaagatctccaagaacaaaacaagaaaaatgaggagcgaatgtttaaggaaaaccaaagtttattcagtgaggtagcttccttaaaagaacagatgcacaaaagtcgttttctgtctcaagtagttgaagattcagagcccacaagaaatcagaattttacagatctgttagcagaactacggatggcacagaaagaaaaagacagtttattggaagacatcaaaagactgaaacaagacaaacaagctcttgaagtagacttcgaaaaaatgaagaaagagagggaccaagccaaagatcagattgcttatgtcacaggtgagaaattatatgaaataaaaattttagaagaaacacataaacaagaaatcagtcgtctgcaaaaaagattacagtggtatgctgaaaatcaggaacttctggataaagatgcacttcggcttagagaagcaaatgaggaaattgagaagctcaaacttgagattgagaaactgaaagctgaatctgggaatccatctattcggcagaagatacgcttaaaagataaagcagcagatgccaaaaaaattcaggatctggagcgacaagttaaggaaatggaagggattctgaagagaagatatcccaattctttacctgctttaatattggctgcatcagcagctggtgatacagtggataaaaatacagtggaatttatggagaaaaggataaaaaagctagaagctgatctggagggcaaagatgaagatgcaaagaaaagccttcgtaccatggaacaacagtttcagaaaatgaagattcagtatgaacaaagactagagcagcaggagcagctacttgcctgcaaattgaatcaacatgactctcccagaattaaagccctagagaaggaacttgatgacatcaaggaagcccatcagatcactgtaagaaaccttgaagccgaaatagacgttcttaaacatcagaatgctgaattagacgtcaagaaaaatgataaagatgatgaagattttcagtctatagaattccaggtggaacaggctcatgctaaagctaaattagtaagactcaatgaagaactggctgcaaaaaagagagaaatacaagacctctcaaaaactgtggagaggcttcagaaagacagaagaatgatgctatcaaatcagaactcaaagggcagagaggaaatgtctgccaaaagggcaaagaaagatgttttgcactcaagtaaaggaaatgctaactccttccctggaaccctggacagcaagctgtaccaaccacatactttcactgattcccatgtttcagaagttttacaagaaaactacagattaaaaaatgagctagaaggattaatttcagagaagaatgaactgaagatgaaatctgaagcagtgatgaatcaatttgaaaactccatgagaagggtcaaggaagatactgcagcacacattgcatccctcaaagcatctcatcagagagaaatagagaaactcctttgccaaaatgcagtagaaaattcttcttccaaagtagctgaactaaatcgtaaaatagcaactcaagaggtacttataagacatttccaaagtcaagttaatgagctgcagagtaaacaagagtctctcgtagtttctgaagttcgagaagaaattctacagaaagagattacaaaactcttagaagaattgagagaagccaaagaaaaccatacaccagagatgaaacatttcgtgggcttagaaaagaaaattaagcagatggaaatgagacatgcacaaagagaacaggaacttcaacagataatacagcaaacacaccaagtagtagaaactgagcaaaacaaagaagttgaaaaatggaaaagactggcacagttaaagaatcgtgagctggagaagttccgcacagaactagactcaatattagatgttctccgagagctgcaccggcaaggagtggttgtgccagttgcttttgcagatgaaatgaatgcaccagagtattaatagaaattcagatttcataatgaccttattaaaaggcctgaagatggatgggattgtgccactgtcaggacagcttatgaaaaacaagtgttccaatatgtttccagaaagcaaacaaccaaagcaacatttcaaaataaattgcctttaaccaat

SEQ ID NO: 17937 - protein, 789 aa, Homo sapiens
MFKRVQEAEDKWRGAQALIEQIKATFSEKEKELENKLEELKKQQEKELFKLNQDNYILQAKLSSFEETNKKQRWLHFGEAADPVTGEKLKQIQKEIQEQETLLQGYQQENERLYNQVKDLQEQNKKNEERMFKENQSLFSEVASLKEQMHKSRFLSQVVEDSEPTRNQNFTDLLAELRMAQKEKDSLLEDIKRLKQDKQALEVDFEKMKKERDQAKDQIAYVTGEKLYEIKILEETHKQEISRLQKRLQWYAENQELLDKDALRLREANEEIEKLKLEIEKLKAESGNPSIRQKIRLKDKAADAKKIQDLERQVKEMEGILKRRYPNSLPALILAASAAGDTVDKNTVEFMEKRIKKLEADLEGKDEDAKKSLRTMEQQFQKMKIQYEQRLEQQEQLLACKLNQHDSPRIKALEKELDDIKEAHQITVRNLEAEIDVLKHQNAELDVKKNDKDDEDFQSIEFQVEQAHAKAKLVRLNEELAAKKREIQDLSKTVERLQKDRRMMLSNQNSKGREEMSAKRAKKDVLHSSKGNANSFPGTLDSKLYQPHTFTDSHVSEVLQENYRLKNELEGLISEKNELKMKSEAVMNQFENSMRRVKEDTAAHIASLKASHQREIEKLLCQNAVENSSSKVAELNRKIATQEVLIRHFQSQVNELQSKQESLVVSEVREEILQKEITKLLEELREAKENHTPEMKHFVGLEKKIKQMEMRHAQREQELQQIIQQTHQVVETEQNKEVEKWKRLAQLKNRELEKFRTELDSILDVLRELHRQGVVVPVAFADEMNAPEY

SEQ ID NO: 17938 - DNA, 1850 bp, Homo sapiens
  CDS (49)..(375)
agttcggttttgctttcactgtgacaaagcagcatcaaattcaatgcgatgtctcacaatagctgcgctctccctcttccaagcacagagattctctctctacgccacaaagccactgccatgggatggggacaggtggcatcagcaactcaagactgtcttccctaccctcttcattgcctctttcaacagtatgaagttaaaatcaggactacccaggcagggggagctgcaaagaccttggtttctctggcccttccaacagcaagtatcgccaggagcagctccctaatctacatactacagatctatccacaagaagacagatggaaccactcttttcttctgaattctagaaccttaaggaagttaacctgagtggctcagcttggatcaagtgcccatcctggtccaaacaactgtagcagcacatctgtgtatttgtgtatcttgttcctccataatcttgcagtccggggaaagtgtgcagatggatgggtccctgaaaagcaagagttgtttagacaacgctagaggtgttcagttctgggagacaagagttgggccaggttgataactagcctaagagagtcggaatcagatgaataagaactagatcttgggtgacaacctagatcaagagtcttgaggttcagtcatttcaaaaagctcaagtctcattgcttcttggccttctggctaagatcatgtgcagtatctgttcttaccagtttaatatctgatacatcctctatctgaggataatataataaatagatttttggagcaaggagatggaataggagcttgctctgtccactctacacattggcctggattgcagtacctccaggaatggtgcaccctctctaccacccccaaaaagcccaagtctcaagaggtagtctggaaaaaagtgtttttggatttacctacatttttttttccaagatggagtctcgctctgtcacccaggctggagtgcagtggcgccatcttggctcactgtaacctctgcctccaggattcaagcagttctcctgcctcagtctcccaagtagctgggattacaggtgtgtgccaaccatgctcagctaatttttctatttttagtagagacagggtttcaccatgttggccaggcaggtctcaaagtcctgacctcaggtgatctgcctgccttggcctcccgaagtgctaagattacaggcgtgagccactgcgcccggcctaatttttgtaattttagtagagacgagttttcaccatgttgaccaggctggtctcgaactcctgacctcaggtgatccacccccgccctcggcctcccaaagtgctggcactacaggcatgagccaccgctcctggccgggtttgcctacattttggagatgctgcacaccatgtccctcttttcaagagtcacgtaagtatttacatatggaagaccctgagaaggcacctgggaaaaaacctgtttaactgtaaatataataatgtatgtatttgtatgtggagctcttcttttagtggattatctataaaccgtccactgttcccagtgcatactttggagacagacctacactaccagttttcacctgctagttatttttataagggttgggatggtccatgagtgaatagtcttgatttaaagcagtgtttcccaaacctcatttatttgcctatagccttcctggagtttgtcttatatgtccgctctgtgcactattcctatatgtttttatgtaaatcaatcacttttttaaaaagcctcatcccagttatatccttaaaacaatggttattttttctcatacacatcgaaatacatatctattagaatt

SEQ ID NO: 17939 - protein, 109 aa, Homo sapiens
MSHNSCALPLPSTEILSLRHKATAMGWGQVASATQDCLPYPLHCLFQQYEVKIRTTQAGGAAKTLVSLALPTASIARSSSLIYILQIYPQEDRWNHSFLLNSRTLRKLT

SEQ ID NO: 17940 - DNA, 1943 bp, Homo sapiens
aatggctaatgatgttgagtatctttttgtgtgctaatttgccatctatgtatcctcttcggtgaaatgtcttcatgtcttttgtctattttctatttaggtcatttgttctttttactattgagttttgagaggttttttatatatcctagataaaattcctctgttagatatgtggttgcttgaatttttaacataacttctaccaaggaaaaataagtaaaatttccaacccttgcatggccagtcacttacttaattcctgtccttcagtgttccatctagagaattaagagatatgatgtataaaatagacatcgagggccattaagagagtaaatacttaaaaatacatgttatgaaagcaaagccaataatcactgtaggagtatgagttgcctaagggccaaaactaatgtaaataagagaaagtgtggatataaatgaccattgtttataaacagtcatgaaaaatgctgtgacttgaaatctttcccacatctcccaagaaagtaggtaggagtttatcctttccgtaatctctttttaaccctgctgactattacagggcttgtttaatcacagtggcaagaattacatgtatcttacagtaaagaaacagaatactggaatcgttagagaaccctgatgtgttgacctggataaagtacaaaggtggaagagggaatgagttatgctgttaaaatctcaggctattctgttaatgttcctgctactatgaacccaaactttttttttcccccttttgactccttgtgtcttcctctcctgtggcataaaagtagttctgtcgttaacttgtacaacattgccatctgctgttgagaattggtaggtactgcttctgagaacctggctgcagatccttagcataggcagcaaatgttgagaaagtctatctgtagtattacatatactaagttacagaggatgcatccaagtagagaaaataatatgtgggttaagatacatccttaaactttttttttttggggggggggggggggacggagtcttgctgcaacgcccaggctggagtgcaatggcactatctcagctcgctgcaaccttcacctcctgggttcaagcaattctcctgcctcagcctcctgagtagctgggaatataggtgcacaccaccatgcctggctaatttttgtattttcagtagaagcagagtttcaccatattggccaggttggtctcgaactcctgacctcaagtgatctgcctgcctcagcctcccaaagtgctgggattacacgcgtgagccaccacacccagcctccatctttaaacttttaaatgtgaaatttctatcatgtaccgttagcctaacaagattttctttcctatttctgactggtgcctttcccctttttaggagcaacgaaagctactctcttagttatgttcttgtgatgtgacaaaatgtcaagaagataggagaagagaatattttatttcgttgatgcttttgttcccaagtgtgaccctaaacttaagctttgtaggagttgacattctttcatgtcccttccctttactcatgccgaaactatcaactgggacattttgtgcttttggtttaaaagttaattgatattatactttggttttatctaaaaagtaaatgtatttgcctttgacaaaagactgacacaagagcaaataagctttaaaatcgggtgttatgtgctttcctccatttttgagcatattatccaaaatggtctgtataatataaatgagaatgatgcagtttaagtaagccttgttataccattgtcatggacccctgtcataaagccatttcttggtttgtttgggaaagaggcatatgggatttatacagattcacttgtaaatgttggattggggatttttgtgtaaattttctcaaataaaggctagcagaaacc

SEQ ID NO: 17941 - DNA, 1887 bp, Homo sapiens
tggataaagaaaatgtggtacataaacaccatggaatactacacagccataaaaaagaatgaaatcatgtcctttgcagcaacatggatgctactggaggccactatcctaagcaaattaatacagaaatggaaaaccaaataccacgttctcacttataagggaaagtgaaacactgggtatacacggacacaaagatggaaacaataaactctgggaattccaaaaggggagagatagggggtgagggttgaaaaactacctattgggtactatgttcactgcttaggtgacaggatcattagaagcctaaacctcagtatcacacaacatacccatgtaacaaacctgtacatgtacccctgaatctaaaataaattttttcaataaagaaagaaaggttcttggaggagatagattcgatgttaaatcttctttcatcagcacatgtgtattgactgtcactctctaccaggctgtattctaggtaatggatgtaggagagaacaaaaaggtctctgctgttctgaagcttatagtctattggggagagatagtaaataagacggaaacaaataaatacacagtttcagagagcaatgagttctacaaatgagcagtgagccctataaacaaaatttagattaaattaaattaggataggtcagcctctttgttatagcagatgatactttttatatggtttagcaaagagtcaggaggaagtaattttaaaaagaaaacaaaaaaacctcttaccaccactttaagccactgtggtgattgagcaaacacaaagggaaagtcaaacctctgtcatttgcctggactatctggatgtgatgtaaactgggaaggtgaactttatgaaatctatgcaactaagatcagaggctgagctatgcccctcaaggagtgatatcttacaattttatcttaaacatgggtcatattgatcatttatgtcttaatttagtgatataaaattagagcctgaaagagtacctaaaaacaattgtccacacacaggacagttctgaaagaaatttatataacactattatatgcagtgtttttcaagttttcatttattaaaatcaccaaattaagtcatcctttcatacgctgtgattcagttaaaaggggcttttgttgcagaagctctagttaaggtttgaaaatcgatttctctacttctgcttccaagaggatggagtaggcatactttgccctattcttcccactaagtacacctaaaatccctagacatacataaaacaaatgtaagaacattctggaaggtaaagagaagaagacggactgattagggtccttgagacttgaggggcgccatagtgatgagctccaggggactttctttttgcctcatgtatccagacttggagccgaagtcgctgggaacccagaaacagtaatcggcacagactttagaaaaacaacaataaaagctgactttctctaaccaaataaccaggaaagggacagcccagcaagacacaaaagttttagaccataaatgtgctactgcagctgaacaccacaggaaacactgtggtcccccctcacccacaccagcaagggctgagtcaagtgagacttctccccttgctggggtggtgtcagagaagaccaagccaggagccagaaatttcatccccactggtcagtaaggaagctcgtccgctcccagagtttcagtggagaccacgtgggaattctggattctcacccccactcagcagtaaggaggcacctacccctcccccactccctggccagttgacacccagtagaaaacccagatgcctgcattcacctggcggtaacaagatggtggcagccaccttcccctgctagagcagtgtc

SEQ ID NO: 17942 - DNA, 2382 bp, Homo sapiens
ctaaggacatattttgataaagtattatttgtaatgaacacaagcctctcttgagtagaagtctaaatcacattatgattattttatactagttctgctatcatgctgttttatgctaattctgcttattttagagtatttttcattaaaaggtgagcaaagtgaaagatacttggtattttacccagatttctaagtggcaacatttttattcttcagagtcaggtaaatgactataatagtttggtttctaatgaaaagtcaatagcattagcagttataattctgtttataatttcctttcagcatttacagtgaaaagtgagaattttaaaatttatgaaatctatattccaggtattgtttttagtctgaaaaacaaactcccccatgtggtattaatataccttcaatttatgttgagtcttaaacataattaggagatatttttctctatttgctagatttgttttgagtcaaaactgatttagtgttcttccaaacaacatttatgtgttggcctacagagtttatttcatgtgttttttttaatatttaatattatattacattcattgaaatctgttcaaaaacagattaagacaaacatttatgatggtctgtatcaatcagcagattttattgcttttcattattttactgtaaaggcaaagaatgcaataggtgatggttggttgaaaggaattgttattgctgtttttattttttactttttttgagacagagtctcactctgttgcccagcctggagtgcagtgtgtcatcttggctcactgcaacctccgcctcctgggttcaagggattctcctgcctcagcctccaactagctgggattacaggcacaagccaccatgcctggctaaaattcttttgtatttttactacagacggagtttccccatgttggccgggctagtctcgaactcctgacctcaggtgatccaccagcctcggcctcccaaagttctgggattaaatgcgtgagccaccatgcccggccgctattgctctttttaacttcatttgatgccttgcttataatatcatatgcttgaggctcactgttgatgtagagtagggcaaatctgtgtgtgtatgtcattaaaaaaattctaccatctttctttatcatctggtgtgggcgcactctacagtgacttcagtctgctcagaacgaatgtggaggccggccgaaactgatgctgcccacagtcccagtgaagttaggtgggttaattactgccattcctttctaagtgtgttttatggcatcctgcccacaaagaactcacagtctgattaggatgaacttaatgactatttacacctcaaaatatattcagcaaagggttcacttagttgcccctcatgcttcacaggttgactagtatctgtgggtacctccctgcccaggttattcactcacaagccaccgggccttcaggacatctcaagattcagtcttgacaatataatagcaaaagctggactaaagcccaaatggattgtctgtggcaatgcagaagctgatagcattaacagcagggtgttacagcataattgttaattcgcacatctattaggatccttaaatattcattacttaatgttaaattaacattctgtgtagggaggggaggcttattcaattcttctgacctcagaactggcagaaggtcagatgtgactacagaactctaggtgaaaaatcaggtagggttcaaattaagtagaactgcccttgccggaatagtgatcttcaaaaaacccttgcttttaggggagggaagcggggaaggaaaggaatgagggaggaaatattcctttctagcattcattttgcttagatcactccattgtgagtttgaccattttggagtcaaatgagcagacttccaaggagttgaccagtttgtgactagtctggtcacctttccagttacaggatcatattaactgtgtaaatgaattcatgggtagatgatttgtgcagatctgaatttaagaacatttcctttttctgtgggaatcacaagagtttatccactaaaaaaagatatgtaaaaaagatactttccagcacataaataaaggctggaattttacaacctgatgtatatattagacagttctaggatgttagttcccttcattccagagctatgcttgtgatacagccccttttcttataaagtcagttagaaggacttccttaacaatgactattataatgtcttacttaaaatacagttttgtattctgtcaatgcaaatataagacaggttgagccttaatcatgtaacaaaatattttgtagattacatattgatttttcaaaaattaaaaatgtatttcaaagt

SEQ ID NO: 17943 - DNA, 1635 bp, Homo sapiens
  CDS (83)..(940)
gctgctgcactgacggcgggtgcccgcgcctcagagttactgatttattcttgagattcctctactctcgttatctgacctcatggatgaacttcaggatgttcagctcacagagatcaaaccacttctaaatgataagaatggtacaagaaacttccaggactttgactgtcaggaacatgatatagaaacaactcatggtgtggtccacgtcactattggagttggagctggagcttacatcctcagcagatttgcactcaaccatccagagcttgtggaaggccttgtgctcattaatgttgacccttgcgctaaaggctggattgactgggcagcttccaaactctctggcctgacaaccaatgttgtggacattattttggctcatcactttgggcaggaagagttacaggccaacctggacctgatccaaacctacagaatgcatattgcccaagacatcaaccaagacaacctgcagctcttcttgaattcctacaatggacgcagagacctggagatcgaaagacccatactgggccaaaatgataacaaatcaaaaacattaaagtgttctactttactggtggtaggggacaattcgcctgcagttgaggctgtggtcgaatgcaattcccgcctgaaccctataaatacaactttgctaaagatggcggactgtgggggactgccccaggtagttcagcctgggaagctcaccgaggccttcaagtactttttgcagggaatgggctacataccatctgccagcatgactcggctcgcccgatcacgaacccactcaacctcgagtagcctcggctctggagaaagtcccttcagccggtctgtcaccagcaatcagtcagatggaactcaagaatcctgtgagtcccctgatgtcctggacagacaccagaccatggaggtgtcctgctaagcagatgctcctcccctggaccattgcaagtccatccttcaaatgaccactccataatataacatttcatccagtaaactggcctctactatctttaactcatgcatggccactgaacctctctctagtagcctggatttatcattctctctgcctgcccacccccttttttgtatagcccaagaaccacttccatgccatactgtaacattccaacatctttagctgatcagatctctccatatcctctcttgccagctttttcccgtgctcccccaactatgtatcagataagattctttgatcccgactctgtgtgtgcgagcacgcgtgtctgtgtttgtgtgtgcatagttctgtggttttagacacgctttcttgtagtgcttctgcaaaaaacaaaaaagggacttattttgcattctcaatggtgtttttaagggaattaggcagaacagatttctaggttgggtaggccactgcattctcttttgtttgcaaattggtcaacaaaatttgcaaagtgatttcaggagagagcagctttgaggaatgtggaaaatcataattgccgtctggaccattgattgattgtgaccagtagcagaagggtgcctgttacatagagaggctccttctgtccaaatgaatttctgtatactcttctataaataaaagggaggaatatattc

SEQ ID NO: 17944 - protein, 286 aa, Homo sapiens
MDELQDVQLTEIKPLLNDKNGTRNFQDFDCQEHDIETTHGVVHVTIGVGAGAYILSRFALNHPELVEGLVLINVDPCAKGWIDWAASKLSGLTTNVVDIILAHHFGQEELQANLDLIQTYRMHIAQDINQDNLQLFLNSYNGRRDLEIERPILGQNDNKSKTLKCSTLLVVGDNSPAVEAVVECNSRLNPINTTLLKMADCGGLPQVVQPGKLTEAFKYFLQGMGYIPSASMTRLARSRTHSTSSSLGSGESPFSRSVTSNQSDGTQESCESPDVLDRHQTMEVSC

SEQ ID NO: 17945 - DNA, 1731 bp, Homo sapiens
aaattatttgaaagcataacttcacaatttgaaggcttgaatcttatgcctgctagtcatgaagttaaaaacatagctttgaaaaattaaagtaagtgctggaaatttgaagagaagttactggctcgtagtagattttacagatccctcttggaaatcaggtaaaaaatgggaggtataggtaatcagaatgtcataattaagcttgatttaatagataacgcaagattatatgtaataaacagaggatatatgttcttttcaaatacccgtctattttaaaattggttatgagaccacacatacatacacacacgtgctaaaaaccaaaaacatgcaaaactcaagaagttaacaaaagtagggaattgtacagcctacattccattctctggcaaccaggcagtaagactataaattaaaaaagaaagctccccaaaatgtagctatgcagaaatttaatatcactcttctaaaaagtctttaaaaaggaaacatataaattacttagcaacaagtcacactgaaagcaatacattatcaaaaatcagaatataaccaaagcaatatttgattgaaatattcaaagcataattaaaattgtttgtataataactctttaagaaatgtgtttgttataagacaaccaaatagaaatgaaccaagcattaatcttaaaacactagaggaggctgggcacggtggcgcacgcctgtcatcccagcactttgggaggccgaggcgggcagatcacgaggtcaggagatcgagaccatcctggctaacacggtgaaaccgtatctgtactaaaaatacaaaaaattagccgggcgaggtggtgggcgcctgtagtcccagctactccggaggctgaggcaggagaatggcgtgaaccggggaggcagagcttgcagtgaaccaagattgcaccactgtactccagcctgggtgacagagcgagactccatctcaaaaaaaaaaagagttagtgtaactttgaaactaaaattggataaggccaacataaaagagagagaactaaagatgaacattactcaagtttataaatttaaaaatcttaaaatgttaggaagtcaaattcaacaggatctttaaaaacagtttattcttagaacacaaggatgatttaaaatccaaccgattatattaataaattaaagagaaagccagtgtgattgatcatcttgaaaagttgaaaagcatttaataagatttaacctgcatttttaacattcttacatcccttctagccgtcaaactctgatcgacttacacttaagactgtgtctttggtagcctaccctattccacttttattacaaaggcagctcttatgacataaatccatctcttcaggctcgaactgcaaaacacacgtcgagaggtgacaatgttgggactgtcaaaaagaacttaaagagtgggataaccagccgggcgcggtggctcactcctgtaatcccagcactttgggaggctgaggcgggtagatcacaacatcagaagatcgagaccagcccggccaacatggtgaaaccccatctctactaaaaatacaaaaattagctggatgtggtggcacgcacccgtagtcccagctactcaggaggctgggacagaaaaattgcttgaacccaggaggtggaggttgcagtgagctgagattgtgccactgtactccagcctggcaacagagcaagactccatctc

SEQ ID NO: 17946 - DNA, 2271 bp, Homo sapiens
agtttgtaaagtatggtaagctggcctgttatttgtttagtatcttctggattttttttttttaattatagagctagcttaccgtgtgtatcatgtaaaaaaaattcataagattaacaatttccatgagaatatcataaactcagggcacacattctggccattcctgactaaaaaacttcaagcagaataagcagctataaaatagaaaagaaaaattaaggataaacggcattgtgaaaaaaaaccgagccacacagatgagaattaaaaattaacagccagcaaactcaaaagaacctttgtcctccttgagatatggtgatgatcaaaaagttagcaaggaatattaatcaaggaattaaagggcattaggaatgctatagtattggaagaaattacatcttaacatttcaaagccccatttcacttaagagtaaaatctaatctgatgttttttactctgaattttattcagtaatttttattcataattcatgataattggtaatgtagtataattgttagtaaatgcagtacaaattgttctactgttttaaaaagttttccgcagaacagtgcatttatggcaatgctatgtttaatgagttagggacatcaaatatatagtagttccttattttcagttgtgaaaatgaaatggctaaagcagaagagacgtctattttagtcttttaaaaatgtgtgtgggtggtcttttttcctcagaagcccaaagcacatgtatattttgttatttctccttgctatattcctgagactatactaaaaactttaagaaaaggaacaagaaaaaggtaaattcatgtgttccccactgctgtgtctagaaccaagatcacattatatcattgttaaaattgtgttatctagaaagtgcaatatagggaaaacactctaagaatcttttaaaagcctagtgtttcccttatttgtcagaatatgtggtagtggcatccataagtatcttttaacttgcatttagcaggacaaatagtgtgatacttatactgatgacaatcatccccatttaatgaccagcagtcactgagcgctgtgaaaattcactcagtgataccccgtgttggtcttgaaggaaaccgtacatatgaatttttggatagctaatgtatatctctcaagtgccaacatttaaaacttgtaattatttttgatgtgagtatttcaggtatgttagtataccttcctgccttcttcttaaacatcatgctcagtataattcacattttcatgatgaaaagttaaagttatattcataatgtattattataagtatccagctctgatgtatgtaaaacacttcataaaatgtaaagggctataacaaatatgttataaagtgattctctcagccctgaggtatacagaatcatttgcctcagactgctgttggattttaaaatttttaaaatatctgctaagtaatttgctatgtcttctcccacactatcaatatgcctgcttctaacaggctccccactttcttctaatgtgctgttatgagctttggacatgagataaccgtgcctgttcagagtgtctacagtaagagctggacaaactctggggggacacagtctttgagacagctcttttggttgctttccacttttctgaaaggttcacagtaaccttctagataatagaaactcccagttaaagcctaggctagcaattttttttagttgcaactaagtaagatatactacaaactaaggatgctgctagactaaggaataaacagcaaggtaccaaagtacagcaaagcaacaacaaaggctctgtatttgcagaggggtctatcatgcttttaagaaaaaagaagagtacaggaaaaaaattcagatagacataagagtattttggatgccattaaactttgtcaataaccattaaaacataggcttaaattatcacgtattgttacaaagacacagttttgtctcattataaaataagattatatgaaatttatattctagaaatgattccaaatcatgtcctaagaatttctcccattcaaatgataatggaaattactgtcaaaaggaaaatctcaaagttaccgttacgctgctctcttgtaaatgaactagggataaagatatgggttttatcaaaagccctaaggaatatatctcacattcacctcctatatgtatgtgtatatataaatgccactataaatgaaaatgtcacccagagataataaaataatttttaaagttt

SEQ ID NO: 17947 - DNA, 1511 bp, Homo sapiens
  CDS (714)..(1229)
attgactaaacctaactagaagccagaggccaaaggaatctgtcgatatacaagctagcttcccagtggatggagcaggatggagaagaggaagaacgggcctggagggacaaacaaagggttaaaagaaaaggtccatccacatcgtggcgctggggaacgagggggacacattccaccaggacaaccggccgtcggggcttatccgcacttacctggggagaagccctctggtctccggggacgagagcagcttgttgctgaacgcggccagcacggtcgcgcgtccggtgttcaccgagtatcaggccagtgcgtttgggaatgtcaagctggtggtccacgactgtcccgtctgggacatatttgacagtgattggtacacttctcgaaatctaattgggggcgctgacatcattgtgatcaaatacaacgttaatgacaagttttcattccatgaagtaaaggataattatattccagtgataaaaagagcattaaattcagttccagtaattattgctgctgttggtaccagacaaaatgaagagttaccttgtacatgcccactatgtacctcagacagagggagctgtgttagtacaactgaagggatccaacttgcaaaagaactaggagcaacctatcttgaactccacagccttgatgacttctacataggaaagtattttggaggagtgttggagtattttatgattcaagccttaaatcagaagacaagtgaaaaaatgaagaaaagaaaaatgagcaactcctttcatggaattagaccacctcaacttgaacaaccagaaaaaatgcctgtcttaaaggctgaagcgtcacattataactctgacttaaataacttgctgttctgctgccagtgtgtggacgtggtattttataaccccgatttaaagaaagttgtagaggcccacaagatcgttctctgcgctgtaagccatgttttcatgctgcttttcaatgtgaagagtcccactgacattcaggattccagtatcatccgaactacccaggatctttttgctataaacagagatactgcatttccaggtgctagccatgaatcttcaggcaacccaccattacgagtcattgttaaagacgccctcttctgttcttgtttatcagacatccttcgcttcatttattcaggtatcttgtcaagtggttctggttacttacaatctcataagctttggaaatgaaatgtgcctgtgacactcaagggtactggttagttttacagtggtctttacctaccatctgagattaagattatacatgaaatattacttgctttatatataagaattggtccaagctttctgttttccttacaaatgtacttgcctcatcttttccctatcaatttcattttattgtggtaaaatacatagaacataaattttaccatctcaaccatttttaagaacacagttcagtggaattaaacacattcataatgttgtgtaactatcaccacc

SEQ ID NO: 17948 - protein, 172 aa, Homo sapiens
MIQALNQKTSEKMKKRKMSNSFHGIRPPQLEQPEKMPVLKAEASHYNSDLNNLLFCCQCVDVVFYNPDLKKVVEAHKIVLCAVSHVFMLLFNVKSPTDIQDSSIIRTTQDLFAINRDTAFPGASHESSGNPPLRVIVKDALFCSCLSDILRFIYSGILSSGSGYLQSHKLWK

SEQ ID NO: 17949 - DNA, 2297 bp, Homo sapiens
  CDS (259)..(1551)
aaccacaaaacccgccaggccggtgcgggagctgcggagcatccgctgcggtcctcgccgagacccccgcgcggattcgccggtccttcccgcgggcgcgacagagctgtcctcgcacctggatggcagcaggggcgccggggtcctctcgacgccagagagaaatctcatcatctgtgcagccttcttaaagcaaactaagaccagagggaggattatccttgacctttgaagaccaaaactaaactgaaatttaaaatgttcttcgggggagaagggagcttgacttacactttggtaataatttgcttcctgacactaaggctgtctgctagtcagaattgcctcaaaaagagtctagaagatgttgtcattgacatccagtcatctctttctaagggaatcagaggcaatgagcccgtatatacttcaactcaagaagactgcattaattcttgctgttcaacaaaaaacatatcaggggacaaagcatgtaacttgatgatcttcgacactcgaaaaacagctagacaacccaactgctacctatttttctgtcccaacgaggaagcctgtccattgaaaccagcaaaaggacttatgagttacaggataattacagattttccatctttgaccagaaatttgccaagccaagagttaccccaggaagattctctcttacatggccaattttcacaagcagtcactcccctagcccatcatcacacagattattcaaagcccaccgatatctcatggagagacacactttctcagaagtttggatcctcagatcacttggagaaactatttaagatggatgaagcaagtgcccagctccttgcttataaggaaaaaggccattctcagagttcacaattttcctctgatcaagaaatagctcatctgctgcctgaaaatgtgagtgcgctcccagctacggtggcagttgcttctccacataccacctcggctactccaaagcccgccacccttctacccaccaatgcttcagtgacaccttctgggacttcccagccacagctggccaccacagctccacctgtaaccactgtcacttctcagcctcccacgaccctcatttctacagtttttacacgggctgcggctacactccaagcaatggctacaacagcagttctgactaccacctttcaggcacctacggactcgaaaggcagcttagaaaccataccgtttacagaaatctccaacctaactttgaacacagggaatgtgtataaccctactgcactttctatgtcaaatgtggagtcttccactatgaataaaactgcttcctgggaaggtagggaggccagtccaggcagttcctcccagggcagtgttccagaaaatcagtacggccttccatttgaaaaatggcttcttatcgggtccctgctctttggtgtcctgttcctggtgataggcctcgtcctcctgggtagaatcctctcggaatcactccgcaggaaacgttactcaagactggattatttgatcaatgggatctatgtggacatctaaggatggaactcggtgtctcttaattcatttagtaaccagaagcccaaatgcaatgagtttctgctgacttgctagtcttagcaggaggttgtattttgaagacaggaaaatgcccccttctgctttccttttttttttttggagacagagtcttgctttgttgcccaggctggagtgcagtagcacgatctcggctctcaccgcaacctccgtctcctgggttcaagcgattctcctgcctcagcctcctaagtatctgggattacaggcatgtgccaccacacctgggtgatttttgtatttttagtagagacggggtttcaccatgttggtcaggctggtctcaaactcctgacctagtgatccaccctcctcggcctcccaaagtgctgggattacaggcatgagccaccacagctggcccccttctgttttatgtttggtttttgagaaggaatgaagtgggaaccaaattaggtaattttgggtaatctgtctctaaaatattagctaaaaacaaagctctatgtaaagtaataaagtataattgccatataaatttcaaaattcaactggcttttatgcaaagaaacaggttaggacatctaggttccaattcattcacattcttggttccagataaaatcaactgtttatatcaatttctaatggatttgcttttctttttatatggattcctttaaaacttattccagatgtagttccttccaattaaatatttg

SEQ ID NO: 17950 - protein, 431 aa, Homo sapiens
MFFGGEGSLTYTLVIICFLTLRLSASQNCLKKSLEDVVIDIQSSLSKGIRGNEPVYTSTQEDCINSCCSTKNISGDKACNLMIFDTRKTARQPNCYLFFCPNEEACPLKPAKGLMSYRIITDFPSLTRNLPSQELPQEDSLLHGQFSQAVTPLAHHHTDYSKPTDISWRDTLSQKFGSSDHLEKLFKMDEASAQLLAYKEKGHSQSSQFSSDQEIAHLLPENVSALPATVAVASPHTTSATPKPATLLPTNASVTPSGTSQPQLATTAPPVTTVTSQPPTTLISTVFTRAAATLQAMATTAVLTTTFQAPTDSKGSLETIPFTEISNLTLNTGNVYNPTALSMSNVESSTMNKTASWEGREASPGSSSQGSVPENQYGLPFEKWLLIGSLLFGVLFLVIGLVLLGRILSESLRRKRYSRLDYLINGIYVDI

SEQ ID NO: 17951 - DNA, 2025 bp, Homo sapiens
attgtgtatgattcgttgttgactgcagcatcactaggtgggacatcactgcgttttccttgaacttccgcgggttctcctaaagttacttggtgactttttatgattgctttctgctcgtctgaataaaggatgagcccagggcctgctgcccactgtctgctctgatgaccctctctcccctgcagatccgagtgatggtggacctgtgcaacagcaccaagggcatctgcctcacaggaccttctggaccaccaggacctccgggagccggcgggttgccaggacacaacggagtggatggacagcctggtcctcagggcccaaaaggagaaaaaggagcaaatggaaaaagaggaaaaatgggtatttttggcaactcttctaattaatttccctgttatttatctccatgattgcatttgggtcgactaaaactgtgtgcagcaggggtaaggtgtttcatctctgcacagtttaaggccggtttaactcttacctagaagccgttgcgttccgggataccaagggtatacttcttggtcccaccttgacagatgtttatttcaaactggagaagccgtctcctgggaactgactcgcacccttctgctgcagatgggaggtggaaggagcaggagcccacagccctgggaggggcattctgtgggccgtgtgacagctggtgctggtgcatgctctttcgaggctcagctcctgccttgccctctattgcctcctcctgcccagcgaatctgtgtttggttgaaaatcaatgaactgatgttggcccctggtaaggcatttcttggctagaggaatagctcaaactgcttgagtggaaaggcagcatcctggcctccctgtggccggcactcaggtcaaagggtctcctcttcaggggctacaggataactatgaagatatggctggcatctcggaggagcttcctttgccctgttatgagcaggccatcaccactggagaaaaggcccagaagcaccaaggcatgagatgtgcccagggagcagtaagaatcaggggctggtgcagggcctggcaggaggctggggcacaaaggggaagattctgaagggctctgagcaccagtcctggggagccggggtcagggcagatccacctgaagaaagctggcacatgctgtggtgggagctcaaagacagagggtaagaaactactcaggaggctcctacgaaggcctggctctcagccacccgtcaaagccactgctgagggcagagggaggttgttttcagccggagactccactgcaccatcttattttcaacctcttggctctgctacccaaactcacttggactggccctggacgagaagaaatggtagaaaattcttccagacagcaattactcctttggtcacctccactcttattctcattagcaattgaagtaagggccagtggagagggaaaaattgtcgagcacctctgacacttggcagtgcctacctgcttgtgttccagagggcagcttcagagaaaacgggcacacaccgtccaagccagctcaatcctcagaaggccagtaattaccattggaattacacagcagcaatggatcgttcatataggataataattataattatacatgagcatcgctgtagaataatgatgcctattggcttatcctgggaagactccaaaaatgtgattcagtcctgaggcctcggcaatgggcatgatgagggcaggctcaggggcaggagggcaccctgctagagctgggtgtggggcacgtaggaaaggggtggttttcaaaaaggcttgagacagatccctggccttgaggacgtgcttcgcatgcagcctgcaacccagggagtgcagaaaagaaaaagtgcatttgtttatggagcacatatttgtgtggcaggtaccattctagatctggagattcagaaataagcccccctcctccaccttcacgaggcttacatcctagctgggagagacggataataaataagataaataaatag

SEQ ID NO: 17952 - DNA, 2178 bp, Homo sapiens
  CDS (716)..(1792)
agcagttggaagttggcaggtggagaggcaggttgggagggaaagtcgggggaggacgcggaagaggagctgtgggaagggggaggagggagggaggaaaagaggaggaggcggaggagaactgagcagagcagagcatcgagccaaaggggagatgagtttgtctgtcctctgctgaggctacggccgggcctagggaactgggagcttgggtggaagcgacacccgtggaagtgggaggaggtggcgccgggactttaaccccttgtgggctctgcggcaggggatttaaccctttgtggatctggcccctcggaggcagcgtcatcggtagttttaaccccttcggggctgggtttcacgcactggacttaccctcatcaccttgctcaccaactcctttattggggtgctccgcttggaggtttgaggcccacctccgcccattacgtactgttcctgccgctgcacccccttggacccgctagctggccgcactgtgggcgcttaaccctttactgacttgagctccccagattgcagttggagtttgctgatagaaggactagctaaaggcgtcactgcaggaattacaaactgaagaggactctgttggactgtttttttttctttttcttttttttaagaaaaacccatttttttccttaaggacttactagccaaaatttcttaaacttcgaggactctactagccatggccgagccattcttgtcagaatatcaacaccagcctcaaactagcaactgtacaggtgctgctgctgtccaggaagagctgaaccctgagcgccccccaggcgcggaggagcgggtgcccgaggaggacagtaggtggcaatcgagagcgttcccccagttgggtggccgtccggggccggagggggaagggagcctggaatcccaaccacctcccttgcagacccaggcctgtccagaatctagctgcctgagagagggcgagaagggccagaatggggacgactcgtccgctggcggcgacttcccgccgccggcagaagtggaaccgacgcccgaggccgagctgctcgcccagccttgtcatgactccgaggccagtaagttgggggctcctgccgcagggggcgaagaggagtggggacagcagcagagacagctggggaagaaaaaacataggagacgcccgtccaagaagaagcggcattggaaaccgtactacaagctgacctgggaagagaagaaaaagttcgacgagaaacagagccttcgagcttcaaggatccgagccgagatgttcgccaagggccagccggtcgcgccctataacaccacgcagttcctcatggatgatcacgaccaggaggagccggatctcaaaaccggcctgtactccaagcgggccgccgccaaatccgacgacaccagcgatgacgacttcatggaagaagggggtgaggaggatgggggcagcgatgggatgggaggggacggcagcgagtttctgcagcgggacttctcggagacgtacgagcggtaccacacggagagcctgcagaacatgagcaagcaggagctcatcaaggagtacctggaactggagaagtgcctctcgcgcatggaggacgagaacaaccggctgcggctggagagcaagcggctgggtggcgacgacgcgcgtgtgcgggagctggagctggagctggaccggctgcgcgccgagaacctccagctgctgaccgagaacgaactgcaccggcagcaggagcgagcgccgccttccaagtttggagactagactgaaacttttttgggggagggggcaaaggggactttttacagtgatggaatgtaacattatatacatgtgtatataagacagtggacctttttatgacacataatcagaagagaaatccccctggctttggttggtttcgtaaatttagctatatgtagcttgcgtgctttctcctgttcttttaattatgtgaaactgaagagttgcttttcttgttttcctttttagaagtttttttccttaatgtgaaagtaatttgaccaagttataatgcatttttgtttttaacaaatcccctccttaaacggagctataaggtggccaaatctgagaacaattaaattcattttagttataataaatttaatatttgtaaatgt

SEQ ID NO: 17953 - protein, 359 aa, Homo sapiens [sequence omitted]

SEQ ID NO: 17954 - DNA, 1925 bp, Homo sapiens
  CDS (899)..(1456)
tcatcttcagatctgatcttattttgctacttaggagttctgatactgggcaagtcacctagcctgtgagcttcatttgcttatacagttgttggaattagatgtggtgacatgcgaaaagcacaaaacctggctcctatcaagcttctgcatctatttttttttctatttttctctcaattattggaagctcatagaagcattttgggatagaattttagtagtttgcaagtatttttaaacattttatcataggtacacttataattttgatatgatctcagtattaacctgataactcccaaattgatattttcctagttcaactgaaattaaagggagaaatatgggattgtaggagtgccttgtcctcaaattgactgtatttctgttttgagaaagatcttggtactgatcacgtagtcaactttctaatgcaatgttaaagtttatatatttgtaaatgttattgttataaaagcataaaaccagaaattaagtcttagatttagtttctacatcttttattggaagatgactgtagataaatatctttctgtatatcattttaataaatgagaaaagagagctgttgaatgaaagatcatgaacatcagtatttatctgaggaacatcctgcggaggaatccctttccccatttattaaacacaaaattgccagtgtttcaagtagttctctgatcgatagaccaacaactgaaattaaatgcttttagtctcaagtgcccatttttattaaaatgtaattatcatgaacagaaaaagcaatacaaggcgtgtgttcttaataattctgccattctctttttgacatttaaaggaagagcctaggctggatgtcttgatcaataacgcagggatcttccagtgcccttacatgaagactgaagatgggtttgagatgcagttcggagtgaaccatctggggcactttctactcaccaatcttctccttggactcctcaaaagttcagctcccagcaggattgtggtagtttcttccaaactttataaatacggagacatcaattttgatgacttgaacagtgaacaaagctataataaaagcttttgttatagccggagcaaactggctaacattctttttaccagggaactagcccgccgcttagaaggcacaaatgtcaccgtcaatgtgttgcatcctggtattgtacggacaaatctggggaggcacatacacattccactgttggtcaaaccactcttcaatttggtgtcatgggcttttttcaaaactccaatagaaggtgcccagacttccatttatttggcctcttcacctgaggtagaaggagtgtcaggaagatactttggggattgtaaagaggaagaactgttgcccaaagctatggatgaatctgttgcaagaaaactctgggatatcagtgaagtgatggttggcctgctaaaataggaacaaggagtaaaagagctgtttataaaactgcatatcagttatatctgtgatcaggaatggtgtggattgagaacttgttacttgaagaaaaagaattttgatattggaatagcctgctaagaggtacatgtgggtattttggagttactgaaaaattatttttgggataagagaatttcagcaaagatgttttaaatatatatagtaagtataatgaataataagtacaatgaaaaatacaattatattgtaaaattataactgggcaagcatggatgacatattaatatttgtcagaattaagtgactcaaagtgctatcgagaggtttttcaagtatctttgagtttcatggccaaagtgttaactagttttactacaatgtttggtgtttgtgtggaaattatctgcctggtgtgtgcacacaagtcttacttggaataaatttactggtacaaattctt

SEQ ID NO: 17955 - protein, 186 aa, Homo sapiens [sequence omitted]

SEQ ID NO: 17956 - DNA, 2626 bp, Homo sapiens
  CDS (5)..(2626)
acagatgaaatgtaaagctggttttaatagttacgccgagcttttaacccaccgaaaggagcatcaagtctttagagcaaaatgtatgtttcctaaatgtggaagaattttttcggaagcttatttactatatgatcatgaagcacaacattataatacgtacacttgtaagttcacaggttgtggtaaagtttatcgttctcagggtgagctggaaaagcatctggatgatcacagtactcctcctgaaaaagtgctgcctcctgaagcccaacttaattcatctggagattccattcagccttctgaagtgaatcagaacacagcagagaatattgagaaagaaagatctatgcttccttcagaaaataacattgaaaacagcttactagcagatagaagtgatgcttgggataaaagcaaagcagtatcagctgtgaccaaacaagaccagatttctgcctctgagctcaggcaagctaatggaccattgtcaaatggtttggaaaaccctgctactactcctctacttcaatccagtgaagtagctgtgtccattaaggtgtctctcaatcaggggattgaggataactttggaaagcaagaaaactcaactgtggaaggcagtggtgaagcactggtcacagacttacatacgccagttgaagatacttgtaatgatttgtgtcatccaggtttccaggagagaaaagaacaagattgctttaatgatgcccatgttactcaggattctttagtaaattcagaaactctcaaaataggtgaccttaccccacaaaacttagaaagacaagtgaacaacttgatgaccttttctgtgcaaaatcaggcagcatttcaaaacaatttaccaacttccaaatttgaatgtggagataatgttaaaacatcatccaatctttataatttacctcttaagacattagaaagtattgcatttgttccaccgcagtccgacctaagtaattcattaggaactccatcagtgcctccaaaagctccagttcagaaattcagctgccaggtcgagggatgtactcgaacctataattcttcacagagtattgggaaacacatgaagacagcacaccctgaccaatatgctgcatttaaaatgcagcgcaaaagtaaaaaaggtcagaaagctaacaacttaaatacaccaaataatggaaagtttgtttattttttgccatcaccggtgaacagctcaaatccattttttacatcacagaccaaagccaatgggaatcctgcttgttcggcccagttgcagcatgtctcgccacccatttttccagctcatttagcaagtgtgtcaactccattgttgtcctcaatggaaagtgtcataaatccaaatataacttctcaggataaaaatgaacaaggtggtatgttatgttcccaaatggaaaatttacctagtactgccttgccagcacaaatggaagatctaaccaaaacagttctgcctttgaatattgacagtggctcagatcctttccttcctttacctgcagaaagtagttcaatgtctctcttcccttcaccagcagatagtgggactaattctgttttttcccaactggaaaataatacaaatcattattcctcacagattgaaggaaacactaattcctcctttctaaaggggggtaatggtgaaaatgcagtttttccttcacaagtgaatgttgcaaataacttcagtagcaccaatgcccaacagtctgcacctgaaaaagttaaaaaagaccgtgggcggggcccaaatgggaagaaaagaaaacctaagcacaacaaaagggctaaatggcctgcaattatcagagatgggaaatttatctgtagcaggtgttacagggcttttactaatcccagatcactgggtgggcacttatccaagcgatcttactgtaaaccactggatggagccgaaattgctcaagaacttctacagagtaatggacagccttctcttcttgccagcatgattctctccacaaatgcagtaaatttgcagcagccacaacaatctaccttcaatccagaagcatgttttaaagatccatcatttctacagcttcttgctgaaaatcgctcgccagcatttttaccaaatacatttcctcgatctggtgtgactaactttaataccagtgtcagtcaagaaggtagtgaaattattaaacaggctttggaaactgctggcattcccagtacatttgagggtgccgaaatgctttctcatgtttcaacaggttgtgtctctgatgcatcacaagtaaatgcaacggtgatgccaagtccaactgtaccacccctgttgcacactgtatgccatccaaacaccttgctgaccaaccagaataggacgtcaaactccaaaacttcctccattgaggaatgtagcagcttgcctgtttttccaacgaatgacttactactgaagactgttgaaaatggcttgtgctctagttcatttcctaattctggtgggccatcacaaaattttaccagtaacagttctcgtgtttctgttataagtggtcctcagaacacaagatccagtcatttaaataaaaagggaaacagtgcttct

SEQ ID NO: 17957 - protein, 874 aa, Homo sapiens
MKCKAGFNSYAELLTHRKEHQVFRAKCMFPKCGRIFSEAYLLYDHEAQHYNTYTCKFTGCGKVYRSQGELEKHLDDHSTPPEKVLPPEAQLNSSGDSIQPSEVNQNTAENIEKERSMLPSENNIENSLLADRSDAWDKSKAVSAVTKQDQISASELRQANGPLSNGLENPATTPLLQSSEVAVSIKVSLNQGIEDNFGKQENSTVEGSGEALVTDLHTPVEDTCNDLCHPGFQERKEQDCFNDAHVTQDSLVNSETLKIGDLTPQNLERQVNNLMTFSVQNQAAFQNNLPTSKFECGDNVKTSSNLYNLPLKTLESIAFVPPQSDLSNSLGTPSVPPKAPVQKFSCQVEGCTRTYNSSQSIGKHMKTAHPDQYAAFKMQRKSKKGQKANNLNTPNNGKFVYFLPSPVNSSNPFFTSQTKANGNPACSAQLQHVSPPIFPAHLASVSTPLLSSMESVINPNITSQDKNEQGGMLCSQMENLPSTALPAQMEDLTKTVLPLNIDSGSDPFLPLPAESSSMSLFPSPADSGTNSVFSQLENNTNHYSSQIEGNTNSSFLKGGNGENAVFPSQVNVANNFSSTNAQQSAPEKVKKDRGRGPNGKKRKPKHNKRAKWPAIIRDGKFICSRCYRAFTNPRSLGGHLSKRSYCKPLDGAEIAQELLQSNGQPSLLASMILSTNAVNLQQPQQSTFNPEACFKDPSFLQLLAENRSPAFLPNTFPRSGVTNFNTSVSQEGSEIIKQALETAGIPSTFEGAEMLSHVSTGCVSDASQVNATVMPSPTVPPLLHTVCHPNTLLTNQNRTSNSKTSSIEECSSLPVFPTNDLLLKTVENGLCSSSFPNSGGPSQNFTSNSSRVSVISGPQNTRSSHLNKKGNSAS

SEQ ID NO: 17958 - DNA, 2032 bp, Homo sapiens
gagacttccgccctcgcgggactggctagggcgtttgaccgccggcggtgaaggggaggcggtgggcgtcttggagaacagagcgagatggagaagcgaggccgaggcgtgaagtcgagccccatccagaccccgaaccagacccctcagcaggctccggtgacgcctaggaaagaaaggaggcctagcatgttcgagaaggaggcagtgagtgcggagactgctaggggcccgagacggctatgtccgaccgtttaagtgaaatcgctccccagtgggccccgctcccgtcaccacccccagagccaaggaggcagcatctcccttttgtgtttcttttttccccagatgcgaaattgaagcctgagactgagttgggcagtcccctttggacttgagtgctaaagttttcttgttttttaattagggccatagaaccctacataagtcgattggaagggtggttacaagatcttcttttcaaatttactcagcttgcggatttcctgagagtactctgagtattattgctttgtactaaaacacagtatgttagtgtatttagtgccattataagcagttttgctagcgaaaaatgagtgtgttgtattaaaaaaataatttgataaaccaggcagaatagtgccatgttttgggtttttgaaacatcagcagtctggatatttgaagaatgtacaggagaaaaaaacttaagttgaaaataccctgtccaaaacttactgatattgatggaaagggtcattattcagttttattggtggtataacaggtatttctatatgattaggctttgaaaaccgttaatgtattaaagactctatattttattgatactttaacagaaaattagtttgcccaaggatacaaagctgtaatgatagagctgggaccagaacctgtatgctagtactcggtccaattggcctatactggtttctcttcgtacttacttcgtggacctataataggatgaagatagagatgacaggcaaaacaattttttgaagaccctaaaacattttaagattactcttaaaaagagaattctcaaaataatggcgaaatttcaggttcttgtttccctggtgtctacattttacagaggaaagaacgaactaaataaaggaggaaaagcaaacaggccaagtttacacagctaagaaaaagagcagagcagggctagaaacctaaatcagttggacttaaaacttcacactcccaaacactatgctgtatttcttggcaatgagtctgagcaacaggtcaccaacagtaaagaaaaatttctatatattgaggcagacaagggtggcttttataaacttactgcctatctgaggtctgaagtggtctttaaaattcaatgagcctgaactcaaaatgaggagacacataggtgcacctggtatataggttaaaatctgggagtgaggggacatggaccaaagtaattattagtatttgatatggatgtgatcaattatagctatctttaaagttgattcttttagaggtgagaaatttgaatagaacaataattgggaagaaattgagaaaggactctacaaatgctcactaaatgtacctgaggaaactgttcacttagttatttctaatttaaggtagctgttaatttccctattttggagcataggaaaatttaagacatactgtttcatcaatatgaccatctcttgattttatctgtcttgcctccatttctttttttctagtggtagcacctcagttaacttttagagaattaactcatctgcaattgtatagagctttggtgagattgtcagctacttcccttaactttttaataaggatgagacccaaactaagctaattagatgaattctttgaaataatgcaaagaaaatgattgaggtttattcacattgaagatgagaagctaaagtgttccctgtgtctttctgaatctggttcatcagccttctctgctgttatgtaaactgtatctttccaataaattatactttggctt

SEQ ID NO: 17959 - DNA, 2433 bp, Homo sapiens
  CDS (650)..(1000)
ctgggtacgctgtgccaaattttcacccgatgaaagactaattgtgtcatgtagtgaggataaaactattgaaatttgggataccacaaataagcaatgtgttaataacttctcagattccgttggatttgcaaattttgtggactttaaccctagtggtacatgcatagcttcagcaggttctgatcaaactgtgaaagtctgggatgtaagagtgaacaaattactacagcattaccaagttcacagcggtggagttaattgcatatcattccatccttcgggtaactatctcatcacagcttcttcagatggtacccttaagattctggacctcttagaaggaaggctcatctatacacttcaaggacatacgggacctgtctttactgtttcattttcaaaaggtggagagctatttgcatcaggaggtgcagacacacaggtcttattatggagggctaactttgatgaattgcattgtaaaggtcttaccaaaagaaatctcaaaagattacattttgattcaccaccacatcttcttgatatctacccaagaacaccacatccccatgaggaaaaagttgagactgtagaaattaatccaaagcttgaggtaatcgatttgcagatctctactccccctgttatggatatcctttcttttgattctaccacaacaacagaaaccagtggtaggactctgccagacaagggtgaagaggcctgtggatatttcttgaacccttccttaatgtcaccagaatgtttgccaacaaccacgaaaaagaaaacagaagacatgagtgacctcccctgtgaaagtcaaaggagcatacctctcgctgtgactgatgctttagagcatattatggaacaactcaatgttttgacacagactgtttcaatcttggagcagcgactgactttgacagaggataagctgaaagactgccttgaaaatcagcaaaagcttttcagtgctgtccaacagaaaagctgaataaaaaattcattttcatttgttgggcagaggcccaataaatgaacaaatgtacatacactcaggaaggtagtacaagatactccatacaacacaaccatgtgctatttatcatggcatttcttaaaagggtgagcaacagaacaaaaggcagaaaaggcatacctaaggactaatttaaacacatatcaatgtgaaggactaatttaaattactatcatttatgattgcagtaataaagtgataagcattcaagcaactctgtattttccccatattattttaaatgtccattttcatttataggccaaatcctgccaggaaagtaaccagatctctggatttcactgttaagtcatttcagattgaccatattcagacagtcatggggtgaaataattcacttacctccaaaatagcatcctatatgccaataatgagttattgatctgactagttgtatgtctttctgttcaaaatagaaattatcctttcttactaatgccttgaaagaatgaacaaataaaaattcccagaccacagaatttccacagcaagaatacacttattttaattaacaatagcacagatatagcatagggcagtgggttttttagttaatttatggcgtactttgtttatccattggccaacctgaaggaaatgaaactcacctatctttctatcacagatgaatgtgctagatgaatgatttgggttgtatctgatcatggttcacaaaaattatgttagtgtgttttcagtatgctaaaaagtcagagtgatacaaaagtgatatttaaaaatatacacacatgtatgtacacatgcttcagaaatattgttgcttagggtgatttgggcagctaaatagtaagtactttttaaaatttttgcatcatcatcttcctatttaatgaattgtgatttaaaacaaaatgaaaataagccaggtattctaaaagatcctggatacaaattaagaattttgctttattttaaaccaaattgagattaaattgaagaaaagcaagcaaattaatttcagcttgattatcaacctgtatcaagaacaaaaatgggaggaggtgtccacatttatggtgtgtataggtaacatggggaaaatgctattctgtgttttggaaaagaagaaatagtgccgtcctatttatttctatatttagaaatttttctcaaagaaatttcaattgtatctatgagatgggtttctaagtatcttattgtgtgttataagtgccttttaatatcatactaagtgtgagcttctggacattttcaagagcttacaaaaactaagtggcattgtatttttataaccccattgagaagactaagtaagaaatgaaatgtcctatcaattttattttgtcatgcttcaaacaataaagacatttctgctttaaaag

SEQ ID NO: 17960 - protein, 117 aa, Homo sapiens
MDILSFDSTTTTETSGRTLPDKGEEACGYFLNPSLMSPECLPTTTKKKTEDMSDLPCESQRSIPLAVTDALEHIMEQLNVLTQTVSILEQRLTLTEDKLKDCLENQQKLFSAVQQKS

SEQ ID NO: 17961 - DNA, 1832 bp, Homo sapiens
atgataggcaaaaatgggaaaataacttgaggccaggagtataagggcagcctgggcaaaatagtgagacaccgtctttacaaaaactttaagtgtcagacaggcaacttggtgggcattttttttttgagatggagtcactctgtcacctaggctggattgcaatggtgcaatcttttcttactgcaaccttcgcctcccgagttcaagtgattctcctgcctcagcctcctgagtacctgggattacaggtgcacaccaccacgcttggctaatttttgtatttttagtagagacgggatttcaccatgttggtcaggctggtctcgagctcctgacctcgtgatcgaccttccttggcctcccaaagtgctgggattacaggcatgagccactgcacccagccttggcgggcatctttcaccaaagctactcaggaagccaaggtgtgaggacccctgcagcacaggagttcaaggcttcagtgagctatgggtgcaccactacacatcagcctgggtgagagagtgagaccatgtctcagaaaggaagaaaaattatccacttgtaggttgtctctaattacttccctgacccgcactcttcatttgtccaagtgctgcagctgtgctctcaacaatttttacaacttctgggaaagatgcccatggcccttgacgatagtgatgcatgtgcatcccacacacaggggtttcctgttcttttgttatttccctctctctttcaacaagtgttgcttcttacggattgaatttctccactgatagatcctcaagtcttgttttcacagatattaatttctctatcactaagatcacccattagtaagaattactaataaagataaaaaataaaaagtaaagaaagtacagaaaaaaagaattttaaataatcttcctagtacctgggaaacagttaggcagagttcaggtatggatctaagatggcactgtcagtaagaggcagaatcaggactggagtccaggcagcctggctcctgaatcctagctcctaactatgagaccctcatgtctttaggaatatggagttctgactgtgatagggtgaaagagggaagtcctcacagtttgcctgttgatctctaattttctacatcatggtaatctgtcacaaaaggggaggccacacctggcccagcccctttcacccactctcaatcccctagcaggtgccacacagaaggcgtgtcctcgtccattggttcttgcatgacaatcagagggacacggatcctccctttcatcaatgacccagagctgcgggtggaattctacactgggatgaatgagaactcagacatcgccttccatttctgagtgcactttggccattgtttggtcattgacagccatgtgtgtggggcctggaagtgtgaggggagatgccacaatgtgttcttcaaggacggcaaacaatttgatctgagcatcttggtgctagacaatgaataccagagcaccctctggttgcaccgctatcctcagctcgtttccaaaatctgaccgtgatcagtatcagctcatctggcatttcccccaaggtaataataaatggccaacaccatacatctttgtccatccacttccaccatgttctatgaagattttgcaagtgtgggaagatgtctccctgacctcaatgtctgtctgcaatttatggagatgaccacacccctcattgttgaggaatccctctttccatgtgaccataggatccccagagcctgctaacagcatgatctctcctcatccttttccctacacttggtcattaaaacatcaccaaacttc

SEQ ID NO: 17962 - DNA, 2286 bp, Homo sapiens
  CDS (843)..(1205)
gcttcgcgtcccgcctctcgcctggctggccgtggggggcctggacgcagtggcctcccgaatctcccaggaccctaatatcgcccgaggatgctgggaggaacgctgagccgacctctccgttaggctgaagattgcacaaaccatgctaatggccagcatggatggagggagcgtgtgagatgtgtggggcagcgtgctgcatctcagccaactccaggagccagttgatgtgatggactaccttaattgatttttgaatgttgagccagccttatgcatgtgggataaacccctgttgatcatggctggctggagtgcagtggtgcaatcatggctcactgcaacctcaaattcctgggctcaagggatcctcctgcctcagcctcccgagtagctgggactacagttcctgctggaatcttgctgttgcccattcaagtctggtggttcctgtgtgttggggtggccttgcttctcctgctcttagctctggaggagccctcggctggtgctgcagtgaatctgtcagagtcgtcctaaccagagtgcccccatcctgaatagaggctggataaagccaaacctgctgggttatagtcccaggggattgggcagtcctggtcacaagatatttaaggttgagggaataagttaatgatgctaagtaaataaagaccctgaattctttcccgtgagagattcaagaactcactcttggcatctgggataagaccctttttccggtaacaaacccctgccctggccctttcttccttctggaaaacttaaaaaaaaaataggcctcaaaaagactgcattaatctgagaaactgctgaatatggctactaagagaagctgggattttctgatttttaatgtcggtttcaaagagagcaggtatactttgcaggagggaaccatgctagctgcagaatcatggacgagctggaccacaagtttttacacagtgtgcatgcttttgttctcctgtcaacttctgttgttttcctgtcaacttctgttgttttcatcaaaagccatcaacccgcctcagccagggcatcataatgtacatgcaacagagtgttccaagaaactttcagctgagaccctaagaccctggacatgcaatgccagagtgaagtgtgaggaccacagctgtgcaggacatgcagaaaggaggggcagagagccaatgagatgatgtcccacgactcacctgtgtcagtggagaccgaaggagacttggagggtgcttttggagagaactgctgatgttttgtgagcctcactctctctgtgtgtggaaatgctggaggatgaaaccgtctaaactctcctgaagtcccgggaatggagttttaatggtaatgtgtgatgggatgtgtgttctcttatggtatgggagacacagaggactcacagaggactggcctctgcctcttgaccagggatcaggagagatgggaactgagctggtcagctgctcttcagagctggtcgaggagagatttctgctgtgctgggagggcctaaaaacatgcatggatggagcccaaggaccaggtgcagatcttatgcaagaatgaaccagggggtgacttaggtccaccaaaagactgcccagagggacaaaaggctatcagtgaaaagaatccacagatgaactgccagttcctcagggctgaggcaagatcttaattttgagtaggagcagagtgtattacctacaacaaggataccacagatgagaaaaccctagttttaaacctgctacatccaaagagagcaatgcaactctggcagtagcaaaaatgttgtgcctctcctttcctcactcctaatttcccatcccagagaagggtcagaaaccatcttctgcaagatgggaggaagggtagcagccagactgcaaaaagggagaagaaaccagctacctcttgctgttctcagtggcagactccccacctgcaacaggtcaggtctgttatggagagaaaagacaggacatttttaaattctaggtatagagcaataaaagaagaattcaaacaaagggatcaggaagaggattgctactaagaggcagagaaaccaatgaagccttttgccatctcacactggaaagacaaaaagtcatagaggcttgatttttataaggaaagagaagtgagaaactgacctcgatactttgttggacttgcctaaagacatttgctgaattctcgggctgtgctgggatggagattagaggccaaataaaaacctctggtaagtagtgc

SEQ ID NO: 17963 - protein, 121 aa, Homo sapiens
MATKRSWDFLIFNVGFKESRYTLQEGTMLAAESWTSWTTSFYTVCMLLFSCQLLLFSCQLLLFSSKAINPPQPGHHNVHATECSKKLSAETLRPWTCNARVKCEDHSCAGHAERRGREPMR

SEQ ID NO: 17964 - DNA, 2353 bp, Homo sapiens
attttatcagttcgcaaatctgaagtctcatactgttttctgtctctttaaaacacattcttctggtggcttgggttcattgtgcattcattggccactcttcttgcagcaaattttaaatcaatttaaaattaggtaaactttttatgatactataatatatatgacgttgaaatgacattggttctgagtctattaatttaaattttgggatcattacattcagaatgaaatgaaattgaccttgatactaactttgagagccaaaaaaatgaatgggtaaacaaagcctaagggtcatgttaattaatttaacaaaacacactattttcagtcctttgggcttgtacattttatagacaaaattagtatttattgatttggaagtgttcaattgagagtaaatgactctgtgttttgaaactaatacctttgcatttaaaatactgaagtattattttgttagttgaagtagatcttttcctgtgtagcatgatttaatgcagagcagttattcacttatacttctgaaaagccataatattgaaatttaaaatgaatagtcttactttaaggtcttttactttacattttactttaaaggtcgtttttagactttatgcactagtggtattgaaactaacctttaatatttgactaaattgcttgtgaatttttggaaactatgtttaatttttaaagacattgttatgtgaattatcttactaaattatcacttaagaactctctcatagcagtaatttcattaacacatatatatactaaccaatttgctaaatgaattgtcggttgtcctgcttaagtactagggccaagctttgaaatgacttaaagtgatctgaattttgattgagaaaataatctgtcttctatcgaatgtttgaacttttagtgatgagcctcagcaaagtttcaccctgcatgaagcagaacaggtgggggaaaattacaagaggggtctgtaccaaaaatggccccaggatattccattgaacaagtattgaccattatcttcctaggtgctacaactccatactagtcattacaattagtctttggtttcacagaaatgttactgcttcaaaggcttggcattaacagtgatgtcagcattcatactgccaacaatctgctggtcatacatggaagactgttaaagtgtggtctgtgcatcattgagcaattgttatgtagacacaaggcctgcttcactcaggatagcttgctcctctcgctgagaagagatacctgaagtctactaagtctactaaatgagatatatatgtgtatgtatatgcctatatatattattatatttactagtgtttgtgataatgttataaaaattaataagattgttttgttttgtatgaatgtacgacaaatcgagttgttcaatgtattgaatgaatgtcttactgtaagcatcagagctgtccaaccatgtgtaaatgtacctggtcttttgatcactgacactactttgctgttcaatctggaatcaactgacctggctctgccattgagaaataactaatttagaacaaaattgttaaattttaaaattgcatttctactagaaatagctttggagagttaattttaggtgcgaataacaggataaatgctatctgatcaagcattcatccgaaaaatgtttttgagaattcactttgtgcaaggcacagctgttggggctggtatatgtgtggacatgtttgatttgaaaaccttcgtggtgtctctgtgtgttattgatcatctgtgtcttttgcttaaaatggcattatttgtaacacaaacctaatatcatatatacaaatatactgtatgtagccaagaacactaaattggtaagacgctttagaaaatatacatttgaatttgaatatctaatgcctcaagcaaatttattagagtttcagatgaatatatatttttgtaactggcaagtaaatgagtagaacagagctttttgcctaaaaatatttttataagtactcatttacatagtattcattattttaaatgacaaaatatcaaattggttctataaatagtaattgttttgaatatatccatacttaacatcatatgaaatccaaaatttaatgataaatttcatctggatgtgttattataaaagtcatctttttttcctttgtaaaatatccatgtaacatagcttccattactccatattttatgtatggttaaaattatcaaagtgcattatgtattttatattgtttatttttgtctgcatgaaagattggaatagtaaccgtgtatgataaatgttaataataataaagtgaaatgtagtatgacc

SEQ ID NO: 17965 - DNA, 2374 bp, Homo sapiens
attgcatttaagttgtgccgaaatgagggaaagttttattattttgatgcccaaatatcagtaggtacagtcatatggacctcccaccataattctttatggagatttgttgaagattatttatacttgaggtaacacatacctgagtgctaacctctagtctgcattaaaaaagaatcaatgatcttcataaaaataattgagagccaagcaatattaggtctaaatttatatcctacactgtcactgtttttttttaaacttatactcaaacatacacaacagtaaaggaaattatatgaaaagaattataggaagctagatgaattgtttatctaagttgtcaatgcaaagcaaagtttgttttatctgtatcctgtattattttgtaacaaaccctgaacattttgtttcattcataaatatttcattaggtatctttgaaagataaggattttttaaaaatataactctaatgtcatttatattttcaaatatagctagtcagtgttcagattttcctgttagtctcaaaattctttcttatggtgtgtttattgtaatcagggtccaaataatatctatatattgcaattggttgatatgtctcaagtgttttttgatccatagttatccattctaattttctttcaaaatactaatcgaagaaactgggttgtcttatagtgcttcccatagtttggattttgtaaactatgtttccatgtttagcatgttattttttcacctatattctctgtaattgatagttagttttaaaagcttgattagctttaaattttactttttaacaagagcacctaatagacagtggtgtgtatttcagtcaagaagcatgaaaagtctctcttttgatgattagcagccatttaataattgctgtctagatttatcattaattgtgggctacaaattatgatactctaattctatcccacttttttacttattcactggaatatttctatgaattgatgtttccctataacaattatttggtcaccctttgaaggacaattcttacaagattagacaggataaatgctagattcttttcctttatttagctgttttcaaaataacgaattggaaatctagcatcctccaaagataactgatgaatttttaaagatattataaatacatggatttatatgcaaagtgttttaagttctttctttttaatttttatcaatgttcaaattgaattatcatttgtaggaacctcctcaagttcattcttgagtctttttgacatgatttcctaagtagttattgacagttttcttactttgtgttatgacaggatgtttatagtatgcatttcctaccccagacctgtaatctgccatttgtctagggagccctactttcttttagtaggaaatagtatttagaaatccatatgggtagtaggcatgttcttgctactggattggccattatttctaggcttttgtagtggacagaactgggaaataattttcttttttaagtgactttgatacatcttaaggaaaagaagaggaaaaagtcctatattgtttgtattaataatattgttctgagacaatctgtgtatgttgtgggataaaacaagtgaggaattatgttagtgtcattagtaatcacagttttcagcctgattaaaaggagacgcatatgtaagattgaagaagtgaaaaccatatagtcttgaatttaaatggaagtatcagtatgacctcagtttttctcccccacaacccctaccataagtcgccatttaaaagttttagtttgtatctatctatccatccatctatctgtctgtctctcatcttagataagtgttagcgcactgtacatactgttctccaccttgctgtttttaccttaaaatatactctggatattgtacatgcgctacagcatgcattctcaatgggagatactaccgcaagagggcaaatgttgactcttgaaaggtgaaaaaaaatcttgaatataacaatggtttttgacccttcaaagggccatagtacataaacagatatataatacatttgtggcattaaagtttcctaggggtggctgggtagcgtggctcatgcttataattccagcactttgggaggccaaggcgggtggaccacttgaggtcaggagctcaaaaccagcctggccaatatggtgaaaccctgtcttttactaaaaacacaaaaattagctgggtgtggtggtgcatacctgtattcctagctacttgggaggctgaggcacgagaattgcttgaacctgggaggtggaggttgcagtgagctgagattgcaccactacactccagcctaggcaacagagggagactctgtct

SEQ ID NO: 17966 - DNA, 2484 bp, Homo sapiens
tataattattttattcataaatggtgatagtccccagatctgtacacctttatcactccctgccgtagatatactttaggttagtatttctacattcgtggcaagcattttggtaacaccagtggttttcattgtgacttttatcactatcactaagaatgcaatttaagttgccttttggcatcatagatcatagaaactttctctctgaatcatacccatgtgtgaattttcattttatatgatagtgtagcatattagaagcatattttaaaacagagcctttgaatttttttcactatcaaaaatagtgcttttgtttagttaaaaattgtagtttttctttttttgtgtgtccaaactaacataaaaggagtggtcaaagaaggaaagaagaaaaatgagggaggatgtccgaaactgtatggcattttactccttctgaaagagaaatactgtacttgaatttttgagctatgcagacttatacctagattgttgtgtttctttgattcttaggagaaaagctttcttcctaataattcttgagaactttatattttgtttgaaaacagtttctatgtacataaaaagggtatttacccatttgtgagcacttaaaacactccacagagtcagacagtgggaaaggtcaccctttttttattcggcaggtatcaagttagaatgtatggaattgtgaataaaattatattttattttatgaaaatatttttatataataaaatttaaaaggctggtaagctaaaaaaatagtcttctttaatcctagtgtgttttccccaatttagtcttttctaaaatttatctgttttagagtagaaaatattatatcctgagaatcacagaatcgtctaaatatgtcttattcaactgaagtgattgtaagtctttattcttgtgctttggttaaatgaatgataatttagttgatagtgaaagttaatgtgtttttatatttttagagtgagggaaaaatactaaacttttgagagttttgttgtcgttgctggttttttaccatgtggtactaaattccactttgatacaaaatttaaattttgtaacttctcaaaatcacttaagattcttcagttttacctgtgcttcttgacatcgctcctataatgtatgttagttaactctgcatatggcaaatcttgtcttgaattatatcatttctctccctctctctctctctctctgtgtgtgtgtgtgtgtgtgtgtgtgtgtgtgtgtgtgtagtgtggggggtattgttatgagtaaaactttatcaaaacttggcctgaaaaagagataactcatgatccattgctatctttattactcaaaggctgttcattcccataataccagatccataatagttgtagtttttttgatgttgttgcccttaccttaattatttgtagttttagtaggccttgcctcagtttttcccacagaattccataattttaatgttgaactaacccatctatataggacttctaaaaactacgtcaggaatgtaaggttaaatgagaggtagaacttgtagtgtaataggtataatggtagctttcaaagttttatcttctcaaaacattgtcttagccagtgtatttctgagaactcagactgaagcacagaagtcacagtatgcttcttttatttaagcacacagattcatgacacaagtacttgttgaacaagtgttctcattgcagagagatctacttgaatataaaagggtcatcatactagattattaaaaaagaattggaaatcttgagttgtggaagaaatgtttatgctttggagatctaaaaaagttatgaatgtaggaattagataagtccagtttgttctgttaatataaaatggttagatatattaaactgcaagtagtatcagcttcaccataagcttgggccttcctccatcttgttttatttaagtctctttaaatgaaattttgttgtcattgtttcagcattcatgaactttcttactatcacaggttctactttaattttccttgccatatgtgtttccattttgtgggacattagccaccacaggaacacaagagttgtcagaagactcctgggtgtacagagcaaatcaagctgcatcagtattataggataccaaacagaatcctttctattaggaaataagaaatcagttaagtgttggctgggcgcggtggcttatgcctgtaatcccagcattttgggatgccaaggtgggcagaccatttgaggccaggagttctaaaccagtttggccaacatggcaaaaccccatctctactaaaaatataaaaattagctgggcatggtggtgcacacctgtaatcccagctacctgggaggcacgagaatcacttgaacccaggaggcggaggttgcagtgagccaaggttgtgccactgcactccagcctgggtgacaaagcgagactgtctcaaaaaac

SEQ ID NO: 17967 - DNA, 2123 bp, Homo sapiens
  CDS (1207)..(1545)
gtaattaatatgtgctactttgggtggtggttttctcttgagagcttctcagttatttctacaacactccctttctctgccccatcccaaccaagagttgatctctcagtatgcgtctttttaacctaggagagcacttagaggatttgctgccgtatctgtcactggtaagggcctgaagacagggcacgaatagtactctgtccttgtgtgtgtgtgtccttggtgcccaacatgagggctggtacagagtcagtccctgctgagtgtttgcgaggccactggaggagtggttcatctttgcaggtgggcaccttcccctccagccagaccatacccctgagggcccaaacataggtggcgcacagtcgctggcactcaatgatggccacagtgagatcacgtatatttgcaatctagcaaacaccaatatgaccccacagaatttactttaaaaactcacaaagtgctcttgtccctggcatactggtaagtgctctcttgtcctaaaaatgcctatggatacacatggaagttaagcagagaaagcaggtagctatcagatgactgtcaacagaggagttcttagaggcctgagagaaccatgggttataaatctcaaggactctatcaacttcagtatttcagtgccttctttattaaaaagtaagttcttaaatgatatgacttttgggacaccttactctgtgtagctgattaaagaatctaaggacttgccttgtgttgatagaatgattgttactcttttcccctaagatcaggtcaaagctgaatgtagaaatctcagttctaagaagctaattctgtcagttttagagagacagaaggtggactttgggattcagaaggtctatacaagggcctcaggttttataattacattcttaatatttcatgtttgtgcatgtaatttagcaggcctagtaaaggaatttttacaggttttggggaggtacaagataacatctagttttaaaaagcaaaacttattttgttttgtatttattcaaggttatcatagtgttaggtattgaaatgtttgacatatttaaaggtaattgagttgtaaataataaagctgacaataacaatatccccattgaccctttgcttcaaagaaaaataaaaaacacccagaatactatcagtttccttggtcttgtgaatgttttgatcagcagcaaaatgtcattctgtttccagctgttgctaggtgttgcaatgtctcagcctcagtctctgatttctccggtttccataactaactgcctacacttaaaagcgtttctttacctactcattttccctcaggcctttccatttttatcttgtatttttccactcttttggcagacctgcatgggcaaggacgtaacccttcacgtctcagcaagcaaccccgctatgctactgtaccagaagtttggattcaagactgaagaatatgtattagatttctatgataaatattacccattggagagtacagagtgtaaacacgcattctttctgaggctccggcgctgatgcgaatacagctcacagagaaacgcatgtgctattggagaacaggtctttgtggagatctaaaggcagtgattgatttcacagggagctctaatctctgtgattacatggtccttcaaactcccaaccaaagtgagaaaagcggcatgcagtgaaatgagcagtgagcagccctttagcaaaatcgccctccagtccttcctggagatgccttcagccagcatcccagactccacagttatttatgaatgatgtcgtgattctccctccacctgacagtttgtaagagtgaaagagcatctaacctgatgctcttggagagagataacctgtctgtcataacttaaaggatgagaaaatgtggtgtagctattaaagattcatgcagtcccaaaaggcactgtcctgggatgatgagagattataaggtgatttcataaaaggaatccaaccctgtgcccggccattgatgtgttgtcattgaatccaggaggatttctagggcactgaagttttgttgtttcttttgctgactttggttacagtcagaaaaaataaactagatgtttgtgtct

SEQ ID NO: 17968 - protein, 113 aa, Homo sapiens
MSFCFQLLLGVAMSQPQSLISPVSITNCLHLKAFLYLLIFPQAFPFLSCIFPLFWQTCMGKDVTLHVSASNPAMLLYQKFGFKTEEYVLDFYDKYYPLESTECKHAFFLRLRR

SEQ ID NO: 17969 - DNA, 2442 bp, Homo sapiens
  CDS (877)..(1215)
agctataaaggacattcttgggacaattgacgtttagatatggattgtggggttcgatcatagtatcatatcaatgcaaattgtcctagctctgataagcatatgtgtttatgtaagagagtgtccttgtttttagggaacaaacactgaaatatacaatagtagagaggcatcatgtctccaccatactctcagatggttcaggagaaatatgcgtgtgtctccgtacatattaatatagagagaatggtacagccagtgggacaagttgtaagcaattggtgaatctaggtaaagggtatatgggaaattgcatcaaaattaaaagttatgaaaatgggggagaaaacccagttcttctataaaaacagcctccagcctctccctccagcacaacctgtccccacacgtggggcacccggcacccatgctctggctcttgtctctctgggtcttagtcccacttagcaccccacacccaaaggtcatgttttcacagatgtgtaccctcaagactaaacacacacttgaggcattcatgtgactatacatatttatggaaaaagaaaattcttgggctcacaaaactgaacgctccagggtggactgtctcaggtggccttaatcggggtgctgacaacatccagacgagcacgcaggcttctctccctgccacagcggtgccattctccaacggactctgccgccgtggctgcaagatggtggcagcagctccaacccctgcacccttttgtggccaagtccagtgggaagaatgtgaggtcttcttccagaagcttctgcagattctcattagcttcagctgggtcatgtgtctgtcatccctgacctggcctctggggtcaggaaggcaccatggtcagactggccaggcctgagccccaagccccaagtccaacctcttcacaaagcacagctggctggggcagagcggtgcccccagtggaaaatcaagatgcagtttcagaaggatggaaatggatgctgggtggcgaaacggcagaaacccaccccggcccacgcccttgcctgtccaaaatccatgcacatgcttcttcccatgctccctctgggggaggtgtgctaggcagcacagatgtatgcacagctccccacagatgccaccctcatccttggaaactgtcaatgcccatgaatttgttacctcacgtagcaaaagagactttgcagatgtaattaaggctgctcgtcagttgaccttaaaatagggagagtgtcttggatcatccacatgggctcagtgggtcacacaagcccttaaaagcagagaactttccatggctggtggcagaggtagaaaggacattggaaagagacagcatgggggaaagggagatttaaagcttgggaaggaaggatggaaagcgcgactgctgctttgaaaacaaaggaagcctcaggccacgtagcaaagaaatggagaccccaggcctgcaatcataagcgactgaattctgctcacaaccctaatgagcacctccgggaaagagcccagcctgccaacacctcgattttgccttgtaagcccctaagcagaaaatacagttgaggcactctctgcccagactttcagtgcacagaaactgtgatgctaaatggatgttgcttgaagctgctcagttggtggcactttgttacagcagcaatggaaaatgaatactggaggtaacactgtctctcccagtgacaggtccggctccaggagctggaccccagtgaccgtgttacagtctaggcttaaggcccccctcactcccaacctcacctgtgcagagagggaaggaaaagtgccatgtcaacccccagtaagggaaaggaggatgggagacccctagcctgcagcacatccaaagccctgctagaaaaatactgagaaatgttagacattgagctaccacaggacccaggattacaactcctgggtatctacccaaggcaaatgaaaacatgtgtccccagaaaaatttgcacacaatgttcatagcagcattatttataataattgagaaatgggaatagcccaaatgcccatcagctaatgaatagataaacaaaatatggcatagctatacaatggaatattatatggccctaaaaagtaatgaagaagccagacataaaaggctttgtgtgattccatttccagacagaaagcagattagtagttgctgcaggctggcgggagggaggaatggaaagtggctgctaacaggaacacggtttattctgggggcaatgaaagtgttctaaacttagatgtgatgatggatgtacaactgcgtgaatatactaaaaagcattgaatggcattgaatggttcatcttaaatgggtgaattttatagtgcgtgaattatatagataaagatgtaaaagatttgtttaacatcaataaagatgt

SEQ ID NO: 17970 - protein, 113 aa, Homo sapiens [sequence omitted]

SEQ ID NO: 17971 - DNA, 2155 bp, Homo sapiens
  CDS (1660)..(2154)
ctaacatttggatcagagatcccctcactaaaacagcctgagagcctggctccttccaggacgagtgccccaacctgttctctagctgctggaaaagacccctctgtttcttaaaagcctgttaagttccttcaggctagtagctacaccttgttgcatacttccttggaaatagagagtgctttcaaattaatttctcacttattgctattagtggtcccaagaaaaagagatgaaattgcagcatcttgtaatggtgagttttttaggtctaggagagaggtactgtcatctttgtttacttgctgagagacgacagaaatgtgtagttgtggggtatgaaggtaaagtcagtgattatagctaaaaagcaaacgtcatttaaggtcactggtatttttggatgttggaatgcaggttttgttttacatagaaattttccctctaattattttaccatcttatgttctggaaaatgattccatgttgctttaaattcatctttcagtgaagttcttatttcttaccaaaaaatgacagctttgtcatttcttacatcgttttttcctttctgttgccaaatgccctccagactttccatgttggtgcggtaagctagacatttttagtttgtagtgattgttttcgtttgtgtttgtatgtttttgtgcccatagtcacttctgtaatgttcgtttctgagtttcctttggggggattaacctgccactgaagtgtcagcttccctgtcatgggactgtccttggaatgacaggttttccttccaccataggatctgccactgtgaaggagatgatgagagccccctgatcaccccctgccactgcacaggaagcctccacttcgtgcaccaggcctgcctgcagcagtggatcaagagctccgacacgcgctgctgcgagctctgcaagtatgagttcatcatggagaccaagctgaagccactgagaaaatgggagaagttgcagatgacgtccagcgagcgcaggaagatcatgtgctcagtgacattccacgtcattgccatcacatgtgtggtctggtccttgtatgtgctcattgaccgtactgctgaggagatcaagcaggggcaggcaacaggaatcctagaatggcccttttggactaaattggtggttgtggccatcggcttcaccggaggacttctttttatgtatgttcagtgtaaagtgtatgtgcaattgtggaagagactcaaggcctataatagagtgatctatgttcaaaactgtccagaaacaagcaaaaagaatatttttgaaaaatctccactaacagagcccaactttgaaaataaacatggatatggaatctgtcattccgacacaaactcttcttgttgcacagagcctgaagacactggagcagaaatcattcacgtctgattgtgtgcgggttgtcattttcctggacatccatgaagagctgaaggaaattgtttactgccaattgtatacctttcttatgtcctttaatagcatagactggacaggtgactatttatagtggcttctctttttctaaaccctccttagtctcctagaaaaccttcctgtgggccaggcatgcctgggtcctgcctctgcctggcagctctgtgggaaagtggaagaccccatgatgacatcatggggagccagcagagttcctgcccatggtcttgagctgaatgagagaataaaatgccaatcccaagggaagaggaggagcaggggtgcccaggccctgatacccagccgcctccagcttgcagtggtccccagcctggagcagagcattggggagtgtctagccatgacgagaagattccctctgcatcacggcgaaccccaggagatggtattgaaacagacccccaaacacagactcctgcctgccctctgccgatgctgcctcctccatgctcttgagcaggtggagccatggtgctctgtggtggcgcatgattcactgagcaaacagcactttacagaagaaaatctttattttgtaatatgtgtgtccagcgggattgacactcaaaaaaagtctcacttagaaatcttcccttccttacctttgtatctcctttacatcatgagagatcaaaaatccattttgccttacatatgct

SEQ ID NO: 17972 - protein, 165 aa, Homo sapiens [sequence omitted]

SEQ ID NO: 17973 - DNA, 1855 bp, Homo sapiens
tgctttgctgtctcagtcaggtttctgtttttctgtcctccttgcctttcttcccgttttgcttcctgttttccttcttccttcccgttttccttcttccttccctgcctcccttcctttgactgtggatggaagaaagtgtgcagtttttagggattttacttaggttcgtctttagttttcctcagtaagatagttgttttttgatacctgagtttgggattaattcatatcaaattcaggtatttgtatattactcttgatttttgtctgaaattcactttgctatgacagcctagtagttgggtcttcactccttaagtatatgtttttcccatggtgaaaatacatgaactttagttctagtagtgagcattcaaaggtccgtgatagggcttgtcacagagagagagaaatcatttatccctattgtgctggttatcatagaagagactgcctcaccactttatagaaccaatttgcaaactaaaacactgtttggagaaggtacaaactacctttcaaaaaggctacaggaaacattttatgagcagcaaatattaggaagagagcggatacagaatttagtgcctttgagaagaatataattaagtggaattaagaggggttagaaaaaaggcaatttagaaaaatattcttgtaaaactttattgtttctatatgtgaaacagaagattagacaaattccttactcttaagtatttttttaagctgaaaaaaaattattttgagcaaataaccaataagagacatttgtctattttatattaatttaaatttgttagctctaggtttcaataagtcatgattggctagaatccattttagctaccatctgaagatatggtaaagataatttagtaaaacaaaagttcatatttgccatgatttcagatatgtttgtcatggggacaatattagagttttagagatactataaaatagcttgaatttctttctgcactacatacttttgatagaaacacatttactacattgataagatgttatgtcacacctgtgaaaatggagttggcattcagatatgctatagttagagcccagctcatctgcaagtatagtcttcccatgatgcatacaaagataacttactgatgtcgataggaggtccatacatatatccccaggaaaaatgacagattattctggaggaagatgaccttcattttatggttatgtgtgtgtgtctgtgtgtctttggaaaaatatatataattttttcaaataggaagccaacatatcaagtgatgaattaaagtatgctgcagaatatatattctaaaactacaaaaaagtcactgaatatcaaaatgatacagcttatacatatagttactgtgacaagtgacagactgctagttcagaattcaaaaatcctttcctagtttgtgagataatgggctaaattccttctgcctgccactggggcaaagcaaattgctttagtttttgatgagagttcttagaagtttgttggtattccttcatccacagcatccattgttgaaataaccattttcagttgtgatgccttaactaagaagccaattgttagcctgaaatgcaatcttggtagccagtttcaatgaagctagagattagtcagaaaaagttagctgttgggctttagaaagggattttgagtcctgtcatttctacttgggagcattttggagcagattagtctttcagtataaaaacaagtggctacctgatggaaacttttcttacccttatagggaaactgagcacaagctgaatgatattgtctgctgcaaaaaaaaacaaacaaaaaaaaaacaaaacaaaaaac

SEQ ID NO: 17974 - DNA, 2651 bp, Homo sapiens
  CDS (541)..(1731)
aggaataaaaccacagaagaaaatggagagaaggggactgaaatattcagagcttctgcagtgattcccagcaaggacaaagccgcctttttcctgagttatgaggagcttctgcagaggcgcctgggcaagtacgagcacagcatcagcgtgcggccccagcagctgtccgggaggctgagcgtggacgtgaatatcctggagagcgcgggcatcgcatccctggaggtgctgccgcttcacaacagcaggcagaggggcagtgggcgcggggaagatgattctgggcctcccccatctactgtcattaaccaaaatgaaacatttgccaacataatttttaaacctactgtagtacaacaagccaggattgcccagaatggaattttgggagactttatcattagatatgacgtcaatagagaacagagcattggggacatccaggttctaaatggctattttgtgcactactttgctcctaaagaccttcctcctttacccaagaatgtggtattcgtgcttgacagcagtgcttctatggtgggaaccaaactccggcagaccaaggatgccctcttcacaattctccatgacctccgaccccaggaccgtttcagtatcattggattttccaaccggatcaaagtatggaaggaccacttgatatcagtcactccagacagcatcagggatgggaaagtgtacattcaccatatgtcacccactggaggcacagacatcaacggggccctgcagagggccatcaggctcctcaacaagtacgtggcccacagtggcattggagaccggagcgtgtccctcatcgtcttcctgacggatgggaagcccacggtcggggagacgcacaccctcaagatcctcaacaacacccgagaggccgcccgaggccaagtctgcatcttcaccattggcatcggcaacgacgtggacttcaggctgctggagaaactgtcgctggagaactgtggcctcacacggcgcgtgcacgaggaggaggacgcaggctcgcagctcatcgggttctacgatgaaatcaggaccccgctcctctctgacatccgcatcgattatccccccagctcagtggtgcaggccaccaagaccctgttccccaactacttcaacggctcggagatcatcattgcggggaagctggtggacaggaagctggatcacctgcacgtggaggtcaccgccagcaacagtaagaaattcatcatcctgaagacagatgtgcctgtgcggcctcagaaggcagggaaagatgtcacaggaagccccaggcctggaggcgatggagagggggaccccaaccacaccgagcgtctctggagctacctcaccacaaaggagctgctgagctcctggctgcaaagtgacgatgaaccggagaaggagcggctgcggcagcgggcccaggccctggctgtgagctaccgcttcctcactcccttcacctccatgaagctgagggggccggtcccacgcatggacggcctggaggaggcccacggcatgtcggctgccatgggacccgaaccggtggtgcagagcgtgcgaggagctggcacgcagccaggacctttgctcaagaagccataccagccaagaattaaaatctctaaaacatcagttcgtggcttcagaagggaagaacagattttttcaaatgtcatgaaatttccttttgccagcatcctggaactataataaaaattcagaggaaagaacaacctatgactgggttttgttctgctgtgtccagatcatcctctggaagtcttgattgttgcctttctgctgctgtgctgtacgtgcaagttcctaaagccagggacatcccggagatgagctgtggatatagagtccgcacagcctgcgggagacagaatgtaattccttccaacacacacacacaggctttatggaatgccagaaaagcttcctcttggatgctgcctggagtaatgactttttgaccctcccctcttttttggagcaagcactatctttccttgtaaaggaatttggacaatttgagtagaaatggtgtggtatgtgcacatagaaactctcagaaaactgtcagatgagctagacagttgtcctctatctccatgggtcccgcatcccaaggatcgaaccaacaacagatcaaaaatacgtgaaaaaggaattgcatctgtattgaatgtgtacggactttttttcttgtctttgttccttaaacaatgtagtgtaacaactatttacatcgcatctcctttgcattcattattataagtaaactagagatgatttaaagtgtatagaaaggctgcgtgcagtggctaatgtctgtaatcccagcactttgagaggccgaggcaggtggatcacctgaggtcaggagttcgagaccagcctggccaacgtggtgaaaccccatctctactaaaaatacaataattagctgggcatggtggtgcacgcctgtaatcccagctattcgggaggctgaggcaggagaatcgcttgaacccaggaggcagagattgcagtgaaccgagattgcaccattgcactccagcctgggtgacagagtgaacctccgtctcaaaaacaaaataaataaataagaataaatt

SEQ ID NO: 17975 - protein, 397 aa, Homo sapiens [sequence omitted]

SEQ ID NO: 17976 - DNA, 2774 bp, Homo sapiens
  CDS (31)..(1308)
tgcagaagactttcagtcgtttttgctggaatgattgagcttacattttttattctttccgcattcaaacttagagacactcacctctggtattttgtaatacctggcttttccatttttggaattttctggatgatttgtcatattatttttcttttaactctttggggattccataccaaattaaatgactgccataaagtatattttactcccaggacagattacaatagccttgatagaatcatggcatccaaagggatgcgccatttttgcttgatttcagagcagttggtgttctttagtcttcttgcaacagcgattttgggagcagtttcctggcagccaacaaatggaattttcttgagcatgtttctaatcgttttgccattggaatccatggctcatgggctcttccatgaattgggtaactgtttaggaggaacatctgttggatatgctattgtgattcccaccaacttctgcagtcctgatggtcagccaacactgcttcccccagaacatgtacaggagttaaatttgaggtctactggcatgctcaatgctatccaaagattttttgcatatcatatgattgagacctatggatgtgactattccacaagtggactgtcatttgatactctgcattccaaactaaaagctttcctcgaacttcggacagtggatggacccagacatgatacgtatattttgtattacagtgggcacacccatggtacaggagagtgggctctagcaggtggagatacactacgccttgacacacttatagaatggtggagagaaaagaatggttccttttgttcccggcttattatcgtattagacagcgaaaattcaaccccttgggtgaaagaagtgaggaaaattaatgaccagtatattgcggtgcaaggagcagagttgataaaagcagtagatattgaagaagctgacccgccacagctaggtgactttacaaaagactgggtagaatataactgcaactccagtaataacatctgctggactgaaaagggacgcacagtgaaagcagtatatggtgtgtcaaaacggtggagtgactacactctgcatttgccaacgggaagcgatgtggccaagcactggatgttacactttcctcgtattacatatcccctagtgcatttggcaaattggttatgcggtctgaaccttttttggatctgcaaaacttgttttaggtgcttgaaaagattaaaaatgagttggtttcttcctactgtgctggacacaggacaaggcttcaaacttgtcaaatcttaatttggaccccaaagcgggatattaataagcactcatactaccaattatcactaacttgccattttttgtatgctgtatttttatttgtggaaaataccttgctacttctgtagctgctctcactttgtcttttcttaagtaattatggtatatataaggcgttgggaaaaaacattttataatgaaagtatgtagggagtcaaatgcttactgtaaatgcataagagacgttaaaaataacactgcactttcaggaatgtttgcttatggtcctgattagaaagaaacagttgtctatgctctgcaatggtcaatgatgaattactaatgccttattttctaggcatataataatagtttagagaatgtagaccagataaatttgtttactgttttaagaaaactaccagtttacttacagaagattcttttttccaaacagtaggtttcatccaagaccatttgaagagctgcaaactctttctcttagaaaagaaagagggcagcctaaaataaacgcaaaatttgcttatactccatcacattcagatgtcttggttgtgacttattaccagtgtggcagagaacccaagttacattttagatcaaaatattctttatgtaggtattgttaaaaggctagagcctacaagttgctcttccatgcgttggtcagggggccctgaaaacactggtaatattaagagtctttctcagggtaacttaatgttttcttaatgaacagtgtttccagctacaaattcttccaataaattgtcttcctttttgaaaagtactctcatagaagaaatttagcaatttctcgttgactgactcagtctattttaagtattcagaaaagattttgatccccattgagttaatgctctgccttgaaaattatttttctgatccttgttagtgataacattttttttctactgaaggtcagaggataggaaacaagtatttctcttctggtatacatgtaatgtattctgtaaaaaagtattcatattggcaattttagttaggcataatattgtggttgtaatttttaaaacttagtgttttgtctgattaaagcaggcactgatcagggtatctcctaagaggtaattcacttcttattcctttccaataattattacattctaaattttcatctatgagaaataacaaacaagaagggaatagaattaaattggggtataatctaatcttcattgtttaaatggtttgccttctcaccattgaagccatttttttatagcctcagaaagaggaaataatgcctccaccattttctacctggtgacttgaaaattgaacttttaagttaggaagaagttagagtcagggaacttgtataccactatctatgcagcattgttatagtctgattatttctgtgttttgaatatgattttcctaatgctctaaataaaattttgttaaaaatt

SEQ ID NO: 17977 - protein, 426 aa, Homo sapiens
MIELTFFILSAFKLRDTHLWYFVIPGFSIFGIFWMICHIIFLLTLWGFHTKLNDCHKVYFTPRTDYNSLDRIMASKGMRHFCLISEQLVFFSLLATAILGAVSWQPTNGIFLSMFLIVLPLESMAHGLFHELGNCLGGTSVGYAIVIPTNFCSPDGQPTLLPPEHVQELNLRSTGMLNAIQRFFAYHMIETYGCDYSTSGLSFDTLHSKLKAFLELRTVDGPRHDTYILYYSGHTHGTGEWALAGGDTLRLDTLIEWWREKNGSFCSRLIIVLDSENSTPWVKEVRKINDQYIAVQGAELIKAVDIEEADPPQLGDFTKDWVEYNCNSSNNICWTEKGRTVKAVYGVSKRWSDYTLHLPTGSDVAKHWMLHFPRITYPLVHLANWLCGLNLFWICKTCFRCLKRLKMSWFLPTVLDTGQGFKLVKS

SEQ ID NO: 17978 - DNA, 2472 bp, Homo sapiens
gagacagagtttcgttcttgtctctcaggctgcagtgcaacagcatgatcttggctcactgcaaccttcccctcccgggttcaagctattctcgtgcctcagcctcccaagtagctgggattacaggtacccgccatcacgcccggctaatttttgtatttttagtagagacggggtttcaccatgttggccaggctggtctcgaactcctgacctcaggtgatctacctgccttggcctcccaaagtactgggattacaggcaggagccaccacgcccggagaccaggttcttgacctaagtctgtaattaactgattcgggctaagccacttagtatctctgggctttagttataaaatgagtaaacaggactcaagtttccttctggctccaaatggctatactttaaatttatttggttattcacaaatagcaaaagaacaaataaagtctttatcatttactatcagtaaagaggggcaaatccttgctgccacctttgcgtaaaagcgaggtacagcagaacatatgacaaggatgactacaattgtcaatcccattaattcagaggaaatcaaagtatgaactacttctgaggcagcaaaatggagaggcatttgtaattagatgaaagtattacttcattggtaaaggcagttcacgtggcaggtgagaagaatggaaaaaggacagctgttaatataagtgggtggaaaggaagtaacaggaaagagaagggtgacagatacgagagaaagtgactacaagaaaaattttggaaagagctcattaatacctataactctttgaaataattttattccattacctgactgtttgtcctttaaagctgttttacacatttcaatgcgggcagagtgataaggaacatagcgatcctgtagggatcccactagcacaacatttttgaaataatgaagccctgctttgttactaagcttatataaaaaagtttggcgagggtctgagtgatctcgacatgtcagctgcaaaagcgaacctgattttttccatttctgcataaaccagagacctgtattaacaagagcactgctgttgtagagtgtaccaaggtgaggtccagaaagagacagaaaggtatgaagtttgttgaggtaatatttaaaccttggccttgtaagcactgaacgaattattaaattgcccaacgaatgtccaataaagcttatttttgagactgttagactatatatctgaatatactgtattatctcatccaaaagacgatcagtcatgctatcaaaatcagcaaaagtatcattctgatttctctcagacataagaaaatcaattcttcccccaggcaatccaagttcaatgtaagtttttactaatcggagatctgcactgtttccatctaaaccgtgcacacagacaatcagatgtactccatcttcagaaccatcctcttcttctacactaaaataaggtactgaggatgccagcagaggaacttcactgtacatgaacccaggaagttttagtagcttcagttcttcttttgcctgaaggaaggcttgtatttgaggttttggtgaactttcataccaggaaatcgaagaagtgaagttgtaagaagtactgcttggctgctttgtaatggcatcaaatttacttttggaagaatatttaacattacaaggagactctcgtggtgcagacgggaaggacaaacaaccagaagtacagacagtaggcatgtttataccatctctcagatagtcactgtttattttttcagattttgtaagtctttcttccattagttcatctctgcttgtatagtgagcatttattgttccatccaaagctgaataatctgtttcttcatagtacccattttgaaccatttgttgatcctgctcttcctcctcatcctctttatcctgttcctgctgaagattactaatctctttttcagaagtttccttctgagggctaagtgcattgctgtagctaacagcacatgtgtcagaaatatccgtactgctttgagaaccaaaataattttccacaagcccttgctttactatatcagtactggctgaaaaaggatcacttgtacccagatgagtttcactttcaactgtagggatttctgaatacatctgtgtgagatttaatacatcactattttttttcatagttctatcttcactaacatctgtattactagaaatggaacctgaaatgacacaaggagtgcctaaacaaatcagttttgaatttaatgtaattgctgtccctgtagagttattagatttatcaggactctggaagcctttacacatagtatccaagttaggtttggagctgcaactacttttcacatcactggaagtctcttcatctgaaaaaacaaattgtaaagggtctttaatgcttgaatttaaggaatgtattgctacagtttcattgtccaagttca

SEQ ID NO: 17979 - DNA, 1438 bp, Homo sapiens
atgttataaagccatagtaatcaaaactgtggtattggagaaaggatacatagatcatcagaacagagcagagcagagcatccataaatatgcacacataaatatagtctaccaaaatttacaatagtgcaaaggtaattcatttgagaaagtagtcttttcaacaaatggtgatgaaacacttggatatccatatgcataaaatgaaacttgatacacattttatgtctcatacacaaataagtcatgaacctaaatgtaaaacataaaactatacaacttctagagcaatggtctcaagtggtagtaacttttgtctccaagaaacaaagtatagagacatttttgactgtcagtacttggggggaggagatcactggcatctaatgggtgcagaccagggatgtcactaaatatcccacaatgcacagcacagtcaccatcacacacacgaaaatgccaatttctagtctggataaatataccatggttatgtaactatctcttattagaggaacagaaacttggtaaagagtgtatgggaatgctttttactccctttgcaactcttcagggcaatagactatacttcaaagtctaacatttaataatttcctattctatttctgtgaaggcatcatgtactgtagcagatgtattctgctttgatgtcttgcaaaatcactttgattcttcaattaaatttattaaatgtgtaaatattgccagtcatgtattatatgttaaaaatttgagaccaataaaatattttcaaatgtctcctctttataggagctttcctgtttcatctaacctaaaataccacctttctccaccaatctttctgatgttctccccatggaacttttttctgactgttttcccttttctagggtatatgctccatgaaggcagggactttgttgtacctccagggccagaactggcacactagagatggatgcttaataaatatttgttgagtgaatgaattatatgtatttgtgttgcgtcttcccaataagtggtctttattcaaacgttggagcttcagtaaacccctatttggctgtgaacagattagtctcaatcctagtatttaatttaccccgagtgaaagtaacacctttctcttaagcagcaagatgcattaatctttacgttaagatttttcatggcaaaaaacaaatccattttttttcttccctttcttcagctctggggatgccaggcaagaaggagatgacggggtagataatggttactttgtaattttctggaagatcatgctggttctactagaagacttttacctcacatgattggatgctcctcaagctgaacttcttccatttgtgatagtatttggaccatttctagaatatgttataagatttttataagattgtctttccaattaaagttttaggttaaagtt

SEQ ID NO: 17980 - DNA, 1942 bp, Homo sapiens
ctaaagaaataatagctgaaaacgtcccaaatctgggaagtgatatcaatattcatgtacaagaagttgtatgcaggttcttttcactttgagaaacagaaggtgaaactcaaactggcttaagtaattttaaaaaaatgtattggttcaagtgacttaaaaaccacactggttccaggagcaggttgatagtacctcaaagatgtcaccatctcttggatgtgctttccctgttcattcctaagcttcatgcagtttcagggtggtgaccagaagtttacatcttatcttccctctcccctgtgtttgactggaacagaaaaaagagtgtcttattccctagcactttggacaaaagctctggacatgatggccatttgtgacagggaagtagaataccattatttgaccagtctgggacatctgaattcagggctagagaacacagacaggggctaatggggtgcggggtagggggaaggaaaccccaaaataggaagctagattgctgttactggaaggggaatgtgcacttcagcaagatgaaatcagtatgcaattcagctcccacatatgcagaactgtaaaaaagggagctgcatttggtttcttgggacctccgcctggataaactgagttcgggggttcagcatgcatctaacaagatgctcctattcccagcaaattttttcttggtgctccttgctatctccttttgagctattttcatccactcagaacctggtctgttccctccattaccatatcttaggccacaggtgtattcatgacacccaggtgcccctcttcagagagatggagagagtgggagcttttcaaaaggaatttgtactaaaaatggtaagtggcaatttgaaaaacaaacaaacgaatgaagcaaagtaacaaaaaatactgtactcaaaatgcttttaacaggacatgttttatacagcatgtgctttaagccaaattaagtaaagcctagccacagattagatcccagaaggtgagactagcaggaggtatttaaaacacctgctagttctccctctttatcccatagatgggacactgaggcccaggaaagggaacaccttgacatcagcatcaatgtcaatgccaatgtcaatgtcagagctgggcctgagaccaacatcttctacttgcagacatgatgcctctgctgcgtcagtctcctaaagttatctttcacaaggtccactggtgttaaaacagctcattttttattttaaaagtatttttaagtaatctatatgaacaaataatgaattctcatgattcccaaatgaaaaattaaacaaggaatagcatgcccccatttccctaccataggccacatttaaaaaattagtttcttgtgtattcttccagggatattttgtgtgtataaaaacaattcagtgacatactctcccgccattttaaatattatagcatactatacactctgctttgtaccttgcttatttcaaaatgtaaatcttggaaaatctttcatatgactctacaaacagtatcctcattcatttttacagctgtaaagtatctccttgcatgatgggaataacagtttatttagctggttctctagtggtgtcaatttggttatttttgatactgtgctactgtaaacaatgctgcaatcaataactttatacacatgtcatttcatgtgattgtgattatatatgtaggaaaaattccacaaaagtgaaatagcagaatactaagggcatatgcatttgttgttttgatagacgctgaatggcccttcatgatgctcttgtcaatgtattctcctacaatgcggagagtgcctttttcctcaggccctccccaacacagccagttactaatgttgtctttgagtgtttaatagttgtgaggtggtatctcaatgttttaaaatttaaactac

SEQ ID NO: 17981 - DNA, 1767 bp, Homo sapiens
atttttctgtccaggaaggaccccagaatgttctgagtcagaaagacagtgaatcctctcctctgggtcagtggggagggagagagagagaattcagagggaagaaagcagaaaaagatgtcacaaaattgcctaatcaaaagttaccatgatgcctgcctcatctggaactgggctcccagtctctagtgagggagacatagtccagtccagtcccagtctccagtctgagccaaagcagaacaaagctggacactgcagcctggcatccaacgaacattttgtcactttccccagggtgggagcatttgaactttggatgtgaaggaaacatggtaaccactgcagtaagaaaagcaactgctggagaaaatggcactttcttccccaaatttgtttttacactcatgtctaaggaacaccttagaaaccacattaacatctttcagcaaaaggaaattctgcctgttgatcttttgctgtgagacaaacttgaaaagttcacagacactgcctttctctgaaaactgcccttacctctttgttataattcacttcaagatctgttgagtaggaacatcaaaaatgcaaataaaaagtttcaagtattatgaaagaatgcaataaaactgcctttaaaaaaaatctcaagatggaggtggagatcctgtgatcatgaaatctgaataggctgctcctgtgtccttcagtggtgatggctctgaaacccttgtgttttatgaacttcatgccctggtcttcaaacgaattcagtgcaggccaagaagcacagtttggcctgggttggatgctctatattttcaaagagtgaaatgccttgagacacagcctttgctatagtacctgctaaaacttcaacgtgtggataaatatagcttacattgaatcgaatagactcagcgagagtggcagtgaaggatgccctctggaagattcgaggtgctgaggccaaagggctagcaaggaaagagcgtgcgggtcaggcccttcagcctggtggaagagcaggcagggagggtcctatggttcctgggaggacccgaagcatgatcgcctgtcaagagccaagagccctaatggccagcgccggggaaagggcccccgaggggcagtcagcagccctgcaggggcggcgtccacactcctgtgtggcacgggacactcgtggctccaccagctcctgaagcttctgggagccagagagtcagcagggagaatcccacacacgggcactcagttcctggaaaccctgcatgagatgcgggatcccgaagccagattgggggtccctagggtcttggcttcggggctaggcgcggaaccgtaaatgagggttcagcctgtctgcctgagggattgtgtttcctgccgtatttatcactcaaattttgaaaagcagtcgaatttgttatattggaaaccctagtagttaaaaacagcagatggtaacatttcaggaatatgtcttgtgccaggaactgtgaggggtttctgtagtgtagtgattacatgttcgcttcacatgtgaaaggtctcaggtttgggacctttcatcatcaacatgatgaaaccccgtctccagtaaaaatacaaaaattagccaggcgtggtggtgcatgcctgtaatcccagctcctcgggaggctgaggcaggagaattgcttaattccaagaggtagatgttgcagtgagctgagattgtgccattgcactccagcctaggcagcaagagtgagactacgtctt

SEQ ID NO: 17982 - DNA, 1972 bp, Homo sapiens
  CDS (666)..(1487)
tccaggcgcaggccgaggccttcgcgcgccagatctacgggcccgagtgcaccttcaaggccagccacggctggttctggcgctggcagaagcgccacggcatctccagccagcgcttctacggcgaggccgggcccccagccccgagccccgcgcccggcccgcccgtcaaggaggagcccgcgctgccctccggcgccggccccctgcccgaccgcgccccggccccgccgcccccggccgagggcggctacggggacgagcagatttacagcgccagcgtcaccggcctctactggaagctgcttccggagcaggctgcgcccccgggcgcaggggaccccggggcggggggctgtggccggcgctggcggggcgaccgcgtaacggtgctgctggccgcaaacctgaccggcagccacaagctgaagccgctggtcatcgggcggctgccggacccgcccagcctgcgccaccacaaccaggacaagttcccggcctcctaccgctacagccccgacgcctggctcagccgcccgctgctgcggggctggttctttgaggaatttgtcccaggcgtcaaacgctacctgcgccgaagctgcctgcagcagaaggccgtgctgctggtggcccacccgccctgcccaagcccagctgccagtatgcccgccctggacagcgaggatgcccccgtgcggtgcaggccggagcccctcggtcccccggaggagctgcagacaccggatggcgctgtgcgggtgctgttcctgtccaaaggcagcagccgggcacatatccccgcaccgctggagcagggcgtggtggccgccttcaaacagctgtacaagcgcgagctgctgcgactggctgtgtcctgcgccagcggctccccgctgggcttcatgcgcagcttcatgctcaaggacatgctctacctggctggcctctcctgggacctggtgcaggcgggcagcattgagcgctgctggctgctgggcctgcgggctgccttcgagccccggcccggcgaggacagtgctgggcagccggcccaggccgaggaagccgccgagcacagcagggtgctcagcgacctcacccacctggcggctctggcctacaagtgcctggctccggaggaggttgcggagtggctgcacctggacgatgatgggggtccgcccgagggctgcagggaggaggtgggcccagccctgccccctgcagcgcctccggccccagccagtctgccctctgccattgggggcggagaggacgaggaggaggccaccgactatggagggacctcagtgccgactgccggggaggccgtgcgggggctagaaacagctctgcggtggctggagaaccaggaccccagagaggtggggccactgaggctggtgcagttgcgctcactcatcagcatggcccggaggctggggggcatcgggcataccccagcaggcccctatgacggtgtgtgaccaggccagcccagtgacctttctcctgctgcacttggagggaggggacatacacacagtctcccatctctcctcccctccccctggggtggcccaccgcatgggtacagggggttccaggaatccaaatccagcatggcttggaggagctctgttggtgagaggtcgccctgcctcactggcaccctgggggcacagctggaagagaggcctggcccatgctcctctcagggcaggcacatgtacggggcatacaaggcacagcgcctgttggaacaggtggctgtgttcctgctctggcccccgtgcggctgggcctccgcccctgcaccagtcacatgcactggacgagggccgaaactcctgtctgctatcgagccctggtgctatgtggccccggagccacagcacaatcatctcagtggcgaagcacaccacttgattctatttttttttaacacattaaatctgtttttaaagat

SEQ ID NO: 17983 - protein, 274 aa, Homo sapiens [sequence omitted]

SEQ ID NO: 17984 - DNA, 2061 bp, Homo sapiens
acgattcgacagcgcatccttcgacttttccatgtggccacacacgcttcagagccctaggtgtcagtgatcaaacttcttttccattcagagtcctctgattcagattttaatgttaacattttggaagacagtattcagaaaaaaaatttccttaataaaaatacaactcagatccttcaaatatgaaactggttggggaatctccattttttcaatattattttcttctttgttttcttgctacatataattattaataccctgactaggttgtggttggagggttattacttttcattttaccatgcagtccaaatctaaactgcttctactgatggtttacagcattctgagataagaatggtacatctagagaacatttgccaaaggcctaagcacggcaaaggaaaataaacacagaatataataaaatgagataatctagcttaaaactataacttcctcttcagaactcccaaccacattggatctcagaaaaatgctgtcttcaaaatgacttctacagagaagaaataatttttcctctggacactagcacttaaggggaagattggaagtaaagccttgaaaagagtacatttacctacgttaatgaaagttgacacactgttctgagagttttcacagcatatggaccctgtttttcctatttaattttcttatcaaccctttaattaggcaaagatattattagtaccctcattgtagccatgggaaaattgatgttcagtggggatcagtgaattaaatggggtcatacaagtataaaaattaaaaaaaaaggacttcatgcccaatctcatatgatgtggaagaactgttagagagaccaacagggtagtgggttagagatttccagagtcttacattttctagaggaggtatttaatttcttctcactcatccagtgttgtatttaggaatttcctggcaacagaactcatggctttaatcccactagctattgcttattgtcctggtccaattgccaattacctgtgtcttggaagaagtgatttctaggttcaccattatggaagattcttattcagaaagtctgcatagggcttatagcaagttatttatttttaaaagttccataggtgattctgataggcagtgaggttagggagccaccagttatgatgggaagtatggaatggcaggtcttgaagataacattggccttttgagtgtgactcgtagctggaaagtgagggaatcttcaggaccatgctttatttggggctttgtgcagtatggaacagggactttgagaccaggaaagcaatctgacttaggcatgggaatcaggcatttttgcttctgaggggctattaccaagggttaataggtttcatcttcaacaggatatgacaacagtgttaaccaagaaactcaaattacaaatactaaaacatgtgatcatatatgtggtaagtttcattttctttttcaatcctcaggttccctgatatggattcctataacatgctttcatccccttttgtaatggatatcatatttggaaatgcctatttaatacttgtatttgctgctggactgtaagcccatgagggcactgtttattattgaatgtcatctctgttcatcattgactgctctttgctcatcattgaatcccccagcaaagtgcctagaacataatagtgcttatgcttgacaccggttatttttcatcaaacctgattccttctgtcctgaacacatagccaggcaattttccagccttctttgagttgggtattattaaattctggccattacttccaatgtgagtggaagtgacatgtgcaatttctatacctggctcataaaaccctcccatgtgcagcctttcatgttgacattaaatgtgacttgggaagctatgtgttacacagagtaaatcaccagaagcctggatttctgaaaaaactgtgcagagccaaacctctgtcatttgcaactcccacttgtatttgtacgaggcagttggataagtgaaaaataaagtactattgtgtcaagtctctg

SEQ ID NO: 17985 - DNA, 2131 bp, Homo sapiens
agttactgagaactcataagacgaagctaaaatccctcttcggatccacagtcaaccgccctgaacacatcctgcaaaaagcccagagaaaggtaatatgaatgaaataattttgggggactttaattgaggagtaaaatatttgagaatatgaggaagattccaaagtctctgcatataccttaataagaactgagacaggcttttactcattctcttttcagcacttatgattgaattagaaggaagtctgtaaaatttggctgtgatcatagggtaagatgttatctaacagaagccagaaacccaatgtctcctgctgagatgcttgagtgcctgtcaggatctaaaaattttcctcaagaattactgtatgtcattggaaagacgttcttttgagtggcttccaggagccagacagagggcaagtagacattatgatattgttttattatccatttttaagtgatgtatagctatatcttcaagctggcccatgataaagtggttcacttgttcagctgaatgactatagcttctgattatcttttgaatagatgttctcatgcagacttgaatagtagcatggaatttcttgaacgtcgttgttttcatttttcttctttaataaaatgctacaaaaatcaaagttggtagtatttctctagctattattcatgaatttgcaatgataagtcacttgcccaagtctaattgattagttccaatgagtttctggaaacttttttgcagctaaccttggttatcttagcattagcattaattggtggctgattgggaaatagacactagaaaataaaagaccttttttgtccctccttattagcgttgaagaataggctatgggtacgtgtgaagaactatgggctgacactatatgggtcccttaggaatgcagaagctccctttcatctctgtagatattttgtttcttaagctcttcaatctttttcccagtcaaaagtcagatattttgctttaggaaaatatcttttaaataattacttgacttaataccaattcaattattcataatattggtcaaccaaattgcatgtaatacattgctatattcttgaattatttaaaaaagacaagagtggtcatgatttataaaaggttcgtggtttttcatgttaatttcaactttggttttcttaagtttattattttttttgcagtaagagtcattgaaattttaagtgagtcatattccttaccatttcctgctgaaaagggtagtgtgtgagaaaaatgttagaaaagcaattaattatgttccagagcagattttcagttgcagtgtacatttctttttaatgtgagacccaaatttacacgaaaactcaaagtaagagctgggtaacagaaatggctaacttagaaggtaatgtacgtcttgcttaaaagcacatcaaagtaatctactttctcaaagagaaaatttacaggagtgaacttacatttcttttgagaacagcatggttcatagcaccaaacttcatttttacaggttgtgaatcctagagtagtttgctatcaacttctgatctttgcacattctggatttggcatataatgttacagcagtgccattgtaatgttgcacaaagtagtctagcaatttcttggttcaccaggcttagagataacattgtagaaatgatccagcatctttaacactctgtggtttaaggtggggcacttaggggtagaatcaataacaatgttagaaatcaaattagacaagataactgaaacagcatgatccatgtgtgactccaagttataaaggaggacatggattaatggtatacttctaggctataggggtagtacaagtggaaggacaccatcttagcatcagatcactttctgagcaactttggcaaatcttttaaattctctaatgtgtagttttttaatatatgacacaggtgtaaagaaaataaagcaagtgaatgtatgtgaaagccaatgctgactgggcacgggggctcacgcctgaaattctagcactttgggaggcagagccggggatatcacttgagcccaggagttgaagatcagcctgggcaacatagagaaaccctgtctctacaaacaaaac

SEQ ID NO: 17986 - DNA, 1822 bp, Homo sapiens
ccaatattgagctgtgtccctctgaatatttgccttagctatttcaaaataggtatcttcagaaccaaagcaaagggtggtttgttactgaaacattcttagaggcctacttaacgggcggcagtatccggtagtggtaaaacctcacagtttcctaattgcaggtatgtaaataccaaaaaagtcctgttgtcagccctaggtttatctttgaaagcagttaaatgtgcaccttggtcttcctccgtgtgttcagattccttctggttaaagttcttattcagagtcatctaaaagaaatttctaacatgatgtatggtttcttgaatgtcatgagtggctgcgtatattgctttgtagcaacagattgtattaataatagaatacctaatttttttggcctatcctctttgaactagaaatgactacttgagggctatttcagagaaccaatatgaaatgtttttgttagtacaaaataccattgccttaaaaggtttcaagcacattttcttttctatttgagaacttaaattgctgacttgtattcgttaagcaaccttagaaataaaccactgcttatatctgcatgaatattatgcatttcatgcgtacagttagttgattagatatttcagggttttgcattttctatagacatggggacttttttaacatggtaacgtcttaggaaaaccattctctcaaggtattacaccatttccaattttatccaaatgaaaagcatatctgcttaaatttaggatgtctttgctgagaatatttggaggctcttgttaggaagaatcatggattcagtatttctaacctgattactgcctcagaggctgtcttgaagggaggcagtaggattcactgactacctttacccagatgagggatcaacaaatctcacacttaaactaaatgagttgacaggacaataggtgctaatctcatgtgccctaagatggacttatttagatagggatttttgcattggaaaagcagcacattctctgaccttgggtaccaagctatgatactaatttgagaatcacattctgatacgttaatatcagaaatcagtgagcaacctaattgctgtaagctgacatacatggaagccgaaatcaaaaggttgcttttgttagtttccctggagcatctatttttgtaatacattttgccagtgggactgaaaagctcaaaatgttttagacctaatatcatacattaattttctgctctgcagtgtcaatttgggcacagccagtttttacctctgtggcaccttctttataatttactgttacctattctgcctgacagattgattaagtaggttgataagatccatcgaagattgaatggctaggagtaattctgttctcgtataggcaacttaacttcactgtggaatccatttatctcaaagtttgagggctgtctactttattttcaagtttggggcggaaactcaaaatcccgagcattgccactttagtagtttgtttgatttgcctattgtttaataatgagtacattcttattaagtgatgagtacattcttaattttaaggtatgtttttttcaagcagcttcattttattaggaaaaatacatactcatttgttgtaaacagtgattgtggggtttcattttctgaatgtactcaaaactcccaacaacaattgaacaagatgtttgctaatagaaaatctaaaacaggaatatgtgtatatggcatgaattagtcattgactttaagcttcttatccatacaaggaactaataaaatgtttattgacaacataaatcc

SEQ ID NO: 17987 - DNA, 2574 bp, Homo sapiens
  CDS (354)..(1391)
aggacggcgggaagaggagtgcggaacccgcgggaggatgtgcacagagggcccaggaggagcctcaggagccggactgccgttggccaaccgagtccccagggagacacttaagggaaattaaactgcagagtgcaagagatgcctcagtcaagtcagccaaaaacacgcgggtcatccccaagccccagagagtgacagagccccgatgacacggacacctcggctgctgtcacttccctggttcgggcctcccacaggctttgaattgaaggcgagtgcctcagaatttgcatccattgttctgtctttcctgggaagttattcatcctggtggccagcccaccgacaaaatggatttggatctactggacctgaatcccagaattattgctgcaattaagaaagccaaactgaaatcggtaaaggaggttttacacttttctggaccagacttgaagagactgaccaacctctccagccccgaggtctggcacttgctgagaacggcctccttacacttgcggggaagcagcatccttacagcactgcagctgcaccagcagaaggagcggttccccacgcagcaccagcgcctgagcctgggctgcccggtgctggacgcgctgctccgcggtggcctgcccctggacggcatcactgagctggccggacgcagctcggcagggaagacccagctggcgctgcagctctgcctggctgtgcagttcccgcggcagcacggaggcctggaggctggagccgtctacatctgcacggaagacgccttcccgcacaagcgcctgcagcagctcatggcccagcagccgcggctgcgcactgacgttccaggagagctgcttcagaagctccgatttggcagccagatcttcatcgagcacgtggccgatgtggacaccttgttggagtgtgtgaataagaaggtccccgtactgctgtctcggggcatggctcgcctggtggtcatcgactcggtggcagccccattccgctgtgaatttgacagccaggcctccgcccccagggccaggcatctgcagtccctgggggccacgctgcgtgagctgagcagtgccttccagagccctgtgctgtgcatcaaccaggtgacagaggccatggaggagcagggcgcagcacacgggccgctggggttctgggacgaacgtgtttccccagccctcggcataacctgggctaaccagctcctggtgagactgctggctgaccggctccgcgaggaagaggctgccctcggctgcccagcccggaccctgcgggtgctctctgccccccacctgcccccctcctcctgttcctacacgatcagtgccgaaggggtgcgagggacacctgggacccagtcccactgacacggtggcggctgcacaacagccctgcctgagaagccccgacacacggggctcgggcctttaaaacgcgtctgcctgggccgtggcacagctgggagcctggttcagacacagctcttccagggcagcggctccactttctcatccgaagatggtggccacagactgacccccatctgagctggggggatgttctgcctctccctgggtctggggacaggcccgcttgctgggtacctggtccccactgctgagctggcccttggggagaggtgattctcagggctggagcctggggtgtcctacagtgactccctgggagccgcctgcttcttctctccacatggaagcccaactggggttgcgtctgaggcctgccccctgggctggggcctcagaccccctcagccttgggaccgtgcccacgagggtctcccctcctgcacacagggcagtccttactcccccaccactcaggccacagtggggctgcaggcaggcggctcctcctcacccacctctgggtccttggctcccgggggccccacctcggcacacactgtgccccacaaaacttcagtgtggtacaaggtggagaaagcatatcccaccaacctccagtgtcagggtccaggagagcctgggggtggggggactgccttgtctctagtagtgtggcctgtgccagcaccacagccggtcagaggagcgcaggcagcgcagggctggcacgtgacaggctcgtcagccacctgggaacacagttctgggcaaagaggatccgaggttgagaggaaggagggtcccggtgtatcctggccctgggggtctgggcgtccagctcagccctggcctggctgggtggtattctggtagggatatggcaggactcctggcagggccacctgcaggaccctgtcctgcagtcccacactgtgcagacccagtcccacactgtggccaggccttacatctggctggaaagcagagcctcctgggaacacatctggctgcacaggctgaaatatccacccagcaggcagagtggcgtggcctccccatgggcactgtggtgacccccttgattcccaccgtacaaccccccccaccccccactcagtgcctccacatgccgcctggcacagaccaggcctttgacaaataaatgttcaatggatgc

SEQ ID NO: 17988 - protein, 346 aa, Homo sapiens; identical to SEQ ID NO: 14743

SEQ ID NO: 17989 - DNA, 3430 bp, Homo sapiens
agatttttttaatgccgagaaaagtccatgccacagaagttattgtgtatgtctctagggagctttaagaatttcacgtttgaactttacagctgtttaccaattaaatggcaagctggaaaaatacattttgagaggggtagaaagaataagaatataattaaaagtatgctaacaaaataagcagtacatatttttttagaaaatgcagtttaggccaggcacggtagctcgtgcctgtaatcccagcactttgggaggccgaggcaggtggatcacctgaggtcaggagtttgagaccagcctggacaacatggtgaaaccccgtctctactaaaaatacaaaaaattagccaacgatggtgatgcctgtctgtaatcccagctactctggaggctgaggcaggagaatcgcttgaaccggggaggcagaggttgtagtgagccaagattgcaccactgcactccagcctgggcaacagagcaagactccgtctcaaaaaaggaaagaaaatgcagtttcattccagccatccctagatttcttttccccttaaagtggctgaatccattggagatgtgatttattttgcagatccaccaattccaaacttcaggaatattcaagcgggagtcatgtgtaagtgacagctttgacaaagagagactgtggctgggtggcccgggtgttgcccacgcggagcaaggattggttcattcaacggatggagagtacaggatggctgggacctgggaagttccagaatctgaaaagagggcagggcaagaaggagccagaagagaggtcccacccctcagttggcagtggggcacggaggtccgcatcagccaagaacgtccccaggatgccgtgggcacctcatttcaccccacgtttttggcacagtctactttttaggtattttgtaaaggaacttctcaggattgattatttgccagaggaacaattaggccaagagaaacttgcttgacagccatgtgtaaaacacgtctgtcctaatcaaactagagatgcctcaaggcccacgcaggacacaggcaggttcaaggtcatgcacctggaaatttgtaggggagggtcaagcaactgaggccaaagggggccggtaaagtggcttctggggtctgagcatctggaaggctcctggcagcagttacctgacagtgtcgttgaggggcacggcagctgggccctcaccgtttccgccagctctgctgagccagcccagcccatgcattccgaacatccgacagcttctttctccagaatgtcttctgtcagagacttccaggaaaggagctccctcctgtctcactgctgtcagcgtgggagccctgctccccaggctccacgtccccggaaggtccatcttgtcctggagcacacccagccccattcagggtcagtgcaggagggaacagggaatctgcatttcagtaagctccccaggtgaggctgcagagcagaaaccacggctttcagacgtgagcaggctccctgggctcttggtgtcaccctgttagccacatctgcggaatgtggaaggcagaacatagccacgctgcttagtgctgccagcgaacctcaggttgcatcagtggctggaatctatcacagctgttggggatacgtaactcccagcaataaatccagtattttcttccctgccctgagcttcctctgggtttcttatcagcagctattacacacagatgtccagtgcttctaaactaaattgtactgtgtaacttttacatcacacttgtgtgcttaaaaagcacaccgtgggtagtgactgggccaagagacatcacaaagctttctgataaatttgaatccagccacggcaagagcgacgtgcgggtacctggtccctgatgcttgggtgccccgttgagcctcgggtacttcttggacactattgtgagagcagccatcctggtgtctctgccagcatcttggggaacgctgtgatggtaaaatatctgtctctcctctgggaatcagggcagccctgagaagtgagcagttccctttacagatggataattgtttgtgtaagaccaaccagatgaagtccaaactgtgtagaacacacgtgtgcctcacacatagccatctgagtaaaatattttttccaatgtagatttataattagaaatgacagatttataatatagacttcagtaggttgggcacagctgtcactttcgtggtatcaataaaaggctagaaaccttgagtgtccttggcaacctagcctttgacattgatgtttttccataggattttcttcatttgggttggaataaaaatgcatttttattcacaaggcacagacagataagaatatcataagcagggaagtgtctccaaaggtcaggacttatgtttttctgttgagtgctatatgtggaggttattgcaagttccctgatatgagtatggtttcgcttgctacattgtgcctattaaagtaaaattttacacaagcctcgcatttctaagattagtgttcccgaatgaaatgttaagaaaacattaaaagattatctctttttaagatggaggaaaaaaagtgaacaaagctaattaatctataatgaaaattgcacaaaataacatttcttaacaaatttaatacaattctgtgttctttgttgctagtggtataaaacgagatttttttccctcatttttctcattgtagatgtcatctctcacatttatatcagtgaggtttgaaattctgtgtagcagttactcagcacatatgagagggcagcgaatgaatgagatttgtcatgtgctaataaaagctgaatttttgtaatctaaaatgatgtattttctactattgctgttaatttgcattgttaaaaattcttaaagtttaatatgttatgttcagtcattgaaagcgaccactcatttttttcttaaagttgatgccttttctgctgtgctagagtcagtattttgcttctggcaggagagctgcaaactgtgtatcctcaaacagatgcaaaaagtagtgctttgcaaaacgtttgttttctgtttatctcagattaacatcctttaatacaagtttcttaagtgtaacttgtatttctgaaaatgcttaaaattattttatatttccctttgggaatttttctctatttccagcacgctgatttgatttaaaaatgtaataagaccaagagttggagtaaagggatattcattccatgttaaaagtggcttcatagctactgacaaatgtctgaactattgtcgtgcccttcaaaactggagttttctaaaataatcttatttttatacttgtatgttccagcaatttaagatatataccattgaaagggaaataaaacatttttgtttatttgaataaataatactccc

SEQ ID NO: 17990 - DNA, 1791 bp, Homo sapiens
gtgtcacaagcaaaccctaacctcactgccaaacaaagatgctggcattatgctaagaaataaggggaatggccaggcgcggtggctcatgcctgtaatcctagcactttgagaggccaagataggcagatcacgaggtcaggagttcgaaaccagcctggccaacagggcgaaactccatctctactaaaaatagaaaaattagccaggtaaggtggcgggtgcctgtaaggtggcgggtcccagctagttgggaggctgaggcaggagaatcatttgaacctgagaggaagaggttgcaatgagccaagatcatgccattgcactccagcctgggcgacaagagcaagactctgtctcaaaaaaaaagaagggggataaagaaaaacactggaaaaaggatgacctgtagttaagtgttggcataatacaatgaaagacttaacgtttctagacactctagttgaatttggtcctttgagactgtcgtgggctcatttcctcagcgtgttgatttagtgactcctgaaggagcagacccttggtttggacctcacttttccataagacgttcaaatagatttaatgcctgagggtcgctgtcatctaaatccattcagtagactgtacagaagctggcttgggagttctcccctcagcaggcagctcccagttacccctaaagtgtaatgtcattaaaagatttgttaagcacctgctctttagcaggctgtatgctggtcttcatatcccaaaggataaaacctaatccactgtctttaggtcacagcctttgagtcatttttccagtagatgatacgacatactaagccagaaactaggtttatcagcaatatgcatttgagagccggtcaactgagctagaagtctaggaagaggatgttttcccttcttccttaagccaatgaacacatggtgaaattgaacctgtgctcttggctaattagtatcttgtcctaaacaaagagctccctggtcctgagtggagaatatctggttgcttacctctgacagctcctactgactgagggcgtaggtgtgcaagacacacacagcagcctcttagtttggaaggaacttgagagattttctatccagcttcccacttcaaaacaaatagggtttttcctaatcctcagatggatgttgagatggaaggaatactcttttggcatgaggaaatgcgattgctagtaggctctagactagtgtaactttttgtttgcaattccaaaatgaaggaataggttgagtcagacattcccactttccctctccttgttcttcctatagcctggcagctgcctcccgtgggtgggttctgtgctgtgtactttcctgaacagtgtgtctctcctttaggtgaagagaaggactataccatatggctggcacactccacagaccctgaagattatgaagatggctgcattttgggctacaaagaacagtttctgcggctacgcaagtcatccgtgtgtcagaatggtcgagactatgttgtgaccaagcagccctccatctgcctctgctccctggaggactttctctggtatcagcattcctcagatttctctgtctccctttccctgttggaggaggtgaaagacagttttcttatagggctaacaaatattgaaatccagccgggtgcggtggctcacacctgtaatcccagcactttgggatgccaaggcaggcagatcacttgaggccgggagttcgagaccagcctggtcaacatggtgaaaccctatctctacaaaaaac

SEQ ID NO: 17991 - DNA, 2207 bp, Homo sapiens
  CDS (680)..(2050)
atgacaataaaatgcatgttcttttatgttgaggctctgttttgagaagtaaaataaattatgtctttagtacaatatatgaattgtatatggaaaaacatgctttttgaaagtcccaccaaaaaggtttctttatggtatcattaaatataatttcagtttttatatgtatacatcatccctgtctctctttccaggccgggcatttatatatgtatggtcagtatattttctattattggcacttggcatctcctttcccctgctccagaatggtcttttctgataaaactcacaagctttgcattaccacaagctctgctgctagaagagtgaatcacaagaatgttgtatgcttggggtgttctgtgtgcctgtgttgatgtgtctgtattctaatgagcaatccagttttacactagcatacagatatttaactctgaggtatgtgtccacaaagctgcttttgtcatttcactagtcagtgggttttgcttgtgagagttagggggttgatttgacccgaggcttcttagaagaattttttaacattccaagtttatctaatagatgtgctatgaagagaacagaatgatgggactttaaaaaaatttttacagttatttttattttgtagaatgagctgaaagccagtggtggcgaaatcaaaattcataaaatggagcaaaaggagaatgtgcccccaggtcctgaggtctgcatcacccatcaggaaggggaaaagatttctgcaaatgagaatagcctggcagtccgttccacccctgccgaagatgactcccgtgactcccaggttaagagtgaggttcaacagcctgtccatcccaagccactaagtccagattccagagcctccagtctttctgaaagttctcctcccaaagcaatgaagaagtttcaggcacctgcaagagagacctgcgtggaatgtcagaagacagtctatccaatggagcgtctcctggccaaccagcaggtgtttcacatcagctgcttccgttgctcctattgcaacaacaaactcagtctaggaacatatgcatctttacatggaagaatctattgtaagcctcacttcaatcaactctttaaatctaagggcaactatgatgaaggctttgggcacagaccacacaaggatctatgggcaagcaaaaatgaaaacgaagagattttggagagaccagcccagcttgcaaatgcaagggagacccctcacagcccaggggtagaagatgcccctattgctaaggtgggtgtcctggctgcaagtatggaagccaaggcctcctctcagcaggagaaggaagacaagccagctgaaaccaagaagctgaggatcgcctggccaccccccactgaacttggaagttcaggaagtgccttggaggaagggatcaaaatgtcaaagcccaaatggcctcctgaagacgaaatcagcaagcccgaagttcctgaggatgtcgatctagatctgaagaagctaagacgatcttcttcactgaaggaaagaagccgcccattcactgtagcagcttcatttcaaagcacctctgtcaagagcccaaaaactgtgtccccacctatcaggaaaggctggagcatgtcagagcagagtgaagagtctgtgggtggaagagttgcagaaaggaaacaagtggaaaatgccaaggcttctaagaagaatgggaatgtgggaaaaacaacctggcaaaacaaagaatctaaaggagagacagggaagagaagtaaggaaggtcatagtttggagatggagaatgagaatcttgtagaaaatggtgcagactccgatgaagatgataacagcttcctcaaacaacaatctccacaagaacccaagtctctgaattggtcgagttttgtagacaacacctttgctgaagaattcactactcagaatcagaaatcccaggatgtggaactctgggagggagaagtggtcaaagagctctctgtggaagaacagataaagagaaatcggtattatgatgaggatgaggatgaagagtgacaaattgcaatgatgctgggccttaaattcatgttagtgttagcgagccactgccctttgtcaaaatgtgatgcacataagcaggtatcccagcatgaaatgtaatttacttggaagtaactttggaaaagaattccttcttaaaatcaaaaac

SEQ ID NO: 17992 - protein, 457 aa, Homo sapiens
MEQKENVPPGPEVCITHQEGEKISANENSLAVRSTPAEDDSRDSQVKSEVQQPVHPKPLSPDSRASSLSESSPPKAMKKFQAPARETCVECQKTVYPMERLLANQQVFHISCFRCSYCNNKLSLGTYASLHGRIYCKPHFNQLFKSKGNYDEGFGHRPHKDLWASKNENEEILERPAQLANARETPHSPGVEDAPIAKVGVLAASMEAKASSQQEKEDKPAETKKLRIAWPPPTELGSSGSALEEGIKMSKPKWPPEDEISKPEVPEDVDLDLKKLRRSSSLKERSRPFTVAASFQSTSVKSPKTVSPPIRKGWSMSEQSEESVGGRVAERKQVENAKASKKNGNVGKTTWQNKESKGETGKRSKEGHSLEMENENLVENGADSDEDDNSFLKQQSPQEPKSLNWSSFVDNTFAEEFTTQNQKSQDVELWEGEVVKELSVEEQIKRNRYYDEDEDEE

SEQ ID NO: 17993 - DNA, 2260 bp, Homo sapiens
  CDS (16)..(1998)
aaagatttggtagaaatgtgccgtggtgtgcaacatcccttgaggggtctgtttcttcgaaattaccttcttcagtgtaccagaaataccttacctgatgaaggagagccaacagatgaagaaacaactggtgacatcagtgattccatggattttgtactgctcaactttgcagaaatgaacaagctctgggtgcgaatgcagcatcagggacatagccgagatagagaaaaaagagaacgagaaagacaagaactgagaattttagtgggaacaaatttggtgcgcctcagtcagttggaaggtgtaaatgtggaacgttacaaacagattgttttgactggcatattggagcaagttgtaaactgtagggatgctttggctcaagaatatctcatggagtgtattattcaggttttccctgatgaatttcacctccagactttgaatccttttcttcgggcctgtgctgagttacaccagaatgtaaatgtgaagaacataatcattgctttaattgatagattagctttatttgctcaccgtgaagatggacctggaatcccagcggatattaaactttttgatatattttcacagcaggtggctacagtgatacagtctagacaagacatgccttcagaggatgttgtatctttacaagtctctctgattaatcttgccatgaaatgttaccctgatcgtgtggactatgttgataaagttctagaaacaacagtggagatattcaataagctcaaccttgaacatattgctaccagtagtgcagtttcaaaggaactcaccagacttttgaaaataccagttgacacttacaacaatattttaacagtcttgaaattaaaacattttcacccactctttgagtactttgactacgagtccagaaagagcatgagttgttatgtgcttagtaatgttctggattataacacagaaattgtctctcaagaccaggtggattccataatgaatttggtatccacgttgattcaagatcagccagatcaacctgtagaagaccctgatccagaagattttgctgatgagcagagccttgtgggccgcttcattcatctgctgcgctctgaggaccctgaccagcagtacttgattttgaacacagcacgaaaacattttggagctggtggaaatcagcggattcgcttcacactgccacctttggtatttgcagcttaccagctggcttttcgatataaagagaattctaaagtggatgacaaatgggaaaagaaatgccagaagattttttcatttgcccaccagactatcagtgctttgatcaaagcagagctggcagaattgcccttaagactttttcttcaaggagcactagctgctggggaaattggttttgaaaatcatgagacagtcgcatatgaattcatgtcccaggcattttctctgtatgaagatgaaatcagcgattccaaagcacagctagctgccatcaccttgatcattggcacttttgaaaggatgaagtgcttcagtgaagagaatcatgaacctctgaggactcagtgtgcccttgctgcatccaaacttctaaagaaacctgatcagggccgagctgtgagcacctgtgcacatctcttctggtctggcagaaacacggacaaaaatggggaggagcttcacggaggcaagagggtaatggagtgcctaaaaaaagctctaaaaatagcaaatcagtgcatggacccctctctacaagtgcagctttttatagaaattctgaacagatatatctatttttatgaaaaggaaaatgatgcggtaacaattcaggttttaaaccagcttatccaaaagattcgagaagacctcccgaatcttgaatccagtgaagaaacagagcagattaacaaacattttcataacacactggagcatttgcgcttgcggcgggaatcaccagaatccgaggggccaatttatgaaggtctcatcctttaaaaaggaaatagctcaccatactcctttccatgtacatccagtgagggttttattacgctaggtttcccttccatagattgtgcctttcagaaatgctgaggtaggtttcccatttcttacctgtgatgtgttttacccagcacctccggacactcaccttcaggaccttaataaaattattcacttggtaagtgttcaagtctttctgatcaccccaagtagcatgactgatctgcaatttaaaattcctgtgatctgt

SEQ ID NO: 17994 - protein, 661 aa, Homo sapiens [sequence omitted]

SEQ ID NO: 17995 - DNA, 1586 bp, Homo sapiens
  CDS (121)..(1386)
cagccttcccagccccagcggaccctgctccagcatgtggctcagtcacagaccgcaacacagacttcggtggtggtgaagtccatcccagcatcttcccctggagcaatcacccacattatgcagcaggcattaagcagtcacactgcttttaccaaacacagcgaggaacttggaactgaggagggcgaggttgaagagatggacactttagaccctcagacaggtctgttttaccgatctgccctgactcagtcacagtcagctaaacagcagaaacttagccagcccccgctggaacagactcagctgcaagtgaaaactctgcagtgcttccagactaaacagaagcagaccatccacctgcaggcagaccagctccagcacaaactcccgcaaatgccccagctttccatcaggcatcaaaaactcacccctctccagcaagaacaagcacagcccaagccagatgtacagcacacacagcatcccatggtggccaaagacaggcagcttcctaccttaatggcacagcccccgcaaactgtagtacaggtgcttgcagtgaaaaccacgcagcagctccctaaactgcagcaggctccgaaccaaccaaaaatctacgtgcaaccccaaaccccccagagccaaatgtcgctcccagcttcttcagagaaacagacggcaagccaggtggagcagccaattataacccaaggatcctctgttacaaagataacttttgaggggcgccagcctcccacagttacaaagataactggtggcagttctgtgcctaagctgacatcaccagttacaagcatatctcccattcaggcctctgagaagacagcagtgtctgacattttgaaaatgtctttgatggaagctcagattgatacaaatgtagaacatatgatagtggatcccccaaagaaggctcttgccactagcatgctcactggtgaagcaggatcattaccctccacccacatggtggtggcagggatggcgaattccactccccagcaacagaaatgtagagagtcctgttcgagtccatccactgttggctcttccctaacgacaaggaaaattgatccaccagcagtgcctgcgacaggccagttcatgcgtattcagaatgtaggccaaaagaaagctgaagagagtccagcagaaattatcatccaggctattcctcagtatgctattccttgtcactccagctccaatgtggtggtggagcccagtgggcttcttgagctaaacaacttcactagtcaacagctggatgatgaggagacagcaatggagcaggacatagacagtagcacggaggatggaactgaacccagcccttctcagagctctgctgaacggtcctagtgtttggacacaatagtgcactttaaaacctgcttggttaccaagtgtccagggaaacccttgtattttgatgactaaaaagagcactttgcccgtacttaggctgtggaccctaaaacagcagtgtttcaacaagatgttgctgcaggagcagctttttaaaacaagataaaactcacaggggaatgtactttttt

SEQ ID NO: 17996 - protein, 422 aa, Homo sapiens
MQQALSSHTAFTKHSEELGTEEGEVEEMDTLDPQTGLFYRSALTQSQSAKQQKLSQPPLEQTQLQVKTLQCFQTKQKQTIHLQADQLQHKLPQMPQLSIRHQKLTPLQQEQAQPKPDVQHTQHPMVAKDRQLPTLMAQPPQTVVQVLAVKTTQQLPKLQQAPNQPKIYVQPQTPQSQMSLPASSEKQTASQVEQPIITQGSSVTKITFEGRQPPTVTKITGGSSVPKLTSPVTSISPIQASEKTAVSDILKMSLMEAQIDTNVEHMIVDPPKKALATSMLTGEAGSLPSTHMVVAGMANSTPQQQKCRESCSSPSTVGSSLTTRKIDPPAVPATGQFMRIQNVGQKKAEESPAEIIIQAIPQYAIPCHSSSNVVVEPSGLLELNNFTSQQLDDEETAMEQDIDSSTEDGTEPSPSQSSAERS

SEQ ID NO: 17997 - DNA, 1901 bp, Homo sapiens
  CDS (108)..(488)
aattcatacaggagagaagtcatatatatgcagtgattgtggaaaaggcttcatcaagaagtctcggctcattaatcatcagagagttcatacaggagagaaaccacatggatgcagcctgtgtgggaaggccttctccaaaaggtccaggctcactgaacaccagagaactcatacaggagagaagccctatgaatgcactgaatgtgacaaagcattccgctggaaatcacagctcaatgcacatcagaaagctcacacaggagagaagtcatatatatgccgtgattgtggaaaaggcttcattcagaagggaaatctcattgtacatcagcgaattcatactggagaaaaaccctatatatgcaatgaatgtggaaaaggcttcatccaaaagggcaacctccttattcatcgacgtactcacactggagagaaaccctatgaatgcaatgaatgtgggaaaggcttcagccagaagacatgtttaatatcccatcagagatttcacacaggaaagacaccctttgtatgtactgagtgtggaaaatcctgctcacacaagtcaggtctcattaaccaccagagaattcacacaggagagaaaccctatacatgcagtgactgtgggaaagctttcagagataaatcatgtctcaacagacatcggagaactcatacaggggagagaccgtatggatgctctgattgtgggaaagctttctcccacttgtcatgccttgtttatcataagggaatgctgcatgcaagagagaaatgtgtaggttcagtcaaattggaaaatccttgctcagagagtcatagcttatcacatacacgtgatctcatacaggataaagactctgttaacatggtgactctgcagatgccttctgtggcagctcagacctcattaactaacagtgcgttccaagcagagagcaaagtagccattgtgagccagcctgttgccagaagttcagtctcagcagatagtagaatttgcacagaataaaaaccatatgaatgcagtgaatgtggtagtgctttcagtgatcaattacatcatatgtcacaaaaaacacagaggaacaaactgatatattcaaggtggaaagcccttgaataaaaccttatggctaataagcatatactcagagaaaaatagtatgaagtggagactgggaaattcttttatgggaagatagatcttctcatcagtgaccatagatcacatcttcagtgagcttatagttggtagaaatataatgatcatggaaaagtccttgttcagaaacagtacgccagtaggtatcagggggtttacacaggagagaaacttttggaagacctttgaaggctatgaatgtggcagggttgctagtggtacattctgccttatcctcagagggaatcatatagaaataaaactatgaaaatgtaactagaacatcttcatcaaaatatgaaagaacacacgaagcaaataagccctgtgaaaaggagtattttagagatttcgatcagaaatctaacatcattatatggcagataatatacaggatgtgtattttaggacaatataccttgaatcactagttgatatgtcaatgactaattaaaaggggttgtcagtgttacacatcattggttaaatttatagcacaatgtacctcttcccccttttttgataagagtcttctattcccaaccaagatcattatatgattagctcttgtgtttctttgattccaaatttcttcacttgttatttcagactactgaagctcttcaaaaggaaaaatgtatttaatttaataatgtaacacaacaagtttggatgtgtttaactttataaataatcaccccagaggaatgaagttcaaaacttgtgaataacc

SEQ ID NO: 17998 - protein, 127 aa, Homo sapiens
MDAACVGRPSPKGPGSLNTRELIQERSPMNALNVTKHSAGNHSSMHIRKLTQERSHIYAVIVEKASFRREISLYISEFILEKNPIYAMNVEKASSKRATSLFIDVLTLERNPMNAMNVGKASARRHV

SEQ ID NO: 17999 - DNA, 2020 bp, Homo sapiens
cttatgccccacctcccaccccagctcctgcaacacaaatgcccagcacaccagggtttgtgggatacaatccatacagtcatctcgcctacaacaactacaggctgggagggaacccgggcaccaacagccgggtcacggtaggagaatcaactattacagcatccggcaaacaactggaattgaccagaaatgccttcagaattaggtctttttgaatcataagcacagccatttaaaaaaaattttttaacctagctttttgagtattttcaacattcgttgtagcatctcacactgaaaaaataaatagtgagatctggaatgtatatagaagaaaagaaaaatccattctgtttggtggttggtagggttaaagccttgagcacttgatgcttatactgtatgtaaacaaacagaatttcttaaggtaaaaatatcctttttgacataaagagtatttttcatttttataaggtgattggcattagtctcaaggattgagtttctagtagaggctggtctttcagacctggctttttcagggctggaaagcttttggctggtacaccagtttgaatcgctacccatagttatttgtcttttggatttagtagttgaccttctaactaagactcatttctctacagtgaaaaagagaaaaacgttttaatgtcacctcaaagaaatgcagagtgaaggttgaatgaaattaatttgaagtatcagactagatatgtacaacgagaagtgcatttctaatccttagtataagagataggatttctgaaacttagcatgtttcatttaagtgatcagcctaagatatcaaaattggatgatacacttcaaatcttttagtttagaatcatcttaaatttcattcaaaaaagtttaagcaccaaaaaatgccaataattataaaaatgacttactaaagataaaaaatccaaaagtcaaatactacattggaatgtagtgttggtgagaatttatacaacccagaatggctgtaaagtttttaatacctggtttttgtttgctgtattcataaataacaagtgccttctattaatgtaacttcaaaaaagccctctcaccctgtagtcaagctggaactgaaagcttgtagctatcaaatgagtgtctatcttgataagcatattgcttagcttgataggttttgtttgtctaaatttttcattgtttctgcataatatgtacttcataagcatatcaagttttatgtgccatgcatatttcatggtatctgaaaaagaattctgacaaagtgtgtgtatgtatgcatttcacaatgcatacaatttttatgtgcatcaatacatgtttttccctggcctaaacatgttgtttcacaagtgtaatggatggcaaggttttcaaatgataaagaacatttcagtttaaacaatgaacagaatcaatcatggatcttaatgttaatgcagcaattttttcacgggcagtaaacaagaatgattgcatttaatagctctatacagtcacctcttgattatctatgttaatggaatagaaatgataactataatattacagtaatttgtcttttggttttgtgtaagcattttgctcttaacttggatgtagctgtgggggattctctgttaaaaaagtgagattgttcgatggagactaggaagagaaagtgtactccctatctgaagtcactcatctgtttcttcccattccttcttggcgaatgttaagaactgaacatttggcgtggacactagctacatagtagattaattatagagagttgttggacatggaaaatttggtgttttggtcctttgtggacatttactttgtattattgtcctcttaacaccaaattgaagtataatcaaactgctatatgaagaagggcctagaaaatgtggaggttttacactacttgccctgctttctatatctagtttaagctgttaggactcaatggctctgattttgaccataataaaagcattttgatttt

SEQ ID NO: 18000 - DNA, 2299 bp, Homo sapiens
ataacgaggacacagtgagtgagagggtacaataatgagaggcaggaagcggaagactgttgaagctaaaatcagaaatcattgtgatcgttctctaggtcagtggatcctgctgtgccatacgttggaatcaccttggaatcagctggggatctttaaaggtgtttctgcctggctccccaccccagaccttgtgatttaattcaccaggggtgtggcatggcattggggtttccaaaggcttcccatgtgatcctaatatgcagccacgtttgtgaactcctgcactaggcagtgagaacgcttccttctgagttgaggctgcctgaacctcaaaggcatctcaacgttgtgtcaatgcctaaatgcactcttcggctcatgtagcaacttctagagctgcgtccgaatcacagaggaaattaactgttgaaaataatgtttgattgagttaccatgggcatgctaaattatgtttatgtccctaaaaagtgtttttcatcgttctctaatgttaggatggttggatgtctgaaggaaagtgttggaattcttaaaagtactagaaatcttgaaaccaagttatgtttttaaatatgttttgaatttgatagcttattaaattgtaattatttatagtcatgtttaacactggcaagaggagccatctaaagtttatgaaataaatctttttgacatggaaagatatgaagtggaaaaacttttttgtaaaaaacatatatagatacagtacacaaaaatatatctgaaaactgttgctcaaaatatcaatagaggttatctttgagggtaaagcttgagtaatttttagtttcattttatatttctgttttatttcaagttttcacattgcatgtgttttagtttattaatcagaaaaagtagtgaagctgctgccatttcagagggaatgcatgtgtgccattttagagggaacgaatttatagcagcagttaaaactgtttctttatgctacaaatgacagtcagtttaagatgaaatgcatttaaatgactctgatcttatttctaggcactaggtgagctctgtgaaaccaagtttgggaagacacaccctgtgtgcaatttggttgcttctttgcggttgtggttgccgaaatccttaagtcctggctgtgggcgggagctgcagagactctcttacttaggggctttctttagcttctcagtctttgcagaagatgatgttaaagtggttgaaaaatacttctcagggcctgccattaccctggaaaacactcgtgtggttagccaatcattgcagcattacttagagctcggaaggcaagagctttttaagattctgcatagtattttgttaaatggcgaaacccgtgaggctgctctcagttacatggcggctgtcgtcaatgccaatatgaagaaagcacagatgcagacagatgatagattggtgtctacagatggatttatgctgaatttcctttgggtactgcagcagctaagtacaaaaatcaagttagaaacagttgatcccacgtatatttttcacccaagatgtcggattactcttcccaatgatgagacgcgtgtgaatgcaacgatggaagatgtgaatgactggctgactgaactctaactgtagaagatttgaaaaataatgaaagccaatggaaagattccccactggcaactagacaccgcgaaatgctgaagcgctgtaaaactcagcttaaggtttgtatagctaagtggaataattatagaccagcctcatagtgataattttcccaacagaatatatgccttgagtgagcagtttagtgtcctcactttttctttgttattcttttcccttccaataaaatagtatattttaaaacttgttgataccttacttatatgtgtatataatgatttcagtctcaggacagaatatggatagatatgcttctgctgtgattatgaattcttaatgggttttatgattctcagtttaacatcacctcccttggccgggcgcagtggctcacacctgtaatcccagcactttgggaggcctaggcgggcggatcacgaggtcaggagatggagaccatcctggctaacacggtgaaaccccgtctctactaaaaatacaaaaaaaaattagccgggcgtgatggcgggcgcctgtagtcccagctactcaggaggctaaggcaggagaatggcatgaacccaggaggcagagcttgcagtgagccaagatggcgccactgcactccagcctgggcgacagagcgagactccgtctc

SEQ ID NO: 18001 - DNA, 1813 bp, Homo sapiens
  CDS (31)..(1020)
attaatctggccgtgccatgcatctactccatgttcaggcttgtggagaggtacgagatgccacggcacgaagtctacgttctcctgatccgaaacatctttttgaaaatatcaatcattggcattctttgttactattggctcaacaccgtggccctgtctggtgaagagtgttgggaaaccctcattggccaggacatctaccggctccttctgatggattttgtgttctctttagtcaattccttcctgggggagtttctgaggagaatcattgggatgcaactgatcacaagtcttggccttcaggagtttgacattgccaggaacgttctagaactgatctatgcacaaactctggtgtggattggcatcttcttctgccccctgctgccctttatccaaatgattatgcttttcatcatgttctactccaaaaatatcagcctgatgatgaatttccagcctccgagcaaagcctggcgggcctcacagatgatgactttcttcatcttcttgctctttttcccatccttcaccggggtcttgtgcaccctggccatcaccatctggagattgaagccttcagctgactgtggcccttttcgaggtctgcctctcttcattcactccatctacagctggatcgacaccctaagtacacggcctggctacctgtgggttgtttggatctatcggaacctcattggaagtgtgcacttctttttcatcctcaccctcattgtgctaatcatcacctatctttactggcagatcacagagggaaggaagattatgataaggctgctccatgagcagatcattaatgagggcaaagataaaatgttcctgatagaaaaattgatcaagctgcaggatatggagaagaaagcaaaccccagctcacttgttctggaaaggagagaggtggagcaacaaggctttttgcatttgggggaacatgatggcagtcttgacttgcgatctagaagatcagttcaagaaggtaatccaagggcctgatgactcttttggtaaccagacaccaatcaaataaggggaggagacgaaaatggaatgatttcttccatgccacctgtgcctttaggaactgcccagaagaaaatccaaggctttagccaggagcggaaactgactaccatgtaattatcaaagtaaaattgggcattccatgctatttttaatacctggattgctgatttttcaagacaaaatacttggggttttccaataaagattgttgtaatattgaaatgagcctacaaaaacctaggaagagataactagggaataatgtatattatcttcaagaagtgtgtgcaggaatgattggttcttagaaatctctcctgccagacttcccagacctggcaaaggtttagaaactgttgctaagaaaagtggtccatcctgaataaacatgtaatactccagcagggatatgaagcctctgaattgtagaacctgcatttatttgtgactttgaactaaagacatcccccatgtcccaaaggtggaatacaaccagaggtctcatctctgaactttcttgcgtactgattacatgagtctttggagtcggggatggaggaggttctgcccctgtgaggtgttatacatgaccatcaaagtcctacgtcaagctagctttgcagtggcagtaccgtagccaatgagatttatccgagacgcgattattgctaattggaaattttcccaataccccaccgtgatgacttgaaatataatcagcgctggcaatttttgacagtctctacggagactgaataag

SEQ ID NO: 18002 - protein, 330 aa, Homo sapiens
MFRLVERYEMPRHEVYVLLIRNIFLKISIIGILCYYWLNTVALSGEECWETLIGQDIYRLLLMDFVFSLVNSFLGEFLRRIIGMQLITSLGLQEFDIARNVLELIYAQTLVWIGIFFCPLLPFIQMIMLFIMFYSKNISLMMNFQPPSKAWRASQMMTFFIFLLFFPSFTGVLCTLAITIWRLKPSADCGPFRGLPLFIHSIYSWIDTLSTRPGYLWVVWIYRNLIGSVHFFFILTLIVLIITYLYWQITEGRKIMIRLLHEQIINEGKDKMFLIEKLIKLQDMEKKANPSSLVLERREVEQQGFLHLGEHDGSLDLRSRRSVQEGNPRA

SEQ ID NO: 18003 - DNA, 1988 bp, Homo sapiens
cagcagatttaggcattggagatctaattcctgtggatgttaaccatttgaacatttgtaagccaaagaaaaaggatgcttttttgtaccagcgtactttacaattcattcgtgaagctttagccaaagaccttgaaaactaacagttgtgctcttccagttttcatatgtgaattcagtgcaagaaacttggtgttctgtttcttcttttaagctctatgcaatcatgcaaacatagtgatcatagcgtcaacatggtctggagtgtgttgcagactacagaacattgttctcccttcaagcgctgtaaagcaccaacccggaagtggcaggcacagaaggaagggctggattgggcccctttggtgtaaagaagtccctgtgtgctgctttatggttcgcagtgttgggcttggtgactggagcaaagctgctgtgagagagtgtcctttcccatctgtgactttcctggtgcatccaggaggggcacggcaggttctgaggtaactcaacttaccataaaaatgccattaagagagtacctaaaatggagagaagaatgaactagaacattcaagactcttttacttctgggtattgatttgctgtacatttttaaagtttgagtttttagctcagttctaccttttatctgacacattattactagtgttaactttgttagacttattgtcatgtctgggtcagttccttgtatctattttcgtattcctgagaacaaatctttttcttagaaaaattctagcttataataattcttttcagactgtagctgcctatgcttggaatttgtcctagataaggataaagtagctaatccattattgatcacagtatgaagtaaaactattctaagccattatatgaattagcaattcttagtatcaagattctcagattctctttggctaaataaacctttcttcttccttgctcatttgcaagtggtattaattgacctctatagcatgtgagtagtagataatcatgtcgatgacctttttttctttagagtaacagcattattgagatataatttacataccataagattcacccttttaaattatacaattcatttttgttttgttttgtttgtttagagacagggtctgactctgttgcccaagctggagtgcagtggcatgatcatagctcattgtaacctcaaactcctgggctcaagagatccttttgcttcagcctcccaagcagctaggactacaggcacatgccaccacacttgggtaattaaaaaataaataaatacttttttgtagagacagggtctcactgtgttgcccaggtctcaaactcccgatctcaagccaccctcccaaaatgctgtgattataggccagagccattgttcccaggctcaattcattggtttttagtacagttcactgagttgtgcaacatcattgctatttaatttcaggctatttcatcatccccaaaagaaccccatacccatgagcagtcagttcccacctctgctttcccaagcctgcggtaaacactaatctgttttctgtctctatggatttgggaattttatgtaaatggaatcatacaatatgtggccctctctgccttcttccttctattagcatgttttcaaggttcattcatgatatagcatgtatcagtactacttcatttctttttatggccgaaattactccattgtatgatatgccatgtttctttatccattcatcagctgatggacatctaggttctgttcatttttgtctatgataaataatgctaccatgatcatttgtgtacaaatttatgtgtggatagatgtttttgattctcttgggtggaattgctggtcaaatggtaagtctatgtttaaattttgaagatggtgaacttttgtagaatgagatagtcgaagctaaaactggagtatggcatctgaaggtaaatggctcatcaataaactcgatatcaac

SEQ ID NO: 18004 - DNA, 1909 bp, Homo sapiens
taaaataaaataaaataaaaataaaagtttgcagtttacacaatcaatcctggaagcattttatttacactgtgggtcccactgctgagctaacttgcatttacaaagcacctctagatactgtcataatgtatccagaaattcaattagagagagtgtgtgtttctgggccaacagaggcaaggttagggggcagaggtaatataagtgagctggcccaagccatgcaacttagcctcatagattgaagtcatcacatgaattaaccccaaactggtacccagtgatgtcagagcatgagtccagatgtgctctgtgcgtgcatgggatggcttccaataaagtcaaatgacacagtcacgtgtcagtttaggtcctctaggaaacagacaccagagagaatgagaagtgcaagtgacatattgggggatgcctatgaaagacaaaggggagagggagcaggatgaggtgggaaggcttcagactgtgacacaggtgtgccacctgtgaaaagtgaaggggaaagaagcagcattctcagggagagcctcagaccacagtgccactctgagcaagtggccaggctgatggagcctgacactaaaggttgcccattagagaagtctcggccctagtgtcccagccacatggagtgtcccagagagcgcagctttggtgtgagctctgagggagcaagtcctctttgaggttctctgaaagaagatctaagctgtgcacttcttgggctgccttaattatgcttcaagggtcagaagggtccaactcttgtttgaaccgagactcaatcccagcctgcaaatgactttccctgattgattacaacttgctttaaaagtccagagacttttatctcttaatgaaagatatttaaatgagggtgatttattactttgaggtcgcggtgatcacgaaagtatgactgagtatatgtgattgatatgggccataatgcttcattcattcacaattcagcagaccaaattaaagagatgcgtgtttaagtttcaatcctgccatgactgtgatcttgggcaagtcacttctctctcagcttcagctccctcatgtccaaaataagtgggttgcactaaatgagatccagcatcctccagttcaattattctgtcattctccttccttcgagcttgactctgatgaggccgggaataaaaatgaatgatttctcacttgaattttcgatgcactgtgaaacatagttaatcttcctcttctctatttcagtgactgtcacaaagatcaagctagattttccaaagcttacctcttagactcaactcagctaattatcagctgatttggcagatcactgtaggaatcactaaaataactccttatgcaactttaaaaatctagcatagcattttaaatattatatgagatgttatagcttcataaatttcctattccatttactttcatcatacttgaaatcagatcactgaaaaacctatgcaaaacatattctaagtgctattttttggtgggtacagattcacaatgtcactttgtttgcatatcatattttattattattagagcaatggctttatctgaaacatgaaagataaacttttttggctgggtgcagtggctcacgcctgtaatcccagcactttgggaggcgggtggattgcctgacctcaggagtttgagaccagcctgggcaacggggtgaaaccctgtctctactaaaatacaaagaattagccgggcatggtggtgtgtgcctgcagtcccagctacttgggagggtgaggtaggagaattgcttgagcccgggaggctgaggttgcagtgagccaagattgcatcactgcactccagcctgggtgacagagtgagactccaactccagaaaaaaagaaac

SEQ ID NO: 18005 - DNA, 1626 bp, Homo sapiens
atctttcgacagaatgaccaccctaaaacaaatactgaatgcctttaaaaaaaaaaaagttgtggttttttgttttttttttttttttttttttggtcgagaactactaatttcatgctatttctttctctctccctttgttgttatttgatttgggggaagggagtgaggcttgtgcagatttgagctatctgaagacatgaacagaagtcaaataccagccatatcagtagagccttccattcaaaagtgaacacacttggtagctgaaccatatctgagcagcgtgattctgttgtcttgcatatgttattctctcaggctgtggatctttgttacagctctaggaaactgtagaaatacaatgctatgtagcttttccaccccatggtctctagtgctgcctatcaacttgtccccttttttcccaataacctgtcttccaggtggtacagttagctgtcactcagctgacaccatgatgtggcagcagagagggaaacctacaagtggtttgcctcattgcctttgccacatctgaagttctcagcagcactaccttagacttcatgagctaataggaaactttttatggtgtaaatgctgtaagactttgtacatacttcagttgttatgaaatctttaaagaaaaaaagaaaaagttacgctaataaattgctgtggtgcaggcactaatggtggtggtttctctttgtcctgtattgcacaaaagtttaactttggactatgaaacagaagcagacttttgataggcttgaagaaacattatttcattaagttattttcaccatattccaattactctaaacaccagtgttcttaattgtggctctagcaatgtgcttttgctaaactgattacatcaaggttcctaaaatgtgctgcagcatctcagttcacacttgtgttatttttgtcttttcttaaacatcaggattttttacatcttccacacaactcttcagttataaatattttgagttctcaccttggaggcacacctttgaaatgtatggcttcgtttttatttgtaccagcccaacatccctaccatggcatgtgttcacacactcgctcctccactccttccttcattcctcttcaaaatgtcactgtttgagtgactcatttcaggtatcatggtaggcacgggactgccatagtcaacaacacagtctctgcctcaaggaacttagattttcccctttattttaagagaaataacattactcttagtggacatgctctatctgttatatttggacaatgagtattccatgattatttattgcatcaagttatttgaaatttaatgcttcttacaaaattccatatactatgcaaatgtaaaatgaagccctatttaaaaggtaattttcagaaacaaattatatgattctcagctattactgtttataaatatcttgcttctgaaaagcaagtttgcttccttgactctttcccctggttttgaattctgcctggattttttattcatgttcagtaaaactaaaaccctgcttcccagaagaactgttttggagtgcagctatgagtgggggtgatacaatgtgttcaatataatagaataaaaataagttttct

SEQ ID NO: 18006 - DNA, 2375 bp, Homo sapiens
  CDS (342)..(1811)
taatttaaaccagtgtttgtgcggttctgattcatctgctgtggttcccgaagcttgagatctaaggagtacagggtcttttgtgatgacaatatgactaatagtaaaggaagatctattaccgataaaacaagtggtggtccaagtagtggaggaggttttgtagattggactttacgtttaaacacaattcaatccgacaagtttttaaatttactcttgagtatggttccagtgatttaccagaaaaaccaagaagacaggcacaaaaaagcaaacggcatttggcaagatggatatcaactgcagtacagacttttagtaatagatctgagcaacacatggagtatcacagtttctcagagcagtcttttcatgccaataatgggcacgcatcatcaagctgcagccaaaagtatgatgactatgccaattgtaattactgtgatggaagggagacttcagaaaccactgccatgttacaagatgaagatatatctagtgatggtgatgaagatgctattgtagaagtgaccccaaaattaccaaaggaatccagtggcatcatggcattgcaaatacttgtgccctttttgctagctggttttggaacagtttcagctggcatggtactggatatagtacagcactgggaggtgttcagaaaagttacagaagttttcattttagtccctgcacttcttggtctcaaagggaacttggaaatgacattggcatccagattatccactgcagtaaatattgggaagatggattcacccattgaaaagtggaacctaataattggcaacttggctttaaagcaggttcaggcaacagtagtgggttttctagcagctgtggcagcaattatattgggctggattccagaaggaaaatattaccttgatcattccatacttctgtgctctagcagtgtggcaactgccttcattgcatctcttctgcagggaataataatggttggggttatcgttggttcaaagaagactggtataaatcctgataatgttgctacacccattgctgctagttttggcgaccttataactcttgccatattggcttggataagtcagggcttatactcctgtcttgagacctattactacatttctccattagttggtgtatttttcttggctctaacccctatttggattataatagctgccaaacatccagccacaagaacagttctccactcaggctgggagcctgtcataacagctatggttataagtagcattgggggccttattctggacacaactgtatcagacccaaacttggttgggattgttgtttacacgccagttattaatggtattggtggtaatttggtggccattcaggctagcaggatttctacctacctccatttacatagcattccaggagaattgcctgatgaacccaaaggttgttactacccatttagaactttctttggtccaggagtaaataataagtctgctcaagttctactgcttttagtgattcctggacatttaattttcctctacactattcatttgatgaaaagtggtcatacttctttaactataatcttcatagtagtgtatttatttggcgctgtgttacaggtatttaccttgctgtggattgctgactggatggtccatcacttctggaggaaaggaaaggacccggatagtttctccatcccctacctaacagcattgggtgatctgctcgggacagctctgttagccttaagttttcattttctttggcttattggagatcgagatggagatgttggagactaataaattctacaaactgctctcaagttaccaaggaagaaaatacacgacaaccacttatggctctttttcaaaactcttaaatcagtagtttgacttttgccagggtaatcttcagttggccctgattcaattaaatggccttaatttttttttaaggaatttgtgtcaaaaccagaatgaagagtattcgtgctgcttttcatagaataaatgataatttgacatagacatagatataagttccagctctgaaattaattaggaaagaatataggatgtttacagtgaataattttaaaaccacaaacatagcagaaatgtactttattattaaatttgtaatgcaggattagaagaagcagagctctagtttagcctttcttgtctcacagatgtgctgtatcccaggcatactataaaacgaagagtgcccaaccaagctttgaatcgtattaacaatgcccacctctatgctagctgaggataaatttaccagttgctcatatttaaactgacctaaatatgttttgctgagcataagataaactcacttttacctcc

SEQ ID NO: 18007 - protein, 490 aa, Homo sapiens
MEYHSFSEQSFHANNGHASSSCSQKYDDYANCNYCDGRETSETTAMLQDEDISSDGDEDAIVEVTPKLPKESSGIMALQILVPFLLAGFGTVSAGMVLDIVQHWEVFRKVTEVFILVPALLGLKGNLEMTLASRLSTAVNIGKMDSPIEKWNLIIGNLALKQVQATVVGFLAAVAAIILGWIPEGKYYLDHSILLCSSSVATAFIASLLQGIIMVGVIVGSKKTGINPDNVATPIAASFGDLITLAILAWISQGLYSCLETYYYISPLVGVFFLALTPIWIIIAAKHPATRTVLHSGWEPVITAMVISSIGGLILDTTVSDPNLVGIVVYTPVINGIGGNLVAIQASRISTYLHLHSIPGELPDEPKGCYYPFRTFFGPGVNNKSAQVLLLLVIPGHLIFLYTIHLMKSGHTSLTIIFIVVYLFGAVLQVFTLLWIADWMVHHFWRKGKDPDSFSIPYLTALGDLLGTALLALSFHFLWLIGDRDGDVGD

SEQ ID NO: 18008 - DNA, 2158 bp, Homo sapiens
  CDS (208)..(2157)
gaaaatgtgaagccttctggaagacaaattgggaagttgagccacagcaatccaaccattttgtttgattatatcttgtcacaaatacagaagtatgataacttaataacacctgtagtagattcattgaaatacctcacttcactgaattatgatgtcttggcctattgtatcattgaagctttagctaatccagaaaaggaaagaatgaaacatgatgacacaaccatctcaagctggcttcagagtctggctagtttctgtggtgcagtttttcgtaaatatccaattgatcttgctggtcttcttcagtatgttgccaatcagctaaaggcgggcaaaagttttgacctgcttatattgaaagaagtggtacaaaaaatggcaggaatagaaattacagaggaaatgacaatggagcaactagaggctatgactggtggagagcagctaaaagctgagggtggttattttggtcagatcagaaacactaaaaaatcctctcagagattaaaggatgctctattggaccatgatcttgcccttcctctctgtctgcttatggctcagcagagaaatggggtaatctttcaggaaggtggagagaaacatttgaaacttgtgggaaagctctatgaccagtgtcatgataccctggtgcagtttggtgggtttttagcatctaatctgagcacagaagattatataaagcgagtgccttcaattgatgtactctgtaatgaatctcatacaccccatgatgcagcatttttcctgtctaggccaatgtatgcccatcatatttcgtcaaagtatgatgaacttaaaaaatcagaaaagggaagtaaacagcaacataaagttcataagtacattacatcatgtgagatggtgatggcgcctgtccatgaagcagtggtctccttacatgtttccaaagtctgggatgacatcagccctcaattctatgctacattctggtcattgacaatgtatgaccttgcagttccacacaccagctatgaacgagaagtcaataaacttaaagtccagatgaaagcaattgatgacaatcaggaaatgcccccaaataaaaagaaaaaagagaaggagcgctgtactgcccttcaggacaagcttcttgaagaagaaaagaaacagatggaacatgtacagagagttctacagagattgaaactggaaaaggacaactggcttttagcaaaatctaccaaaaatgagaccatcacaaaatttctacagctgtgtatatttcctcgatgtattttttcagcaattgatgctgtttactgtgctcgttttgttgaattggtacatcaacagaaaactccaaatttttccacacttctttgctatgatcgagttttctctgacataatttacacagttgcaagctgtactgaaaatgaagccagtcgatacggaaggtttctttgctgcatgttagagactgtgaccaggtggcatagtgatagagccacatatgaaaaggaatgtggaaactatccaggattccttaccatattacgggcaactggatttgatggtggaaataaggctgatcaattagactatgaaaattttcgacatgttgtacataaatggcattacaaactaaccaaggcatcggtacattgccttgaaacaggcgaatatactcacatcaggaatatcttgattgtgctaacaaaaatacttccttggtacccaaaagttttgaatctgggtcaagctttggaaagaagagtacacaaaatctgccaagaagaaaaagagaagaggccagatctatatgcattggctatgggctactctgggcagttgaaaagtagaaagtcatacatgatacctgaaaatgagtttcatcacaaagacccccctccgaggaatgcagttgccagtgtgcaaaatgggcctggtggtgggccttcttcatcatcaataggaagtgcatctaaatcggatgaaagcagtactgaggagactgataaatcaagggagagatctcagtgtggtgtgaaagctgttaataaagcttctagtaccacacctaaagggaattcaagcaatggaaatagtggctctaacagcaacaaagctgttaaagaaaatgacaaagaaaaagggaaagagaaag

SEQ ID NO: 18009 - protein, 650 aa, Homo sapiens
MKHDDTTISSWLQSLASFCGAVFRKYPIDLAGLLQYVANQLKAGKSFDLLILKEVVQKMAGIEITEEMTMEQLEAMTGGEQLKAEGGYFGQIRNTKKSSQRLKDALLDHDLALPLCLLMAQQRNGVIFQEGGEKHLKLVGKLYDQCHDTLVQFGGFLASNLSTEDYIKRVPSIDVLCNESHTPHDAAFFLSRPMYAHHISSKYDELKKSEKGSKQQHKVHKYITSCEMVMAPVHEAVVSLHVSKVWDDISPQFYATFWSLTMYDLAVPHTSYEREVNKLKVQMKAIDDNQEMPPNKKKKEKERCTALQDKLLEEEKKQMEHVQRVLQRLKLEKDNWLLAKSTKNETITKFLQLCIFPRCIFSAIDAVYCARFVELVHQQKTPNFSTLLCYDRVFSDIIYTVASCTENEASRYGRFLCCMLETVTRWHSDRATYEKECGNYPGFLTILRATGFDGGNKADQLDYENFRHVVHKWHYKLTKASVHCLETGEYTHIRNILIVLTKILPWYPKVLNLGQALERRVHKICQEEKEKRPDLYALAMGYSGQLKSRKSYMIPENEFHHKDPPPRNAVASVQNGPGGGPSSSSIGSASKSDESSTEETDKSRERSQCGVKAVNKASSTTPKGNSSNGNSGSNSNKAVKENDKEKGKEK

SEQ ID NO: 18010 - DNA, 1381 bp, Homo sapiens
  CDS (18)..(671)
tccattctctgggacacatgacgcctgtcctgtcgccccagaacctgctgtcttgtgacacccaccagcagcagggctgccgcggtgggcgtctcgatggtgcctggtggttcctgcgtcgccgaggggtggtgtctgaccactgctaccccttctcgggccgtgaacgagacgaggctggccctgcgcccccctgtatgatgcacagccgagccatgggtcggggcaagcgccaggccactgcccactgccccaacagctatgttaataacaatgacatctaccaggtcactcctgtctaccgcctcggctccaacgacaaggagatcatgaaggagctgatggagaatggccctgtccaagccctcatggaggtgcatgaggacttcttcctatacgagggaggcatctacagccacacgccagtgagccttgggaggccagagagataccgccggcatgggacccactcagtcaagatcacaggatggggagaggagacgctgccagatggaaggacgctcaaatactggactgcggccaactcctggggcccagcctggggcgagaggggccacttccgcatcgtgcgcggcgtcaatgagtgcgacatcgagagcttcgtgctgggcgtctggggccgcgtgggcatggaggacatgggtcatcactgaggctgcgggcaccacgcggggtccggcctgggatccaggctaagggccggcggaagaggccccaatggggcggtgaccccagcctcgcccgacagagcccggggcgcaggcgggcgccagggcgctaatcccggcgcgggttccgctgacgcagcgccccgcctgggagccgcgggcaggcgagactggcggagcccccagacctcccagtggggacggggcagggcctggcctgggaagagcacagctgcagatcccaggcctctggcgcccccactcaagactaccaaagccaggacacctcaagtctccagccccactaccccaccccactcctgtattcttttttttttttttttttagacagggtcttgctccgttgcccaggttggagtgcagtggcccatcagggctcactgtaacctccgactcctgggttcaagtgaccctcccacctcagcctctcaagtagctgggactacaggtgcaccaccacacctggctaatttttgtattttttgtaaagaggggggtctcactgtgttgcccaggctggtctcgaactcctgggctcaagcggtccacctgcctccgcctcccaaagtgctgggattgcaggcatgagccactgcacccagccctgtattcttattcttcagatatttatttttcttttcactgttttaaaataaaaccaaagtattgat

SEQ ID NO: 18011 - protein, 218 aa, Homo sapiens [sequence omitted]

SEQ ID NO: 18012 - DNA, 1968 bp, Homo sapiens
gcttttgctacattttggtggcattttaactagttatctgaatatttattaatcgtacttcctcttgtaaagttaactacttacttttttgttgttgtttttttaacatcaggttctgtatctaataggagatgtaacactttatttcatggcaggcttttattgcagagacttgaagtcttagttttttaaactggcacataaaacactttttgctgttatttttatttatgtcaatactgcagagtatctttatgccttattcaagtggattctgagcctgtatgtcacaatgtaaacactggaggttcactcacctacgcactcacccaccacctctgaaagaaacagaaactgcagagaaagacagcatcttagctcattttgtttttaaatgaggttttagacgcttgccacttcctaagggaaatcctaaaacagagcaagtgatgctcccaggtatcactgtgaacttttttctttcaaagtgtgaatttttacactggctttttcatttttttaaagtaattgaagcttgtggctttacaacttagtgttttttgctatccagataacaagtttcattgtttagaacccagtgacacttaataggtagataaattgtcctttaaaatatcccagatgatatacacaatatggtacatttgtgctctctctctctgtttttctctctttctctttctagttagatcaagataacgatgacttgtaccctccctgattctgttacagtagggcccgggcagatctgtgtttgttaaacaggccttgtttgtgcatgctttgctatgaatgaagttcctttaaggacaaagaaaagcacacttttcttcttttgagcatatctgcttttactttaaatctgctaatttctaaaatgtagagtccttcaccaatcccagagactcaatttggaaatgaactgatttcaagccgttactgtgaataaagcaccccagcattttgtataagctcttaattaaacctgtacagcttctttacctgatttaagaaagggagacaagcaataggggggaataagcttcttcaaaattcattccaagcacaaaagaaattttttccctttgcatataaacttgacatcagttgattctgttggggtcggggtgggtatgcagggattgccttttattatcaagtgatttatttcaagagcctttgaggggattcaggtgaaggaacccccatctgtgctggagagttggatactcctttaaatagcccccaccacagtcataacaataatgataatgctggattatttgttaagccaaggttgtctgcctcatatccatcatgctgtttgcaatattcttgctttcaatcaatttatactgagtgtaactttaggatttctgctattaaatgcatgctctctatcctgcttcagtttctggctttgctttgtctgtttcaaaatatgtagcttcctcttttgtacaacaaaaaactcattctcacttttactaaatatactgtaggagtcatcattgatgttatttttctcttatgtatctgtaaagatttttggcatatgaatgtaatattaaagtcaatgatgctataacttgcgatgtttgcatcatgtcaacctttttgaaggagtgaaaaagccctactatgtttttaaatagcaagtgtaagctcagtgctagagtggatatacacaccgcatgttttcatatgtggcacttttatgtatcatgttgggttattgttctagactggactgttaaatactatgtttgaggctgggttgtcatttttataactgtcttggtgttttatggccattatttattacttttgatacacagaatgagctgcatgcatttatagagcaataagaggatgtatttaatgtgccttgtttttaactgaataagaactggaagcatgaatcaataaaactgattaaaatggtct

SEQ ID NO: 18013 - DNA, 3026 bp, Homo sapiens
  CDS (268)..(1608)
tatctagatcagaaacttggaggatcttcaggcccactgccccaggtcattgggctgactgcctcggttggtgttggggatgccaaaaacacagatgaagccttggattatatctgcaagctgtgtgcttctcttgatgcgtcagtgatagcaacagtcaaacacaatctggaggaactggagcaagttgtttataagccccagaagtttttcaggaaagtggaatcacggattagcgacaaatttaaatacatcatagctcagctgatgagggacacagagagtctggcaaagagaatctgcaaagacctcgaaaacttatctcaaattcaaaatagggaatttggaacacagaaatatgaacaatggattgttacagttcagaaagcatgcatggtgttccagatgccagacaaagatgaagagagcaggatttgtaaagccctgtttttatacacttcacatttgcggaaatataatgatgccctcattatcagtgagcatgcacgaatgaaagatgctctggattacttgaaagacttcttcagcaatgtccgagcagcaggattcgatgagattgagcaagatcttactcagagatttgaagaaaagctgcaggaactagaaagtgtttccagggatcccagcaatgaggatcctaaacttgaagacctctgcttcatcttacaagaagagtaccacttaaacccagagacaataacaattctctttgtgaaaaccagagcacttgtggacgctttaaaaaattggattgaaggaaatcctaaactcagttttctaaaacctggcatattgactggacgtggcaaaacaaatcagaacacaggaatgaccctcccggcacagaagtgtatattggatgcattcaaagccagtggagatcacaatattctgattgccacctcagttgctgatgaaggcattgacattgcacagtgcaatcttgtcatcctttatgagtatgtgggcaatgtcatcaaaatgatccaaaccagaggcagaggaagagcaagaggtagcaagtgcttccttctgactagtaatgctggtgtaattgaaaaagaacaaataaacatgtacaaagaaaaaatgatgaatgactctattttacgccttcagacatgggacgaagcagtatttagggaaaagattctgcatatacagactcatgaaaaattcatcagagatagtcaagaaaaaccaaaacctgtacctgataaggaaaataaaaaactgctctgcagaaagtgcaaagccttggcatgttacacagctgacgtaagagtgatagaggaatgccattacactgtgcttggagatgcttttaaggaatgctttgtgagtagaccacatcccaagccaaagcagttttcaagttttgaaaaaagagcaaagatattctgtgcccgacagaactgcagccatgactggggaatccatgtgaagtacaagacatttgagattccagttataaaaattgaaagttttgtggtggaggatattgcaactggagttcagacactgtactcgaagtggaaggactttcattttgagaagataccatttgatccagcagaaatgtccaaatgatatcaggtcctcaatcttcagctacagggaatgagtaactttgagtggagaagaaacaaacatagtgggtataatcatggatcgcttgtacccctgtgaaaatatattttttaaaaatatctttagcagtttgtactatattatatatgcaaagcacaaatgagtgaatcacagcactgagtattttgtaggccaacagagctcatagtacttgggaaaaattaaaaagcctcatttctagccttctttttagagtcaactgccaacaaacacacagtaatcactctgtacacactgggatagatgaatgaatggaatgttgggaatttttatctccctttgtctccttaacctactgtaaactggcttttgcccttaacaatctactgaaattgttcttttgaaggttaccagtgactctggttgccaaatccactgggcacttcttaaccttctatttgacctctgcgcatttggccctgttgagcactcttcttgaagctctccctgggcttctctctcttctagttctattctagtctttttttattgagtcctcctctttgctgatcccttccaagggttcaatatatatacatgtatatactgtacatatgtatatgtaactaatatgcatacatacaggtatgtatatgtaatggttatatgtactcatgttcctggtgtagcaacgtgtggtatggctacacagagaacatgagaacataaagccatttttatgcttactactaaaagctgtccactgtagagttgctgtatgtagcaatgtgtatccactctgcagtggtcagcttttagtagagagcataaaaatgataaaatacttcttgaaaacttagtttactatacatcttgccctattaatatgttctcttaacgtgtgccattgttctctttgaccattttcctataatgatgttgatgttcaacacctggactgaatgtctgttctcagatcccttggatgttacagatgaggcagtctgactgtcctttctacttgaaagattagaatatgtatccaaatggcattcacgtgtcacttagcaaggtttgctgatgcttcaaagagcttagtttgcggtttcctggacgtggaaacaagtatctgagttccctggagatcaacgggatgaggtgttacagctgcctccctcttcatgcaatctggcgagcagtggtgcaggcggggagccagagaaacttgccagttatataacttctctttggcttttcttcatctgtaaaacaaggataatactgaactgtaagggttagtggagagtttttaattaaaagaatgtgtgaaaagtacatgacacagtagttgcttgataatagttactagtagtagtattcttactaagacccaatacaaatggattatttaaacc

SEQ ID NO: 18014 - protein, 447 aa, Homo sapiens [sequence omitted]

SEQ ID NO: 18015 - DNA, 2000 bp, Homo sapiens
gtgacttcgcgccgctgtgtgcgcctccccgagcgccggctgcgccccccagcccggcccggggcctaccgcctgcccggccccctgccactgccaggaggacggcatcatgctgtctgccgactgctcttgagcttgggctgtccgccataccgggggacctggatcccctgacggcttacctattccatgtcagtagtggcaaacctttacaggattatgaatacaaaatgccactggtctcctgaagatacagcagcaaaatgaaacatccacaaatatgacttaaattgagaatatgtgcatgtctataactccacccttcactgtgctgcggttgttctctggaccactcctatttcatcagtgttattgtcaacctgaagaacaagcagaaagaggctctctgaaatgaaatggatgcttatttgggaagagagcattgcaacgggaatacacatgccatcgtaaatgacaagaatattcagggaggaccccatcacatttggctgccatatctccttggactcctcttggctgtgacagggtctcagacggcccttgccgttgatgaccttgatggtttgaagagccctaatcaggtgcattgcaggacgctcctcagttgggatttgtctgaggctttcctcgtaaatagcctggggttatgggttttgggaggaagaccacacagataaatgccattctcatcatgtcataacaagggtacacacgctgctgacatgactcttcactgacagtggtggctgtagtcggctggctgaggtctccccactgtgaagtccccctctccatgctgtactctctggaaggacgtcgccatgcacagccgacacttaggggtatgggttgtgctccacttccgaggaggagaagtagctacatgagtgactgggaaatgtcctgggggggatactcatccatgcctccacattacttatgtactcaatcttttatttatattgctatggactcatggatactcagcccatgctcgggctggactccagtgtgactttgcttcttttcctgctcagcttcttcgaggttggccttggtgagctcccgtggtgggttcccagctcctgtgtgcctctgacaggtgctcatcacttggctttttgggcatctccttaatttctgctactaaagatgctcctggcttatcttctgcatgtcctgcctttgcccttgaatcagtcaattctccaagaagctctggctcctttcctagaacagtgttagaaaccaagatctgggcactggtgtgttcattgctagtgaggtgttgttgcttctagactctctcagctgatagagcaagggaatgtttaagccatttagaacataaatgcattcatttaaaaacatggactatgtattcactgtgccttgggccccaagctgggtgttgaggatcttgagaaaataaatcaaggaagcccatggtctagggtagtgctggtgaggagataacagactcttgagatggcactagggccatggcggagacagacctggacactagtgggacccagcaaagacccacagcagcctggggaggcggcttccagagtgctgcgactttggaacatgaatactcctgagggttcacaaacgagcctggggggtattccaggaccagctggtaggggggcaaaggttgggtcatgaactatggggaatgcaagaattgcaagaggttgaacatgcctgggggtgcagagacagaggctgaggtgcagggcagtctgagacatggttaggagcctgggcattctcttgagagacaggggagaagaaaattcagatggagcgttcatttcaggaaggccaccctgggatctgggcaggagatgaatacctggcagggtcagggaagggaaggtaattgaaagtttacaaaaacaaaaccccattcacattcttaaagtattcttcatagaggtactatttcaataaacacatgctttatttgt

SEQ ID NO: 18016 - DNA, 2593 bp, Homo sapiens
tttctatgggtaataagaggatacctttatagtttcatgatgtggagaccaagatacataagaaagcaagaatgagtctccgggtgttccctctgatcagcaaacatgaattcataatttcatttactctcatttttgtaatgcactctgagcaatcctccaggcagatcctatttactaagcttcaggcttttgtcccattttataatgcccaaacacatggagaaaacattttgttgtttttaaaaacaggtatgggatttctgatataatcaattttattgacttcttgggagttgtaatgatctgtgactcactgcataatattgtagttttatagggtggcacatcaccctgtgtaaaacaactttaatgacctgaggactgatgagtacaggaagtgaggtttatcatgagtagcatttattaagcatctgctagaatcaaagcactgcattagctactaaggtacaaagtaagacacagtttaataaggaagacagggcatctacccaagtcaacagttcagtgacatctgttatttgaaccacacaccaatgcaaccgaagtaaatgctgaaagggtgagaagaaggaatagattactatgcatttttgagaggatgaagaaggcttcttggagaaggtttctgaaaagagatacggaattaagagaaatagaaaagagcactgacgaagcactcaggatggctattcaaggaattggggatccacagcagctgtgcacaaccatccctaatgccagaaaaatggggtaagggtgaagggaactgggtctagagctttgcatgtttttttctggttaacccttagagtcaccctgaaggtgtggatcccatcttataataaggtgaggacactgagtcaggaaactaacttgctaaaatcaagtcctcccagtcctcccatcaggtccttccagatctggaggagccaggatttgaactcacatttgtctgacttcaaaatccatgctttttcttgtgttccaaattgcacaatggagtcactgccagttcaagctcctatgaaaagggatggatgtgaaaagtcatttgttgattccacagatttttagtaggtaccatgtctcctgcctttatcactatcctactcctctgctacaacttctctgctacaggcacccactgcagttacttgatatgagttaaatgaatccatccatccaaacttccattcattgaataaatacttagcaatggcttcctttgtatcaggcactattctaggagctggggctacagtgcagatggaaaccagcaaagctcactgccctcatggagcttatatgtgagtgaataaatctcagggtggttctcctgtcataggtcctggctcctctgccagctcttccaaatgggttcagagaggttttctccttgtcctgttgtgtaactgataatcccatggtggacctcactttgctattcatatgcactaagtagtttatggtgtgctttgtggctggcaattgtgacagattctattcttctattggtatgtggtttctttggggcatttgtttggatactgatggcatcttccgggggtctgaggcacctacacaaacctcaggtcactatcacgtgatactggagttgcctgttaaattatatttcttcttccacaaaactgcaggttccctgagggaaaggtctatgtcctgctcatttttggatccctaatggctggcacagtacctggtgcataatatggttcaacaaatatttgtaaaatgaatgaatcaaatagtccttcaaagcatcttcagaatcaagattgtcatctagattgcacccgaagtttatctttctagtattcagaatataatcaatcattgcttaaattattccatttcatcattcttgaataaaagctactaattttaaatactaatatctgagatatcttcgaaaagaagattagtcgttgtatgtgttgcttataaattttctctatggtggaaaatattcccaaaccatgtctaagcaatgaaaaaccagtgttctggcaggaaataaactggtgtttgttgtgttttgtatctgtcttcccgttccaaatcatttatatatacttgatggtctgtgggcttgacttgcaagtattttcctgggagacatttttattcaaaagacctgtattgcctgccaaaccttcatttaagagactcattatggatgtcatctgcatcattgcaaacttttctggtcgtctctataaatagcaagataatatttacagagttttacattggctcttgaattttaaaatattcttatagacaaacattaattggaatggggggtaaggaggtaggaatggcttacttgcggaaatgcaggctcattgttgtgtctagtaggtgctaggtgcattcacacatctcttaagctttaaacaacctattgagccggtttccatttccttgatctattagatttaaaaaaatgaagcataaaggagttggctcttgccctaagtcatactactgatggaatgagaatacaaaccaaaaacactttattcaagtccaggaaatatctgccttg

SEQ ID NO: 18017 - DNA, 2866 bp, Homo sapiens
  CDS (453)..(1367)
accaggaaactgtcaaagtgcaaatacacagcagagcttcagaatatatcactgatgtccattcgaatgacctgtctacaccacagatccttccatcaaatgaaggtgttaatccacgtttatcggcaagccctcctaaatcaggcaatttgtggccaggattggcaccaccacacaaaaaagctcagtctgcatctccaaagagaaaaaaacagcacaagaaatacagaagtgttatttcagacatatttgatggaacaatcattagttcagtgcagtgtctgacttgtgacagggtgtctgtaaccctcgagacctttcaagatctgtccttgccaattcctggcaaggaagaccttgctaagctgcattcatcaagtcatccaacttctatagtcaaagcaggatcatgtggcgaagcatatgctccacaagggtggatagcttttttcatggaatatgtgaagaggtttgttgtctcatgtgtccctagctggttttggggtccagtagtaaccttgcaagattgtcttgctgccttctttgccagagatgaactaaaaggtgacaatatgtacagttgtgaaaaatgcaaaaagttgagaaatggagtgaagttttgtaaagtacaaaactttcctgagattttgtgcatccaccttaaaagattcagacatgaactaatgttttccaccaaaatcagtacccatgtttcatttccgctagaaggcttggatcttcagccatttcttgctaaggatagtccagctcaaattgtgacatatgatcttctgtcagtcatttgccatcatggaactgcaagtagtggacactatatagcctactgccgaaacaatctaaataatctctggtatgaatttgatgatcagagtgtcactgaagtttcagaatctactgtacaaaatgcagaagcttacgttcttttctataggaagagcagcgaagaggcacaaaaagagaggagaaggatatcaaatttattgaacataatggaaccaagcctccttcagttttatatttctcgacagtggcttaataaatttaagacctttgccgaacctggccctatttcaaataatgactttctttgtattcatggaggtgttcctccaagaaaagctggttatattgaagacctggttttgatgctgcctcagaacatttgggataacctatatagcaggtatggtggaggaccagctgtcaaccatctgtacatttgtcatacttgccaaattgaggcggagaaaattgaaaaaagaagaaaaactgaattggaaatttttattcggatcctccaggtcctattgacaatactaagattgcagtcactaaatgtggtaatgtgatgcttaggcaaggagcagattctggccagatttctgaagaaacatggaattttctgcagtctatttatggtggagggcctgaagttatcctgcgacctccggttgttcatgttgatccagatatacttcaagcagaagaaaaaattgaagtagaaactcggtctttgtaatttttaggatgtagagagttctaatgaggaatcattttcatgtgccctgacatgtacacatgcgaaaacattcctaaaagcgtgtttatttgctttattttttttcatcatttatcccatttatttcttcttagtgggcattatggaagaatatattaaaatgtgtaatataccacaggttggtatatttagttttaaatacttaccataaagtctttcagtgtaatttttttttgagacagagtcttgctttgtcacccaggctggagtgctgtggtgttacctcagctcactgcagcctccacctcctgggttcaagcgattctcctgcctcagcctctcgagtagctgggattacaggcacctgccaccatgcccggctaatttttgtattttagtagagatggggtttcaccatgttggccaggctagtctcaaactcctgacctcaggtgatccacccacctcggcctcccaaagtgctgggattacaggtgtgagccacagcgcctggcccagtgtaatatttttgaaagaggagggacaattgtgaaatcagtaggttatctttaatctttacactacatgcagatccatagtatcctttgtagtgttgtaaatacttttgctttgaaaactttttcattgtcctaaatcaccctgactctgaccagtctttcagttctccaaaagcccaatttaattgtatagttttgtcatggcttcatataataaagagcctattttaagttgaaagtagtagtcagaaaattgttaatttcctaaagctcaggaaactagggtgtcactttttttgcactgcagcatatacactaactagcttattaaaatttacaaaatgtctttttgaatgtatcaaggatatatttagtttgagtggaatttgtcagcagatatcagtaacttattgccgcttatattgtacaatgttaaacttcaattcctgtaacctggttagtattaatgtcagtgactaaaaaacttagagttagttttagggcactttttattttgagagcatgaagtgtggaatgtgtcactacgattgttgataaagctgaggccacttgcaacttgattttttaaatgaaatagataaagtctttttgaataatatagtatgcactgctatttgcttgattatgtaatgtcaaaagtttaactatattccaagtacaaaaacatactggattacattgaggatgttgaatagcattcatgatggctttgttttggtttggggcagctgtcaccagctaaagcaatgttgttaaaattagctcaataaaaatgtctttaaaatgt

SEQ ID NO: 18018 - protein, 305 aa, Homo sapiens
MEYVKRFVVSCVPSWFWGPVVTLQDCLAAFFARDELKGDNMYSCEKCKKLRNGVKFCKVQNFPEILCIHLKRFRHELMFSTKISTHVSFPLEGLDLQPFLAKDSPAQIVTYDLLSVICHHGTASSGHYIAYCRNNLNNLWYEFDDQSVTEVSESTVQNAEAYVLFYRKSSEEAQKERRRISNLLNIMEPSLLQFYISRQWLNKFKTFAEPGPISNNDFLCIHGGVPPRKAGYIEDLVLMLPQNIWDNLYSRYGGGPAVNHLYICHTCQIEAEKIEKRRKTELEIFIRILQVLLTILRLQSLNVVM

SEQ ID NO: 18019 - DNA, 3088 bp, Homo sapiens
  CDS (193)..(1728)
ttgcttgagtcatcttctgaagctttaaaaacaattgatgaattggccttcaagatagacctaaatagcacatcacatgtgaatattacaactcggaacttggctctcagcgtatcatccctgttaccagggacaaatgcaatttcaaattttagcattggtcttccaagcaataatgaatcgtatttccagatggattttgagagtggacaagtggatccactggcatctgtaattttgcctccaaacttacttgagaatttaagtccagaagattctgtattagttagaagagcacagtttactttcttcaacaaaactggacttttccaggatgtaggaccccaaagaaaaactttagtgagttatgtgatggcgtgcagtattggaaacattactatccagaatctgaaggatcctgttcaaataaaaatcaaacatacaagaactcaggaagtgcatcatcccatctgtgccttctgggatctgaacaaaaacaaaagttttggaggatggaacacgtcaggatgtgttgcacacagagattcagatgcaagtgagacagtctgcctgtgtaaccacttcacacactttggagttctgatggaccttccaagaagtgcctcacagttagatgcaagaaacactaaagtcctcactttcatcagctatattgggtgtggaatatctgctattttttcagcagcaactctcctgacatatgttgcttttgagaaattgcgaagggattatccctccaaaatcttgatgaacctgagcacagccctgctgttcctgaatctcctcttcctcctagatggctggatcacctccttcaatgtggatggactttgcattgctgttgcagtcctgttgcatttcttccttctggcaacctttacctggatggggctagaagcaattcacatgtacattgctctagttaaagtatttaacacttacattcgccgatacattctaaaattctgcatcattggctggggtttgcctgccttagtggtgtcagttgttctagcgagcagaaacaacaatgaagtctatggaaaagaaagttatgggaaagaaaaaggtgatgaattctgttggattcaagatccagtcatattttatgtgacctgtgctgggtattttggagtcatgttttttctgaacattgccatgttcattgtggtaatggtgcagatctgtgggaggaatggcaagagaagcaaccggaccctgagagaagaagtgttaaggaacctgcgcagtgtggttagcttgacctttctgttgggcatgacatggggttttgcattctttgcctggggacccttaaatatccccttcatgtacctcttctccatcttcaattcattacaaggcttatttatattcatcttccactgtgctatgaaggagaatgttcagaaacagtggcggcggcatctctgctgtggtagatttcggttagcagataactcagattggagtaagacagctaccaatatcatcaagaaaagttctgataatctaggaaaatctttgtcttcaagctccattggttccaactcaacctatcttacatccaaatctaaatccagctctaccacctatttcaaaaggaatagccacacagataatgtctcctatgagcattccttcaacaaaagtggatcactcagacagtgcttccatggacaagtccttgtcaaaactggcccatgctgatggagatcaaacatcaatcatccctgtccatcaggtcattgataaggtcaagggttattgcaatgctcattcagacaacttctataaaaatattatcatgtcagacaccttcagccacagcacaaagttttaatgtctttaagaaaaagaaatcaatctgcagaaatgtgaagatttgcaagcagtgtaaactgcaactagtgatgtaaatgtgctattacctaggtaactgcatatatataaggaatgtattttgttaagaaggcttttgtgaaattcagaatttttctttttaatatatttcttccatggaagagttgtcatcactaaaacttcagtactgagagtaacatgactcagtagccacagaagctatgatttgtaaaatatataattgaatcagagtaatcataatgcaggggagacattcaaattagagacaagggagaagcaatgctgaggaagaccctagatagagctcattttactccacctaatcgttatatctggatatacccattttctgcatcttctttctcaacaataaactgtccttgctttggagactttaagacatttcctaaagcacaaataaaagcctcgtatttccccattgagagttttgttccaaggaatatgaagtgagacatatgggtgagtcataataatcaaaataatttatgaagagctgggtctgcaatagctagtctaaaaactacttgtgtgtcagtcctctggttatagtatataagagcctgaggaggtctggcaagatagatggtgtattatttatggatcaggctgctgcatacaaaccttgcatactattatgcagcttacctaactctcagactattctgagtaatgcttgcttgctaatgaatgtataggagaccacattgtaattgttcttagatgatggagtccatgcagtttcttagaaatcggtctcagtgcatgctgtgctttttcacatttgctctgggttatctgggaagtatcaggttctgggaggcaacagcattaagtgataagaaaaggagacattctggcaaagccaatctgcttaaaggcaaagtccagaacctggaacctagaggcctttctctctgcacgaaaaacaggtagtttgcagtctgagatatgggagagcttttaggctacacagcaacccaagggacctctcaccttttgctgagcttcaatcaggaagctatttgcctggctccagcagatgatgagataatgaggtagtgggttttttattactgttccattttgcaacatcctgcaacaccatcctgggagacaagagcattacccagcttggctttcacgggggagggttgtattcagt

SEQ ID NO: 18020 - protein, 512 aa, Homo sapiens
MDFESGQVDPLASVILPPNLLENLSPEDSVLVRRAQFTFFNKTGLFQDVGPQRKTLVSYVMACSIGNITIQNLKDPVQIKIKHTRTQEVHHPICAFWDLNKNKSFGGWNTSGCVAHRDSDASETVCLCNHFTHFGVLMDLPRSASQLDARNTKVLTFISYIGCGISAIFSAATLLTYVAFEKLRRDYPSKILMNLSTALLFLNLLFLLDGWITSFNVDGLCIAVAVLLHFFLLATFTWMGLEAIHMYIALVKVFNTYIRRYILKFCIIGWGLPALVVSVVLASRNNNEVYGKESYGKEKGDEFCWIQDPVIFYVTCAGYFGVMFFLNIAMFIVVMVQICGRNGKRSNRTLREEVLRNLRSVVSLTFLLGMTWGFAFFAWGPLNIPFMYLFSIFNSLQGLFIFIFHCAMKENVQKQWRRHLCCGRFRLADNSDWSKTATNIIKKSSDNLGKSLSSSSIGSNSTYLTSKSKSSSTTYFKRNSHTDNVSYEHSFNKSGSLRQCFHGQVLVKTGPC

SEQ ID NO: 18021 - DNA, 2210 bp, Homo sapiens
tttatattttataaaaaccggctgcaagaaagattcagaaagaatacttagtaagtcatcatatgaaaaaccaacaaaaccatagagtgcagattttttcctaactataagtcacctcatagttgtccaaagccatgataatgatatctcttacaaattgacttctgtaacccccctagaaataacccttttccttatttgattttagtcatcaaacatagtatgatatgggaaaagtcagccatttaccagaaattatcttattttgattttaaaaactcatttctatatgtagttattgtaatgtctatttttttagacttaaagatttatagaagactatagttatctgatttgttattttgcatttttcattctgtaaatctttgcttatggcacattgtgctctctgttttccatggttttattcatttatctcctcctattttgaggggacaacatgggtagttaaatctttgtcaatagtattggagataacactaactgctattatcataacatcttcatttttactgcatgccaaaaccaatgcctgccaaacaaaatcttagacatcccaatataatatgttagttatatttctattcacatcattattgaaaatacccagctcagtgcctggcttaataaatgtttaattcccttacctactcttgctctatttttttatttgaaatggagatgagcaaaataacacattcatggctgaagcaattttttggacatttcttgttaccaaaagatctataatcaggacattgtttatgtaagttggacaaaaaaaattcttcccctttatgtccacccttcctatgattgcaagacaaaatttccctcctttacctcatccctataacatgggaggctgagaaaaatgaggggagatggaaccagatacaaggagatccaataagagaagcttatttaaatattgtgaaataaaggaagaaccaaagcatttttttaagtggggaatccttttgaacagttattatttatccatattattaacaacatcttttctgacaaaatccatcagatgaagtgtaaatggataatcttttaatggatctaaacctagaaagtttcacttactgttcatgtccgtgttccagaattgtgaaatggtgtgtggttttgctttccaagttcttctctgcctcctcttaattctctaattccatgtcttacagaagaatgagaaatttctttcttacttgagtatcatgctctaaaaaacttggcttcagtcacagaaacgctggctctcctgtgcttatattgaagccaactgcctttaattcttgggccctcttatatttttaaggtgcaaaatttgaagtctcagtcaccagacacaggttctatacaattaatgatgagctggagaagtaatatgtagctaatttttcaaaagcattgaatatactttccggaaagaaaacagaaattaaatattgccacatcttgccagaatcccatctgacaccttaactttgtcaggtttcctacaacttgctaatcaagttttatacattctaaatctccccagtttctttggggctggaagatgcaacttccatttaatagaaactttgaaatcttggggtaagggagcagtggggggactagggagaaggataagaaatagaattattgaaaagcccccaccagggaccttcctggccagaatatgcagagtaattcctgctggcttcacctttgaaagtccctcgaaactatgcagatgaaactgagtctgtttttgatattgtcagatgtattctaccttggaagtcccaacacctaaactggaattcttgtatttacatctcctccactgtcccccacaccacccctcaattcctgctgcccctgctaatgttaagcatttttctcttgttatcatcagattcacattaaaaacagatacttacaaactgacttgaagcacagatacttttacgaatgtgataaaatattttcttaagaaaaggaaagaggatgtgggtcaaataaaacaccgcatggatgttgattggtgaatactggtgtaagaaaagggagctcaggaatttttattactgtatttgtaaatgagtttgaaggaatttgtaaatgccactggtacatttttaaggtgacacatttgctccttataaagttattaaaaattacagggtaagctt

SEQ ID NO: 18022 - DNA, 1848 bp, Homo sapiens
  CDS (638)..(1087)
tgcaaatattccaaagacatgattgtaagcctttgttccctgtaaaagattgctctgtattaaaacaaatccaccaaacaacaagtcatagacccgttagaaaccagcattctaaagcatggtttaagtgtgaacaggtgtttgtagcttatctgagactgacagtaggtaaaggggccaaggagagactgctacatggtggtacccaagataattctctgaagagagagacttttgtgtgaggaagacatttattatacagagtgatttattgcaattcttagctactccatcaagctagacttgtcaccatgtcccattaaaagggtttaagaagaattctttctcagaatcctgcattacagtagcatctgcaataaggagaaaattttcttctgggaatcactccaggaaaccttgacccatcctctacttagtcactcttatagagccctgcattttcttttgtagcatttatgacatgtgtaatgttacatttgtttgtgggattatttaaggaatgtctgtcatgtgagacaataagctttatgagtacaggcacctcttctgtcttatttcctatgccccagcacagtccctgacatctagtagaccttcaaaaagttttacggaatgaatgagtgaacaaatgatgcaaagtgttggttgcaggatatctctctcagtcttccaattcttaggagatcagaggcaagagctggtggcctttcaccgcctggctacagtgtactactccctgcacatgtatgagatggctgaggactgctacctgaagaccctgtccctctgtccaccatggctgcagagtcccaaggaggccctgtactatgccaaggtgtattatcgcctgggcagactcaccttctgccagctgaaggatgcccatgatgccactgagtacttccttctggccctggcagcagcggtcctgctgggtgatgaggagcttcaggacaccattaggagcaggctggacaacatctgccagagccccctgtggcacagcaggccctccgggtgctcctcagagagggcgcggtggctgagtggtggtggcctggccctctgaggaaagctgtcctgtctctggacatttggcatggccagactctgaccccactgccctaggctcttaaatactcattgggagggtccgagtccttacctggcctagccccctcatttcacaagaagaagaatgaagtccaggaggagaagggctcattgcaggccacagaaagatttgatggtgcagcgatgagaattcctggttccaggctttgcatctggagcctttaccggttgactgttgccttccacacaaacagcctctgaaaagcactttctccatacataattctggagaagatgagggatcttgccctccaggagccttccttcctcccccaatgaggaaatcagtcactgcactggtgcaaaggcaagcagattggaatttctgctcttcaccgattttctcagggaaagaccccttccccttgccagcagaggaacctgtagttttttccatttctttcttcagaaccaaagtatgtatcactcctcatgctcacagggattgacaggagagaattcaccaggatcttagctcaaaagacacagcctcagaatggccagatggattgcacgaaacctgacttggattcaccatcttcctcctgccataaggctgtgctcccacataacctcccagaagctccagggaagctttccaagagcaaaggcttggaaattgaatgttaagaaaattatgacataaattacatgtaaatagtgtatatgattaaatattgtccagttacattt

SEQ ID NO: 18023 - protein, 150 aa, Homo sapiens
MSEQMMQSVGCRISLSVFQFLGDQRQELVAFHRLATVYYSLHMYEMAEDCYLKTLSLCPPWLQSPKEALYYAKVYYRLGRLTFCQLKDAHDATEYFLLALAAAVLLGDEELQDTIRSRLDNICQSPLWHSRPSGCSSERARWLSGGGLAL

SEQ ID NO: 18024 - DNA, 1932 bp, Homo sapiens
  CDS (748)..(1659)
agactgagctcagtagccaggcatgaaagagactgggcaagttgcaggggctaattggaaaggggctgtcggttgcacttggggtttaaacaagaggtttcttttgcaatgagaatttttaggtggctaagatcagtcttcttggcaaaaaaataaactaagcatagagtgcagttggatatgaccgaggaaattacaaaaagggctccaggagcaaagtctgagctttccttatcagtgttgcagtggaatagctgggggcctgatgctgtttgtgctgatcatactttgcaaatgcccacactttgttgctgtttgtctccttggacgaggtttgctgcaacttcaattccttgacttcggccttactttgttttcatagcagcaagaattgaagacttaagggtttgagcagatggttttctacctaaattgaataattcaattacgtattctcaactagcatggatttgggtcatggaattaaagtagaaacgtatccggcatgacttctttgtgcttatcaaaagtgatcctgataaacagatcttgctctttcatgtaaagaagtaaaagttatttatgattccatctgatatacataggagagaaactgatagaagaattctgatggcaactgtatgatagaagctatataaagtcaagtgtccattttctttcaactatatttgagcatacccaggatttaagtcgtggaactgaacatttatttggctgatcctcatcatgaaccgtgcttttagcaggaagaaagacaaaacatggatgcatgcacctgaagctttatcaaaacatttcattccctataatgcaaagtttcttggcagtacagaagtggaacagccaaaaggaacagaagttgtgagagatgctgtaaggaaactaaagtttgcaagacatatcaagaaatctgaaggccagaaaattcctaaagtggagttgcaaatatcaatttatggagtaaaaattctagaacccaaaacaaaggaagttcaacacaattgccagcttcatagaatatctttttgtgcagatgataaaactgacaagaggatattcactttcatatgcaaagattctgagtcaaataaacatttgtgctatgtatttgacagcgaaaagtgtgctgaagagatcactttaacaattggccaagcatttgacctggcatacaggaaatttctagaatcaggaggaaaagatgttgaaacaagaaaacagatcgcagggttacaaaaaagaatccaagacttagaaacagaaaatatggaacttaaaaataaagtacaagatttggaaaaccaactgagaataactcaagtatcagcacctccagcaggcagtatgacacctaagtcgccctccactgacatctttgatatgattccattttctccaatatcacaccagtcttcgatgcctactcgcaatggcacacagccacctccagtacctagtagatctactgagattaaacgggacctgtttggagcagaaccttttgacccatttaactgtggagcagcagatttccctccagatattcaatcaaaattagatgagatgcaggaggggttcaaaatgggactaactcttgaaggcacagtattttgtctcgacccgttagacagtaggtgctgacatcaagaacaagaaatcctgattcatgttaaatgtgtttgtatacacatgtcatttattattattactttaagataggtattattcatgtgtcaatgtttttgaatattttaatattttgaaaattttctcagttaaatttcctcaccttcactattgatctgtaatttttattttaaaaacagcttactgtaaagtagatcatacttttatgttcccttctgtttctactgtagatgaatttgtaattgaaagacatattatacaaat

SEQ ID NO: 18025 - protein, 304 aa, Homo sapiens [sequence omitted]

SEQ ID NO: 18026 - DNA, 2481 bp, Homo sapiens
  CDS (791)..(1807)
gagcgacgcccacggcctgtctcggccaccagcgtgttccagcgagcgcccagccacctcgctcgcagcctccccagcgcagcagcccggctgtgggcctgcggcagccgggtcttcctggtccccacctcctggggccgacgggcggcaggaaggggctcggcgggacgcgccgtcagggacctgaggaggaacaacggaacgcgttcggaacggcctggactcccgagactcacccgactcgtggccacaccgggagaactgaagcggcagtagccggcggagacgcccgacccgaaggccggctgctagggagcagacagctgaaccgcttgccagacgccgaaacccagtgacgccctccaccgctccaccgtgctcccggctccccgcccccgccgcccgcgggccccaaggcgcatgcgccgcctgtcctggaggggcccatttccttccgtcgtggggggaggcacagtgagtccactggggcacggcagcgtctaagccacaagccgagcacataagccaggtcctaacggagcctatgtgtaagtccactactggtgcaaggttgcacacttctaagaagagcggcgtggggggctcggcgaccttcgcttcagtcgctcccccgtgcagtcccctgtgcccaagacacagcctgatgcttgtgctccggtgggcggggcttggaggcggcgggaactgcaattggtggctttgaaggcgcggcgagcgggaacagctcttgaggagtgagactgcaggagatgtgggccgtgccaaagagatggatgagactgttgctgagttcatcaagaggaccatcttgaaaatccccatgaatgaactgacaacaatcctgaaggcctgggattttttgtctgaaaatcaactgcagactgtaaatttccgacagagaaaggaatctgtagttcagcacttgatccatctgtgtgaggaaaagcgtgcaagtatcagtgatgctgccctgttagacatcatttatatgcaatttcatcagcaccagaaagtttgggatgtttttcagatgagtaaaggaccaggtgaagatgttgacctttttgatatgaaacaatttaaaaattcgttcaagaaaattcttcagagagcattaaaaaatgtgacagtcagcttcagagaaactgaggagaatgcagtctggattcgaattgcctggggaacacagtacacaaagccaaaccagtacaaacctacctacgtggtgtactactcccagactccgtacgccttcacgtcctcctccatgctgaggcgcaatacaccgcttctgggtcaggcgctgacaattgctagcaaacaccatcagattgtgaaaatggacctgagaagtcggtatctggactctcttaaggctattgtttttaaacagtataatcagacctttgaaactcacaactctacgacacctctacaggaaagaagccttggactagatataaatatggattcaaggatcattcatgaaaacatagtagaaaaagagagagtccaacgaataactcaagaaacatttggagattatcctcaaccacaactagaatttgcacaatataagcttgaaacgaaattcaaaagtggtttaaatgggagcatcttggctgagagggaagaacccctccgatgcctaataaagttctctagcccacatcttctggaagcattgaaatccttagcaccagcgggtattgcagatgctccactttctccactgctcacttgcatacccaacaagagaatgaattattttaaaattagagataaataagacgtgcgtggtttcttaagcacagctcctccttcttgatattgcacatgcacttcagttcatggctagctgtatagcttccgtctgtaaacttgtattttcaagaatccttggtattgaatttttagaaatgctcacataattgttgggactgattcattcctccacgatatgcctcctctctctgatatcctgctaactgtagccgttgtggcatttgagatgacaggacatatatatatatggccccacacttgaccttgagtgcctgaatgctctgaaatcaagcatatggcacagcgctcaagacttttgggtttgtgtccttttttctatggctgtctcttctcaattctggagaggtctggttccagtggctggtttccagggattgattcttaagctctggatcacagagagaagcaacaaggaactatactcaactcaaaactttttaggagaatcatgaaattggtctattcaaaggatggagttgagtccattctgttattgttgcaagaggttgcatatttggtgagtcagttatataaaatagtgttcttattgtaaatatgatacttctcataatctattttatcatgtgtataacattcaaactgacaaatatattgacttatgaataaaggtgtcaaaaaactggcacatcagtt

SEQ ID NO: 18027 - protein, 339 aa, Homo sapiens
MDETVAEFIKRTILKIPMNELTTILKAWDFLSENQLQTVNFRQRKESVVQHLIHLCEEKRASISDAALLDIIYMQFHQHQKVWDVFQMSKGPGEDVDLFDMKQFKNSFKKILQRALKNVTVSFRETEENAVWIRIAWGTQYTKPNQYKPTYVVYYSQTPYAFTSSSMLRRNTPLLGQALTIASKHHQIVKMDLRSRYLDSLKAIVFKQYNQTFETHNSTTPLQERSLGLDINMDSRIIHENIVEKERVQRITQETFGDYPQPQLEFAQYKLETKFKSGLNGSILAEREEPLRCLIKFSSPHLLEALKSLAPAGIADAPLSPLLTCIPNKRMNYFKIRDK

SEQ ID NO: 18028 - DNA, 1895 bp, Homo sapiens
  CDS (790)..(1125)
tctgtgttaactctgagagaacaaataatggctttttaaagactgttaatagaataatgaagacttactgtgtttttaacgtgaaaattttaggtgaccaagggtcctgctataacatactgggggtcataggatagtagaatggtcaacatctcaatttagacatgttacttcctgctctaaatacacttgtggacgctacttgtggtgtaactccttatgtatttaataattatctgactctggttttcttggttgatttttttaaatgggtgaagaatctagttatgaattctttgccctttatggaatgtgatatcttggtttttattccatctgttacttcccttttacttaattttatcttattgttttgcgttgtgtttctaaaataatggctttggcttgttttttcctgaatgtttctgcagtttggtttgagtatctgggtttgggcaccactcctgaacttggactccatctgtacttgtgacttttggaaggcagagtcagtgttttctgtggaagatgacatttttttaatattatatatgtgtatctccccctcccctttttggtttctcttaaaagactggaaagaaagcagttaaagcagttctgtgggtctcagcagatggactcagagttgtggatgaaaaaactaaggacctcatagttgaccagacgatagagaaagtttctttctgtgccccagacaggaactttgatagagccttttcttacatatgccgtgatggcaccactcgtcgctggatctgtcactgcttcatggctgtcaaggacacaggtgaaaggttgagccatgcagtaggctgtgcttttgcagcctgtttagagcgcaagcagaagcgggagaaggaatgtggagtgactgctacttttgatgctagtcggaccacttttacaagagaaggatcattccgtgtcacaacagccactgaacaagcagaaagagaggagatcatgaaacaaatgcaagatgccaagaaaggtacaatctgttctacagtgtgtatttatggaatgcagtttttcccaacaaggtattattttgaagctaccgggggtaaattttctcataatcaaagagaacccttagcaatataaaaccttataacaaagttgaaaatcttaaaaaccgcttcctttagagtggctagtttaatggcttcaaaatatttactccattatagtaagctatctgaggaatcagggtgcagttgaagaagctgcagagacatctcttacccccttcctcccatcctgaaatacctttttaattctgatgcatctgatctctttgagaagcaaatgaatcaagtacctgcatcttaaaggaagcagcagaggtcccagggcttaaggctgcaaagcatccacggactatgatgctagcagagagatttaacagtaatactgtttatatgatattattgctgttttttagtgctttctagtcacaaaagtctatagattttgagaggtaagcctataactcttttttctatagccctgttaatttaatttagtgtgtgattttatagagtgtgagttttatttaggtacacatggcatcacagcagaaatgcctgtacaaacattcaagttagttggcagtctataaatgtgagttgggtatattttacaactaaatgatagggcttgaaaatacttttgaattcttgtatataagtagggttaaaaccaacaagacaagcacaaacaattcaagttaactaatagacattaatataattttgaggccaggtatagtggcttacagctgtaatctcaatactttaggaggctgaggaggaaacatcacttgaggccaggagtttgtgaccagactgtgcaacatagactctatccct

SEQ ID NO: 18029 - protein, 112 aa, Homo sapiens
MAVKDTGERLSHAVGCAFAACLERKQKREKECGVTATFDASRTTFTREGSFRVTTATEQAEREEIMKQMQDAKKGTICSTVCIYGMQFFPTRYYFEATGGKFSHNQREPLAI

SEQ ID NO: 18030 - DNA, 2746 bp, Homo sapiens
  CDS (89)..(2539)
aacagcgagtaataacttctttgtggatgattatgctagatttactatcttggattcccaaggcaagactgctgctgtagccaatagtatgaactatctgacaaagaaaggaatgtcctccaaggaaatctatgatgattcttttattaggccagtaactttttggattgttggggattttgatagcccttctggacggcagttactgtatgatgccatcaaacatcagaaatccagtaacaatgttagaataagcatgatcaataatcctgccaaagagataagctatgagaacactcagatctccagagcaatctgggcagctctccaaactcagacttccaacgctgctaagaacttcatcaccaaaatggccaaggagggggctgcagaggccctggctgcaggagctgacattgcggagttctctgttgggggaatggatttcagtctttttaaagaggtctttgagtcttccaaaatggatttcattttgtctcatgccgtgtactgcagggatgttctgaagctgaagaagggacagagggcagtgatcagcaatggaaggatcattgggccactggaggatagtgagctctttaatcaagacgatttccacctcctcgaaaatatcatcttaaaaacctcaggacagaaaataaaatctcatattcaacagcttcgggtagaagaagatgtggcaagcgacttggtaatgaaggtggatgctcttctgtcagcgcaaccaaaaggagatccaagaatcgagtaccagttttttgaagacagacacagtgcaatcaaactgaggccgaaggaaggggagacatactttgatgttgtggctgtcgttgaccctgtcaccagagaagcacagagacttgctcctttgctcttggttttggctcagctgataaacatgaatctgagagtatttatgaactgccaatccaaactttctgacatgcctttaaaaagcttttaccgttatgtcttagaaccagagatttctttcacttcagacaatagttttgctaagggtccaatcgcaaaatttttggatatgcctcagtctccactgttcactctgaatttgaacacacctgagagctggatggtagaatctgtcagaacaccatatgatcttgataatatttatttagaagaggtggacagtgtagtggctgctgagtatgagctggaatacctgttactggaaggtcattgctacgacatcaccacaggccagcctccacggggactacagtttaccttaggaacttcagccaacccggtcattgtggacaccattgttatggccaatctgggctactttcagctgaaagccaacccaggagcttggatcctcagacttaggaagggacgctctgaagatatttatagaatttacagccacgatggcactgattctccccctgatgctgatgaggtggttatcgtcctcaacaacttcaaaagcaaaattattaaagtgaaggttcagaagaaggcagatatggtgaacgaagacttgctgagtgatggaacgagtgagaatgaatctggattttgggattccttcaaatggggctttacaggacagaagactgaggaagtgaagcaagataaagatgacataattaatattttctccgttgcatctggtcatctctacgaaagatttcttcgcataatgatgctatccgtgctgaagaataccaagactcctgtgaaattctggttcttgaagaattacttgtcccccacatttaaggagtttataccttacatggcaaatgaatacaatttccagtatgagcttgttcagtacaaatggccccggtggcttcatcaacaaactgaaaaacagcgtatcatctggggttacaagatcctcttcctggatgtacttttcccactagttgttgacaagttcctgtttgtggatgctgatcagattgtacgaacagatctgaaagagttaagagatttcaatttggatggtgctccttatggttacactcctttctgtgacagccgaagagaaatggacggctacaggttctggaagtcagggtactgggctagtcatttagccgggcgtaagtatcatatcagtgcactatatgttgtggatctgaagaagtttaggaaaatagctgctggtgacagactcaggggacagtaccaaggtctgagtcaggaccctaacagcctttcaaatcttgatcaagatctgcccaataacatgattcatcaggtgccaattaaatccctccctcaagaatggctttggtgtgaaacgtggtgtgatgacgcctctaagaaaaggacaaaaaccattgatttgtgtaataatccgatgaccaaagagccgaaactggaagcagctgtgcggattgtcccggagtggcaggactacgaccaagagatcaaacagctacagatccgctttcagaaggagaaagaaacgggagcactgtacaaagagaagacaaaagaaccaagccgagaaggtcctcagaaacgtgaagaattatgatctctggagaaggacaggaaatcaccccatttgaaaaacagtttttataataaatgctagttttttctgatctgtctatacaactgctgataagccggctgggcaggagtgccacaccttttgattctgagcatttgattctgacttctgtactctggtggccactggatctttgggattaaagctctgttggatttgtacctc

SEQ ID NO: 18031 - protein, 817 aa, Homo sapiens [sequence omitted]

SEQ ID NO: 18032 - DNA, 1709 bp, Homo sapiens
  CDS (104)..(1381)
agtagttcccggtgactgtcgcagcctctgttgccctctgacttgcagatgctgtgagatccagagctaagactccacgacatcccggaagccgaaaaatgctatgtcttctcattacactgaagaccttttgccagaacagtgcatgcaagattcattccaaaaagtgatactgagaagatatggaagctgtggacttgaggatttacacttaaggaaggatggggaaaatgtgggtgagtgtaaggatcaaaaagaaatttataatggacttaaccaatgtttgtcaactctacctagcaaaattttcccatataataaatgtgtgaaagtctttagtaaatcatcaaatctaaatagagaaaacataagacatactacagagaaacttttcaaatgtatgcaatgtggcaaagtctttaaatctcactcaggcctttcttatcataagataattcacactgaagagaaactctgcatatgtgaggaatgtggcaaaacctttaagtggttctcataccttactaaacataagagaattcacactggagagaaaccatacaaatgtgaagaatgtggcaaagcttttaactggtgctcgagtcttactaaacataagagaatccatactggtgagaaaccctacaaatgtgaagaatgtggaaaagcctttcactggtgttcaccctttgttagacataagaaaattcatacaggagaaaaaccctatacatgtgaagactgtggcagagcgtttaaccggcactcacatctcaccaaacataagacaattcacactggaaagaaaccctacaaatgtaaagaatgtgggaaagcctttaaccactgctcactacttactatacatgagagaacccatacgggagagaaaccctataaatgtgaagaatgtggcaaagcttttaactcatcatcaattcttactgaacataaggtaattcatagcggagagaaaccctacaaatgtgaaaaatgtgacaaagtctttaagaggttctcataccttactaaacacaagagaattcacactggagagaaaccctacaaatgtgaagaatgtggcaaagcttttaactggtcctcaatccttactgaacataagagaattcatactggagagaaaccctacaactgtgaagaatgtggaaaagcctttaatcggtgctcacacctactagacataagaaaattcatactgccgtcaaacgctataaatgtgaagaatgtggcaaagcttttaaacggtgctcacatcttaatgaacataagagagttcaaagaggagagaaatcctgcaagtataaaaaatgtggggaagcttttaatcactgctcaaaccttactacgtaagaatttttactaaagagaaatcctacaaatgtaaagaatgtggcaaattccataaatcttgctcaaggcattgaaatcacaagataattcatactggagagaaacactacaaatgtgaagaatgtggggaaagtcttcaaccattgctgacagcttattgcacagaagaaaattcatgctgagaaaaattctgattttaaagaatgtggcaaagcatttaataactactatgaacttactcatcagaggttttgtgctagataaaagcaatgtaagtgtaatgatacacattacatttatctgtggaaagatgtcaccaaataaaagccttagagtac

SEQ ID NO: 18033 - protein, 426 aa, Homo sapiens
MSSHYTEDLLPEQCMQDSFQKVILRRYGSCGLEDLHLRKDGENVGECKDQKEIYNGLNQCLSTLPSKIFPYNKCVKVFSKSSNLNRENIRHTTEKLFKCMQCGKVFKSHSGLSYHKIIHTEEKLCICEECGKTFKWFSYLTKHKRIHTGEKPYKCEECGKAFNWCSSLTKHKRIHTGEKPYKCEECGKAFHWCSPFVRHKKIHTGEKPYTCEDCGRAFNRHSHLTKHKTIHTGKKPYKCKECGKAFNHCSLLTIHERTHTGEKPYKCEECGKAFNSSSILTEHKVIHSGEKPYKCEKCDKVFKRFSYLTKHKRIHTGEKPYKCEECGKAFNWSSILTEHKRIHTGEKPYNCEECGKAFNRCSHLLDIRKFILPSNAINVKNVAKLLNGAHILMNIREFKEERNPASIKNVGKLLITAQTLLRKNFY

SEQ ID NO: 18034 - DNA, 1972 bp, Homo sapiens
  CDS (131)..(1426)
gtcttgtcggctcctgtgtgtaggagggatttcggcctgagagcgggccgaggagattggcgacggtgtcgcccgtgttttcgttggcgggtgcctgggctggtgggaacagccgcccgaaggaagcaccatgatttcggccgcgcagttgttggatgagttaatgggccgggaccgaaacctagccccggacgagaagcgcagcaacgtgcggtgggaccacgagagcgtttgtaaatattatctctgtggtttttgtcctgcggaattgttcacaaatacacgttctgatcttggtccgtgtgaaaaaattcatgatgaaaatctacgaaaacagtatgagaagagctctcgtttcatgaaagttggctatgagagagattttttgcgatacttacagagcttacttgcagaagtagaacgtaggatcagacgaggccatgctcgtttggcattatctcaaaaccagcagtcttctggggccgctggcccaacaggcaaaaatgaagaaaaaattcaggttctaacagacaaaattgatgtacttctgcaacagattgaagaattagggtctgaaggaaaagtagaagaagcccaggggatgatgaaattagttgagcaattaaaagaagagagagaactgctaaggtccacaacgtcgacaattgaaagctttgctgcacaagaaaaacaaatggaagtttgtgaagtatgtggagcctttttaatagtaggagatgcccagtcccgggtagatgaccatttgatgggaaaacaacacatgggctatgccaaaattaaagctactgtagaagaattaaaagaaaagttaaggaaaagaaccgaagaacctgatcgtgatgagcgtctaaaaaaggagaagcaagaaagagaagaaagagaaaaagaacgggagagagaaagggaagaaagagaaaggaaaagacgaagggaagaggaagaaagagaaaaagaaagggctcgtgacagagaaagaagaaagagaagtcgttcacgaagtagacactcaagccgaacatcagacagaagatgcagcaggtctcgggaccacaaaaggtcacgaagtagagaaagaaggcggagcagaagtagagatcgacgaagaagcagaagccatgatcgatcagaaagaaaacacagatctcgaagtcgggatcgaagaagatcaaaaagccgggatcgaaagtcatataagcacaggagcaaaagtcgggacagagaacaagatagaaaatccaaggagaaagaaaagaggggatctgatgataaaaaaagtagtgtgaagtccggtagtcgagaaaagcagagtgaagacacaaacactgaatcgaaggaaagtgatactaagaatgaggtcaatgggaccagtgaagacattaaatctgaaggtgacactcagtccaattaaaactgatctgataagacctcagatcagacagaggactactgttcgaagatttttggaagaatactgagaacggcatagagtgaagatcgacatttaaaaagtgaggtgaaagaaagctatagtggcatagaaaaagtataaagctcagttagtttttttattattattattattaaaagttaattcaggactgatgtgacctaccagatttcagaacatgtgttaataatatatatgccactgaaaacttaggtcctgtatcatacttttttctttaagactttttaagaaatattacttaaacatgtggcttgctcagtgtttaattgcaagttttcaatcttggactttgaaaacaggattaaacgttagtattcgtgtgaatcagactaagtgggatttcatttttacaactctgctctacttagcctttggatttagaagtaaaaataaagtatctctgactttctgttacaaagttgattgtctctgtcattgaaaagttttagtattaatctttttctaataaagttattgactctg

SEQ ID NO: 18035 - protein, 432 aa, Homo sapiens
MISAAQLLDELMGRDRNLAPDEKRSNVRWDHESVCKYYLCGFCPAELFTNTRSDLGPCEKIHDENLRKQYEKSSRFMKVGYERDFLRYLQSLLAEVERRIRRGHARLALSQNQQSSGAAGPTGKNEEKIQVLTDKIDVLLQQIEELGSEGKVEEAQGMMKLVEQLKEERELLRSTTSTIESFAAQEKQMEVCEVCGAFLIVGDAQSRVDDHLMGKQHMGYAKIKATVEELKEKLRKRTEEPDRDERLKKEKQEREEREKEREREREERERKRRREEEEREKERARDRERRKRSRSRSRHSSRTSDRRCSRSRDHKRSRSRERRRSRSRDRRRSRSHDRSERKHRSRSRDRRRSKSRDRKSYKHRSKSRDREQDRKSKEKEKRGSDDKKSSVKSGSREKQSEDTNTESKESDTKNEVNGTSEDIKSEGDTQSN

SEQ ID NO: 18036 - DNA, 2726 bp, Homo sapiens
  CDS (207)..(1268)
aaaaagtgccggtcaaaatggaagtgaatccccctaaacaggagcacctgctggcgctaaaagtgatgcggctgactaagcctactttattcaccaatatcccagtaacatgtgaagagaaagacttacctggagatctctttaaccagctgatgagagatgatccttcaaccgttaatggtgcagaagttttaatgttgggataaatgctgactttaccacagaattttgggaatatatttttgggagagaccttttccagttatatcagcgttcataatgatagcaatcaagttgtaaaagacatattagtaaaagctgatcttcagacaagttctcagcgtttaaatctttcagcctccaatgctgcagtggctgaacttaaaccggattgttgtattgatgatgtcatacatcatgaagtcaaagaaattggaacacacatcttggtatgtgctgtgagttatacaactcaggctggagaaaaaatgtatttcagaaaattcttcaaatttcaggttctcaaaccattggatgtgaaaaccaaattttacaatgcagagagtgacctcagttctgtgactgatgaagtatttctggaagcccagattcagaatatgacaacctcacctatgtttatggagaaggtttcactggagccatctattatgtacaatgtaacagaattaaattcagtcagccaagctggagaatgtgtgtctacgtttgggtcaagagcatatttgcaaccaatggatacacgccagtacttatactgcctaaagccaaagaatgaatttgcagaaaaagcaggcatcattaagggagtaacagtaattggaaaattggatatagtatggaaaacaaatctaggtgaaaggggaaggttacagaccagccaacttcaaagaatggctccaggttatggagatgttaggttgtctttggaggcaataccagataccgtaaaccttgaagaaccttttcatattacctgtaaaataacaaactgcagtgaaaggactatggatctggttttggaaatgtgcaataccaattccatccactggtgtggaatttcaggaagacagctgggaaagctgcatccaagttcttcgctctgtcttgcccttactctgctttcttcagtacagggactgcaaagcatctctggcttaagactaacagacacattcttaaagagaacatatgaatatgatgacatcgcacaagtctgtgtggtatcttctgccattaaagtggaaagctgaaggaaacttccaatgttaggcttttcatttagtttcacagaactgctctttttgttacctttgtaaaatgatgacgtcaacaacgaagtaaatatgttacttaaattttctttcctgtaaaatggttaaaatattaaatatttgttttgaagagatctgattttatcttgtaatttatatttgaaatgaacatgtgtatattttctacacctattatttaatttcatttcattttagatgaccattggactttgttctccaaaagctgtgtatctgagaccatttgtccctagcaagttatctagaacacgagtcagcacactttttatgtaaggtacaagatactaaatattttaggctttgcaggccgtaaggtttctgtcacaaatactgaactctgccatcgtacttcaagagcagccagtaggcaaaaaaagtacagtggtgtacacaaaaagaagcagttggactcgggaagctgaggcaggagaatcacttgaaccggggaggcagaggttgcagttaagccgagatcatgctactgcactctagcctgagcgacagagtgagactctgtctcaaaaaaaaaagaggcagctgggcagatttggcctgcagggtatagttggctgacctcaatctagaagatagagttgtttcttagaactttgtaatattttggttagaaatatttcagttaactccagttttttcctagctattcggtcagcagaaaaagtttgcttagaacaaagggggtagtcctcttataacctgatatttgtcaacacagtataagctttctagttgttttcaaaattactgtaatggtttgtgtctgtatttgtatattatacctacaaacatacatatctttcagctactgaacacatcagaattggttttactttttaggttgttgattttttttaattaactattaactaagaataatacttattttctaattataagccaaaaacccctgggtttttttctcattgattaagccacttatttttataaggtatatttaaataattcccatcttctgatatgattttaaactctaaatcatgtgttactgttacaaaactttctctctccatgtaatcacacttagttatgagcaaagcagtgagaaagttgaggtgataaacaactttgcagcattaatgtaacaaaaagtttcagtatttgtcaggaaaacaaaagcttaggctgttaaataaaagctattctattttggtaagttgaaattcaagaatgtatatataatttcttaaatgtaagagtgcattaaatcaaatacaaaaattggtttttcaatgcatcattatttattgccataacaaattgtttggtccaaaatgaaagctatattcagaaggtttgcacctcaaaattgagtaataattaatgaaatgtctgtacaaaataaagtgcaagcagtgt

SEQ ID NO: 18037 - protein, 354 aa, Homo sapiens
MLTLPQNFGNIFLGETFSSYISVHNDSNQVVKDILVKADLQTSSQRLNLSASNAAVAELKPDCCIDDVIHHEVKEIGTHILVCAVSYTTQAGEKMYFRKFFKFQVLKPLDVKTKFYNAESDLSSVTDEVFLEAQIQNMTTSPMFMEKVSLEPSIMYNVTELNSVSQAGECVSTFGSRAYLQPMDTRQYLYCLKPKNEFAEKAGIIKGVTVIGKLDIVWKTNLGERGRLQTSQLQRMAPGYGDVRLSLEAIPDTVNLEEPFHITCKITNCSERTMDLVLEMCNTNSIHWCGISGRQLGKLHPSSSLCLALTLLSSVQGLQSISGLRLTDTFLKRTYEYDDIAQVCVVSSAIKVES

SEQ ID NO: 18038 - DNA, 1876 bp, Homo sapiens
  CDS (101)..(817)
gagtgttgtagagcctcgagcctgcgaggagcgcgccgcccgccagctccctgcgtcccgtcccgcgtccccgcgttcccgcgtcctgcgatccgccgccatggccagtgaggagctggcgtgcaagctggagcgccggctgcggcgcgaggaggccgaggagagtggcccccagctggctcccctcggcgccccagccccggagcccaagcccgagcccgagcctcccgcccgtgcgcccacggccagcgccgacgcggagctgagcgcccagctgagccggcggctggacatcaacgagggcgctgcgcggccccggcgctgcagggtcttcaacccctacacggagttccctgagttcagccgccgcctcatcaaggacctggagagcatgttcaaactgtatgacgctgggcgggatggcttcatcgacctgatggagctgaagctgatgatggagaagctgggggccccccagacccacctgggcctgaagagcatgatcaaggaggtggatgaggacttcgatggcaagctcagcttccgggagttcctgctcattttccacaaggccgcggcaggggagctgcaggaggacagtgggctgatggcgctggcaaagctttctgagatcgatgtggccctggagggtgtcagaggtgccaagaacttctttgaagccaaggtccaagccttgtcatcggccagtaagtttgaagcagagttgaaagctgagcaagatgagcggaagcgggaggaggaggagaggcggctccgccaggcagccttccagaaactcaaggccaacttcaatacatagtcctgctgaccttgccctctgcccacagctgtgcctcacagatgccccgagaagagatgactaagcatcttcatcactgctgtcggtcccctccctgagccagcatctccatccaccaccccgtgccagctcccgtgccagccttcatccctcccagtgtccaagcccctccaggagggtcctggggtgggccagatgcctgcccacctctgtctcctgcctctgctcctctgcccttcttatagccagaacttgtatcttctcagcaaccttcactttgtccttgtccctttaccattccccatcaaagagtagtctgctatatcaatttgtgtagatatgtctgtctttttgggtcctcagtgaaaatgcccattttctcggagaattctctgcactcctctctgcttcacattcaacttccctgttctcatctttggtaggattctgccagttgcttttgcatcttctgttcctgggtaatggtgggtcttaatggaggctgggtggaccactgcccgtccactcttcaacaggaggaacagcatgccaccacagtaacacacattagagaaaggacagaggtctgctccttcctgccacctttctcctggccccttagcattcccccagtccctccctcttcaccttgctccgtctatgtcttcccagctcagccttttccccactcttaaatactgtactacttcactgtaagaacgaaagaatagttaggataccaatgagtaaaagggttcctgttcactctgactctgtgcaaattgtattacagtagaccgctgacgttcccaagtgacagatccagggcctttcaaacatccccaaagtcatggccatactcaccattagccagtttctaacatctgtttcagggtatccagctgtagatgttcttatcccccatacttgtgagttcttggggttgctcacaaatactaggggtttttgttgtatttttaacaaatatatcctaatgtcatatttattctcttttgtaactgctgtctttacaataaagaaatcatctgcctttct

SEQ ID NO: 18039 - protein, 239 aa, Homo sapiens [sequence omitted]

SEQ ID NO: 18040 - DNA, 2719 bp, Homo sapiens
  CDS (345)..(2066)
atttgaagtcctcgttccacgccttctcatcatcctgaacaccgagctctgggactccggcggagaatctaaacgtaaagcatcacccacggtcgtgaactgtaggctctcctggcatccgggatcttattctggccttggcggagttggggatggtgtcgcctagcagccgctgccgctttggcttgctcgggaccatttggctggacccagagtccgcgtggaaccgcgatagggatctgtcagggcccgcggccgggtccagcttggtggttgcggtagtgagaggcctccgctggttgccaggcttggtctagaggtggagcacagtgaaagaattcaagatgccacctaatataaactggaaagaaataatgaaagttgacccagatgacctgccccgtcaagaagaactggcagataatttattgatttccttatccaaggtggaagtaaatgagctaaaaagtgaaaagcaagaaaatgtgatacaccttttcagaattactcagtcactaatgaagatgaaagctcaagaagtggagctggctttggaagaagtagaaaaagctggagaagaacaagcaaaatttgaaaatcaattaaaaactaaagtaatgaaactggaaaatgaactggagatggctcagcagtctgcaggtggacgagatactcggtttttacgtaatgaaatttgccaacttgaaaaacaattagaacaaaaagatagagaattggaggacatggaaaaggagttggagaaagagaagaaagttaatgagcaattggctcttcgaaatgaggaggcagaaaatgaaaacagcaaattaagaagagagaacaaacgtctaaagaaaaagaatgaacaactttgtcaggatattattgactaccagaaacaaatagattcacagaaagaaacacttttatcaagaagaggggaagacagtgactaccgatcacagttgtctaaaaaaaactatgagcttatccaatatcttgatgaaattcagactttaacagaagctaatgagaaaattgaagttcagaatcaagaaatgagaaaaaatttagaagagtctgtacaggaaatggagaagatgactgatgaatataatagaatgaaagctattgtgcatcagacagataatgtaatagatcagttaaaaaaagaaaacgatcattatcaacttcaagtgcaggagcttacagatcttctgaaatcaaaaaatgaagaagatgatccaattatggtagctgtcaatgcaaaagtagaagaatggaagctaattttgtcttctaaagatgatgaaattattgagtatcagcaaatgttacataacctaagggagaaacttaagaatgctcagcttgatgctgataaaagtaatgttatggctctacagcagggtatacaggaacgagacagtcaaattaagatgctcaccgaacaagtagaacaatatacaaaagaaatggaaaagaatacttgtattattgaagatttgaaaaatgagctccaaagaaacaaaggtgcttcaaccctttctcaacagactcatatgaaaattcagtcaacgttagacattttaaaagagaaaactaaagaggctgagagaacagctgaactggctgaggctgatgctagggaaaaggataaagaattagttgaggctctgaagaggttaaaagattatgaatcgggagtatatggtttagaagatgctgtcgttgaaataaagaattgtaaaaaccaaattaaaataagagatcgagagattgaaatattaacaaaggaaatcaataaacttgaattgaagatcagtgatttccttgatgaaaatgaggcacttagagagcgtgtgggccttgaaccaaagacaatgattgatttaactgaatttagaaatagcaaacacttaaaacagcagcagtacagagctgaaaaccagattcttttgaaagagattgaatgtctagaggaagaacgacttgatctgaaaaaaaaaaattcgtcaaatggctcaagaaagaggaaaaagaagtgcaacttcaggattaaccactgaggacctgaacctaactgaaaacatttctcaaggagatagaataagtgaaagaaaattggatttattgagcctcaaaaatatgagtgaagcacaatcaaagaatgaatttctttcaagagaactaattgaaaaagaaagagatttagaaaggagtaggacagtgatagccaaatttcagaataaattaaaagaattagttgaagaaaataagcaacttgaagaaggtatgaaagaaatattgcaagcaattaaggaaatgcagaaagatcctgatgttaaaggaggagaaacatctctaattatccctagcctcgaaagactagttaatgctatagaatcaaagaatgcagaaggaatctttgatgcgagtctgcatttgaaagcccaagttgatcagcttaccggaagaaatgaagaattaagacaggggctcagggaatctcggaaagaggctataaattattcacagcagttggcaaaagctaatttaaagatagaccatcttgaaaaagaaactagtcttttacgacaatcagaaggatcgaatgttgtttttaaaggaattgacttacctgatgggatagcaccatctagtgccagtatcattaattctcagaatgaatatttaatacatttgttacaggaactag

SEQ ID NO: 18041 - protein, 574 aa, Homo sapiens
MPPNINWKEIMKVDPDDLPRQEELADNLLISLSKVEVNELKSEKQENVIHLFRITQSLMKMKAQEVELALEEVEKAGEEQAKFENQLKTKVMKLENELEMAQQSAGGRDTRFLRNEICQLEKQLEQKDRELEDMEKELEKEKKVNEQLALRNEEAENENSKLRRENKRLKKKNEQLCQDIIDYQKQIDSQKETLLSRRGEDSDYRSQLSKKNYELIQYLDEIQTLTEANEKIEVQNQEMRKNLEESVQEMEKMTDEYNRMKAIVHQTDNVIDQLKKENDHYQLQVQELTDLLKSKNEEDDPIMVAVNAKVEEWKLILSSKDDEIIEYQQMLHNLREKLKNAQLDADKSNVMALQQGIQERDSQIKMLTEQVEQYTKEMEKNTCIIEDLKNELQRNKGASTLSQQTHMKIQSTLDILKEKTKEAERTAELAEADAREKDKELVEALKRLKDYESGVYGLEDAVVEIKNCKNQIKIRDREIEILTKEINKLELKISDFLDENEALRERVGLEPKTMIDLTEFRNSKHLKQQQYRAENQILLKEIECLEEERLDLKKKNSSNGSRKRKKKCNFRINH

SEQ ID NO: 18042 - DNA, 2118 bp, Homo sapiens
atctaaagaaaaaaaagaagaaaagggaaagctcaggtgtttcagggtcccagaatgtatgttgtagagaacagtcattagctcaggcccatggtaaccgcctctactgtgcactcgaccagtagaggcgatgatgacggcacttgattctcttgtgtgtaactcagccatcctccctagacccacgtcccaggaggcagggctggtaaagctatgactgggcagtgtttgacccagctgtgcttttactctgtgcctcctctttatattgtggcatttctctcttctcctttatgttctttttctttttatgccaaaattcttgctgttgccaaaacaaaaacagaaaaacacacccacacccaattacaacctgcagttcaaagaaccactctaggtcggctttaaagtattgtctttctctggtaaccaaatctgtacctgctgcctaatttagtgtttgggggcattgtttacagtatttctgtttgtaatgtgcttttaatatagaaatcctcttttttgttcttaaatctatgaatgctgtgtttccaagcttatacttactactgcgtgttagtggttctggcacagattttcttaccctggccttgtactgtccaccatgactttagaaaaagcttgaacaataggcagagaaaggaaatccccaaaagggattattttccccttggacatgagaagtttagttacaggtttcttgaattcgtttttgtccagaggaatcctctttttatctgatacggttgatgaccaaaaatgaagtagggaagccgaaggcatagccggaaaggaacagaagagctttttccccgagtgctcatcaccgggttcattaccggccagagatggacggggagaagcacgttagtttcctgtcatcttatggaaaagatgatctgaagttaaaaaatgaaggtcacaagtggcagttgcctgacccctgtccccagacattccttgcccgataaccatgaggttccatagttcggatcctgaatgggcctttaggaaatgcaggcctttcccacaccagctagaagggtagccaggcagtagaatttcattcaaccctagggttcccacctgacagagggaagttcggaagtcttactgcttcccacgtccccttcccttctaggcatttatggaaagctttttagtggagcaagagaattctgcaatccagcttacctcccaccttaccccaagagccatagctgacggtgatgtgtgaatgtttatatataggtacacgtttgtatgtatatagatctaattgcacatatatgggtagatatttatttatatgttgcaccctaaattatagtaattataataattgtgaagctgtttctaaagctgcttgttcctggttctgagaaccacgggagcctcacactggggagccgtactccaggtcagggctttggggatgcacagcagcgtacgggcagcacgcctgtaaggaggtgagtgggtgggtgtctcagaaaatgggcagcacacccccaagaaagggccccaagagcagactaggaacgcagggggctgctgctgccaggactccacggagagccgggcacccgcctcacatgtctcctgtctggctccactgagttagccgtttgagcccactcctatcttttggtggttagtgcatcttcagctcttttctgcaagacactggaacattcctaggctgtcccaaaaggagttccaccatagcctttaaggtccgagcagggcaccaaggggttcacttttctcccgagccattcagcttggggtgcctgcgggaggggcggacagccagccggcttcccggcggcggtacgagagcccaacaggagaggattagctgtgccaaggaacacgccactgctgcctgtctactgcccgccttctctccacttccatttttgcctttgtttttaacttgtgctcttgtgagttcttggtgtgtttctttgtgagtttttatttaattgtgtaactttgtttttgccgtttactgtgaaaccaagttgtcgtgcttttaattttttttttaacaaatgttacattcttatttaagagaataaattccaaacaatc

SEQ ID NO: 18043 - DNA, 2513 bp, Homo sapiens
atcaaaacaatgactaatgctgggcaacatatagcagaagtcaaacaaaaatgattcctcctgaaatggtaccttcattggttctgatgttcttttgcaaaaaatgtccggaagcagtatagaaaaccccctgtatgtgaaccttagattgtaaggcaagccagtgcactgtgtaatatgcaaagggagtggtgcaaaagagaaggcacccgtcccagctctccatgccctttccctggcaggcgctgactgagatggcgctgagtgaatgtggaaggtgctaagacccagtctcttcactgcagggctgtttacagccagtttcttttactctgaccttaaggtttccactgagctcatgaaacttcaacatatggtgtttaaaagtttcccactcaaatgcacacttgaaaattgggtccctcagcctcattactgaactaaataagtgaagaagttgtatctttggggtaaaactttccagggccacttaattttttaaccagttaagtacgcatcttcctggtggttcagactttttaagtcagtgctaaagctgaaaagcgccttctaaatatgactgtgagtttagtttgtatcttacatttagtaactgttctgttgggccaggactatgactttaattactatgtacttattcatcccacactctgcactaaatacaccatagctactatagcattgtggcaggcactcatttttgtggactcattccatacttctgctggcatatttcgtttaaaatctagctaaagattttcatagtactgtgttaactagccagggctgaaaagtgtgacaggatatcaaattgactttccttggggaaaatgttgctttggcaatagtgaagtccaactccttcatttacagaattagtgattactcatcaatttttgaaagttgtagattaagtagttttatttactaaattcttaaccactttgaagatttaagccagttgaaatgaaacattggctggatgcagttggctagcacctgtaatcccaacactttgggaggccaaggtgggaggattgcttgaggccaggagctcaagaccagcctgggaaacatagatttgaaatcttttcaaaaatgtataaaaatttaataaataaataaatgaatccttactcgaccataattatggctttaaaacccaaccaacagtaaacacttacttgaagccaaaacagtaaattttgaatgaaattagaattatgcttttggaagctgccatgtcttaattcttgctggattttgattttcaattttggaagtttttatcaaaactgtccagtcatgagtatatcaggtagcagcctttaaggatctaagtttcattcctataaagaacaggaggtgctggtatttcttgtcttagcaagtgatctgatgcaggtctaaatgggggttagcatctatactatggcttaaaagtttcctccttggtcaccatttgggaggtgatggcttcaaagctaagctttgctctcatgtgacccctctttatcttaatacccaataagatataaacctctcagagtcaacccagtgtagactcaaagggtcttagcttcatctatcagataagatctatctgatttatacaaagaatggtgctgtttttatatacatactaaaaaaatctaattctcaaacaattttcttaatatttatgccagcaaggtcaggaaagactattttgtcctgtttaactttagtagtgaacaaactgctagagacatctgtcatccttaacaggccactgtggtccttatatactgaccctcctttccaattaacgtcctttaatcccatactagttccataagagacttggcacataaaagcagtattttttttaatgcctagtaaactggccagaaaaaaatattgccatggtggacctgtttctatccacctctttctatggctatataagtctatacatgccagttccgtacatactccatttccaaagagcccccaaaccctggacagtagcactaccatgaattttagggtcacaaaacatttccttctgaaggaagcagctgcctcagcagtgtcactttagtgaccactgcccaggcttacttcactttgcctccccctacacatcactgacctctttctgccaccaaacctcactattccagcaatgatgcctccctggtgtctggaaaacccatctggtgcactaaaatgctatgcaacaccaaatggcttcttcccctaatatcgctcaacaatgtaaattcttcaagaataaacttcatgctatgttaacatcaatgtatggttacagcttccttttttttttttcccttttaaaatgaagcaaaccacctccattaaaatccatgttttggggcttgtttttgtctctcaagtgtgaaatataaatcatgtttttatgatttttgtaaatctttttacaccttgtttttgtaagcaaaagtttcttattaaaagaataaaatgac

SEQ ID NO: 18044 - DNA, 2019 bp, Homo sapiens
cacaaaattactacagaaaaaaggaacaaagtgctttatacatttcataatatatccccttttattataattagttaattcccttttatctaaatggcctaaatttgccatgatggtagcagtgtccaaagtgaataattactgccagtactgcatcacagagaaaggaagggatccctcaggagacactgctgtctccttctgggttgtgctaaacaacatagggaggaaagctggacctggagtcaaaggaattgagttagtgtgctggctctgccatacttacggcacccttgggcaggatatacaaaggttcctcacttataaaatgggacagtctaaaactaccttttagtagagaagtcaaatgggaaggtatgtgaaaactctgtcaactaaatataaagactaataatttgggtattaagaggctagtttgagaagccacctgaattacacaaacacagctacagacatcattctgtctagagaaagataagagagaacaggttggttgaacttgggcagaatcacagatacaattccacactaaagaatgaaaataagcaatgaactagacagaaggaagaaatcatgaagacttaggaagcagaattacaatctgtcatattaacaaatggagtttgccttctaagatcagatgttgctcagaaactttcattgtttacctaataatttaatatcactagtttcctagtgggtcaagcagatgcaaaatccagcttattttcttctatgtgctctcaagcttattgcttattttaaagtaaaatcctgaaaaaggaaaatattaggttggtgcaaacgtaattgcggtttttgcattgttgaaatttgccgttttatattggagtacattcttaaataaatgtggttatgttatacatcattttaagcatatttctcactttttttttgctaatgacttattgctgtttatatttattttagactatggaaatgatgttagacaaaaatcaaatttagcgattttctgagttcaaaataggttataaagcagcagagacaacacacaacatcaacaatgcatttggcccaggaactgctaatgaacatacagtgccgtgatggctcaagaagttttgcaaaggagactagagccttgaagatgaggagtgcagtggccagtcatcggaaattgataatgaccaattgagaacatcatcgaagctgatcctcttacaactataagagagctgcccaagaactcaatgttgaccattttatggtcgttcggcatttgaagcaaattgaaaaggtgaaaaagctcaataaatgggtgcctcatgagctgagtgaaaaataaaaaaattcgttgttttgaagtgtcattttctctattctatgcaacaataatgaatcatttctctatcggattgtgatgtgtgccaaaaggtggattttatacgacaactggcgatgaccagctcagtggctggactgaaagaagctccaaagcacttcccaaagccaaacttgctccaaaaaatggtcatggtcattgtttggtggtttgctgccagtctgatccactacagctttctgaatccaggtgaaaccattacatctgataagtatgctcagcaaatcaatgagatgcaccaaaaactgcaatgcctgcagccggcattggccaccagaaagggcccaattcttttcacgacaacactgggccgcacgttgcacaaccaacgcttcgaaaattgaactaattgggctatgaagttttgcctcatctgccatattcacctgacctcttgccaacaaactaccacttctttaggcatctcagcaacgttttgcagggaaattgcttccacaactagcaggacacagaaaatgctttccaagagttcgtcaaatttggaagcatggatttttatgctacaggagtaaacaaacttatttctcattggcaaaaatgtgttgattgtaatggttcctattttaattaataaagatttgtgtgaacctagt

SEQ ID NO: 18045 - DNA, 1626 bp, Homo sapiens
taaagacacagtgcccctttttaatgagtctgattcaagatgaatgccagaccatgtttccttgtacagaggaatttgacctgcagagggaagaataaggcccagggtgtcaggactagcattaaggagcacctctgattttctggtggagtcgtgctaaagctggcccaaacccactcgggccgttgttcaccttttgcctcatctctgtgttcagtgacatcatgttggtggatgttgggggatgaacaccagtacaccactgtgtatgttgtgctctgggagccatagcttgggcacccattctagagcaaggatcagccaaccccagcctgagcctgtgcagcccattgcctgttcttgtaaataacgttttatccaaaggcagccatgccatgcccacgtatttacatgttgtctaaggctgctttgaccaaaaggccaaaagtgctcaatatctggctcttgaaggaaaaaatttgccagcctctcttctggagtttaccaggaatctggttctggacacatgaagatatcttgggttaaaaagagattaggggccaggcttatgtttgtaatcccagcactttgggaggctgaggcgggatcacttgagcccaggagtttttgtattttttatagagacagggtcccactcttatccaggcatagtggcatgcacctgtagtcccagctactggggaggctgaggtgggaggatcacttgatcccaggatttggaagctgcagtgtgccatgatcatgccattgcactccagactgagcgacagagtgagactctgtcttaaaaaatattattttaaaaaagagattagagtggttcaagttgtgaggaagcttcagcagctttcctatttccaagaaaaaaagcaatcaaataagggtgaggcccctttaccatatcctagttaaaattattgttatatcatagacatgcccgttgtcacgggacctgtgtcccaaatccaagatgtggtttctaaatggcccttctaggcatgtgccatttttctagcattgcaggaagtcagaagagcaggcttccccctccactgtgtttctgagccttccagagttcagctccatggaacctcttgggtagtgtgtgataagtttcctgtaaaggcagaagtggagtctggctggggctgaggctggggcaaggctaagggagccatctttacaaatggtttgcaggattcccaggtgcctgtccctgggtctccctcccaggagatggcctgaaaagctgtagctcttcccaggcccttactactcctgggactcccctgctccctctgctgtcctgctgcgagtctctgacctggcccaggctcttgctcagccatgtggttcctacctcctacctcatgccagcccagcctgtctgtggccctccctgcatgttgacgctcttctaacccccatcttggggagctggagctggagtggggcctggttagagcagcttgcctgagccgacgagggtccagcctggagcatcaggctctggaagccgagcttgtatgtaggttttcacactgtccgggagtcaagacacagtgggttatgaaatccatctagtaggtcaccagtcagcatttt

SEQ ID NO: 18046 - DNA, 2133 bp, Homo sapiens
  CDS (923)..(1756)
gtggttcgggtccgctttcgtctccgtcctgctgccgttaccgccgctgctgccgccgcttgcgtcccccgctccggtctgtggtgcagccgggacccaggaccatgtctctgtctcgctcagaggagatgcaccggctcacggaaaatgtctataagagggtggaagagaagtaccagcggaacctttttcctattttttctccttctgcgctgaaaccagaaagcaggaactttcgtggtgagagttggcaggggaccatcatggagcagttcaaccctagcctccggaacttcatcgccatggggaagaattacgagaaggcactggcaggtgtgacgtatgcagccaaaggctactttgacgccctggtgaagatgggggagctggccagcgagagccagggctccaaagaactcggagacgttctcttccagatggctgaagtccacaggcagatccagaatcagctggaagaaatgctgaagtcttttcacaacgagctgcttacgcagctggagcagaaggtggagctggactccaggctgcgctgaagaaataccagactgagcaaaggagcaaaggcgacgccctggacaagtgtcaggctgagctgaagaagcttcggaagaagagccagggcagcaagaatcctcagaagtactcggacaaggagctgcagtacatcgacgccatcagcaacaagcagggcgagctggagaattacgtgtccgacggctacaagaccgcactgacagaggagcgcaggcgcttctgcttcctggtggagaagcagtgcgccgtggccaagaactccgcggcctaccactccaagggcaaggagctgctggcgcagaagctgccgctgtggcaacaggcctgtgccgaccccagcaagatcccggagcgcgcggtgcagctcatgcagcaggtggccagcaacggcgccaccctccccagcgccctgtcggcctccaagtccaacctggtcatttccgaccccattccgggggccaagcccctgccggtgccccccgagctggcaccgttcgtggggcggatgtctgcccaggagagcacacccatcatgaacggcgtcacaggcccggatggcgaggactacagcccgtgggctgaccgcaaggctgcccagcccaaatccctgtctcctccgcagtctcagagcaagctcagcgactcctactccaacacactccccgtgcgcaagagcgtgaccccaaaaaacagctatgccaccaccgagaacaagactctgcctcgctcgagctccatggcagccggcctggagcgcaatggccgtatgcgggtgaaggccatcttctcccacgctgctggggacaacagcaccctcctgagcttcaaggagggtgacctcattaccctgctggtgcctgaggcccgcgatggctggcactacggagagagtgagaagaccaagatgcggggctggtttcccttctcctacacccgggtcttggacagcgatggcagtgacaggctgcacatgagcctgcagcaagggaagagcagcagcacgggcaacctcctggacaaggacgacctggccatcccaccccccgattacggcgccgcctcccgggccttccccgcccagacggccagcggcttcaagcagaggccctacagtgtggccgtgcccgccttctcccagggcctggatgactatggagcgcggtccatgagcagtggcagcggcacgctggtgtccacagtgtgaggacgctgaccccgggcagccgctgctctgaagagcttccgcgccttccccctggtctcgtccgttttcctcctcagctctcgctggtttgttcttgggttgtttttcttttccacctgccccatgccttttggttggtgaccccagactctgtgatcccccagggtccatggtgctgctccatccgccccccctcccctgtgtttacgcgccccatcctgtgtgtcccagccttttgagcagaaactgccaggcaggacctgctgggccgtgcggggcaccctcggcctcaccctgcagtgtctgtggcactcactgcttttctaaggctcgccgtgagccaggtctaaagtttgaagaaaaagaaaaatctt

SEQ ID NO: 18047 - protein, 278 aa, Homo sapiens
MQQVASNGATLPSALSASKSNLVISDPIPGAKPLPVPPELAPFVGRMSAQESTPIMNGVTGPDGEDYSPWADRKAAQPKSLSPPQSQSKLSDSYSNTLPVRKSVTPKNSYATTENKTLPRSSSMAAGLERNGRMRVKAIFSHAAGDNSTLLSFKEGDLITLLVPEARDGWHYGESEKTKMRGWFPFSYTRVLDSDGSDRLHMSLQQGKSSSTGNLLDKDDLAIPPPDYGAASRAFPAQTASGFKQRPYSVAVPAFSQGLDDYGARSMSSGSGTLVSTV

SEQ ID NO: 18048 - DNA, 2511 bp, Homo sapiens
  CDS (201)..(794)
tctcacttgcagactctcctctgaaactgcggaaaagttcagggaagggtccggggaaccctcggcccaaagctcccagaaaaaccacaagcaagggccccaagtgtctgactcgcaaaggccctggggctggaccccgacgaggctctgggcaccagagcaaaaccaacagagccactgggtcccccagtgtccggcgaatgaaagggggctctgccctgggcaccaaaacagcccaggccaaggtagctcgaacactggccaaagctgctcgtgcccaagccaaggtggctcgaacacaggccaaggctgctaaggcccgggccaaggccaaggcagcactggtcaaggctaaggccaaagctaaggcagcacaggtcaaggccaaggccaaagtcatggcagcacgggccaaggccaaggctaaagccaaggcagtacgggccaaggccaaggtggctcggacccagcccaggggcagaggcaggccaaagggatctgctaaggccagaactacaaggaagggccagaaaaaccgccccgagactgttgggcagaagaggaaaagggctgaggaggcaaaagatcttcctcccaagaagagaacacggcttgggccccgatctcctaaggcatggctagggcctggaacagcaaagctgctgaagttccgtgccataaaggtagataggcggtcctcggatgatgaggtgcggcagcgggctcagcggatcctccgcgtgaacctgtcacctgtaatacggctccagccattgctgccatattcagcagtctgattccttcacacggcaatgtttggggaaactaagcccagctgtctgtgtggctagtggcacagtgtgctatgtccgtggactccacaatcttgaggactcccggtgcctctctagggccctggtgaccaccagcctcctttcagaaaccagagtgggtggggtacggtggggtgggtgggcgggaggggtgttttcatggcgcgatgcactgtgacttgttattcaagttgtatgtctactgttccatctatcacgttttatacctttccaccttccagtctccctgcccaccctccatggtcttctgtgtgtgtgtggctgctggcaggccagcttgaagatatagggaaagtggtcccagaaataggcctgcctatttccgggggttgtgggaggaggcagctcctgggcccctttggagagatgaggggaaattggcttctgtggttgtctgagaggcatcccctgaatgcagaagcagagccactgtgaagtaagacacttccctttgaggctgctctggtttgtgatccagacaggccccattcaggacagtaggccccatgcaggacagtaggttccatggggaaccttgcagctagtgggtttttaggtccaggaatggagcctttgtggtacttccctagggaccaaacagacagcctggctaaaatcttggggcttagcctgggcttttctggtgtgggtccaggcccaaaggggttgaggtgcttctccccactctgctctcgtggcagagagtaactatcctcaacttcgattggtggcaaggtactggtggttgagtcaggaccacagagcttgccctcagtgaccaaataattttctccttggttgggtgaggttttccatgactgcctcatcagcagtgctttctgtatgaatcttaagtgctctctctactcccaggtccagcctcatcatgccctccaacatggtccatatgttaaaatacattgtcacccttcctgctttagagagggggctgggccctgggacctgaaggaggtaactgtcctgcccatctgtagtccatcactggctgcccaggctgaatggcagtgcctggggttggcagggaggggcacacattccccctccctggggtaggggcatcatttcagtgagaatcagatgttttctgtttctgggtttgggccccacaagctgccagctgccctgggtggtggacctgtggagaagctctgtgcttcttggtgccctcctgccccttctgcatcttgtggcatgcttcccctgggtgtgtcctcccttggtttcccaagctctgggaccttgctcccagctgtgctgtcgccccactaccttacatgctacttgcctctgacaactctttcattcatgatgtgaatatggggaatgacctgagagccacactcagctcctcaagggcagcccagcttggggctcacgcctgtaatcccagcactttgggagtccaaggcaggtgggtcagttgaggtcaggagtttgagaccagcctggccaacatggtgaaatctcatctgtactaaaaatacaaaacagccaggtgtggtggcacacacctaaagtcccagctacttgggaggttgaggctggaagatcacttgaacctgggaagcagagtttgcagtgagccaagatctcgccactgcactccaggctgggcgacagagtgagactctgtctc

SEQ ID NO: 18049 - protein, 198 aa, Homo sapiens
MKGGSALGTKTAQAKVARTLAKAARAQAKVARTQAKAAKARAKAKAALVKAKAKAKAAQVKAKAKVMAARAKAKAKAKAVRAKAKVARTQPRGRGRPKGSAKARTTRKGQKNRPETVGQKRKRAEEAKDLPPKKRTRLGPRSPKAWLGPGTAKLLKFRAIKVDRRSSDDEVRQRAQRILRVNLSPVIRLQPLLPYSAV

SEQ ID NO: 18050 - DNA, 1705 bp, Homo sapiens
  CDS (21)..(752)
gtttttttcccttctgagcaatggagcttaccatctttatcctgagactggccatttacatcctgacatttcccttgtacctgctgaactttctgggcttgtggagctggatatgcaaaaaatggttcccctacttcttggtgaggttcactgtgatatacaacgaacagatggcaagcaagaagcgggagctcttcagtaacctgcaggagtttgcgggcccctccgggaaactctccctgctggaagtgggctgtggcacgggggccaacttcaagttctacccacctgggtgcagggtgacctgtattgaccccaaccccaactttgagaagtttttgatcaagagcattgcagagaaccgacacctgcagtttgagcgctttgtggtagctgccggggagaacatgcaccaggtggctgatggctctgtggatgtggtggtctgcaccctggtgctgtgctctgtgaagaaccaggagcggattctccgcgaggtgtgcagagtgctgagaccgggaggggctttctatttcatggagcatgtggcagctgagtgttcgacttggaattacttctggcaacaagtcctggatcctgcctggcaccttctgtttgatgggtgcaacctgaccagagagagctggaaggccctggagcgggccagcttctctaagctgaagctgcagcacatccaggccccactgtcctgggagttggtgcgccctcatatctatggatatgctgtgaaatagtgtgagctggcagttaagagctgaatggctcaaagaatttaaagcttcagttttacatttaaaatgctaagtgggagaagagaaaccttttttttggggggcggtttttttggtttgttgttggttttttttttttttttggcaagactccgtctcaaaaaaaaaaaaaaaaaaaaaaagaagtagagacagggagacagggtctcactgtgttgcctaggccggtcttgaactcctgggctcaagtgattctcccaccttgacctcctaaattgttgggattacaggtgtgagacagtgcacctggccgaaatagctcaagtttctgaaaaacaaatctgaatctatttgttattcttagcgtcactggtctggctttcagaattaacatacaaggttgccacacctagttctgcccagctttatgtcttttattccagtattccaccaaagtttgttttcctgcattccagttctcaagtcttaagataaagattgtacttgacagtttagtatatccataaaactatttgaggtggttaaggttcttgggttcattttccttaatactttgctgaatattgtagattgtaggcaatgaaaaagtctactaaattaggaaaaccttgaataattaggtatcctaggtaagagcccctaaacatcaagcaatctgtgagtctgtaaagaaataaatattttttggattattcttatctaattccacccctgttggaagatgatttctttgttctttgcaactatggaagctgtgaaaatcatcacaagtgcctctgaaagcgagtgttaggttggttagagggtttaatattttctgcaatggtttgtaggaattttaataaatgtagtatattttctgagatgattttgtaaaagtactattttaaatatcaaatcaaccaataaattcacatttgtgttaggaacag

SEQ ID NO: 18051 - protein, 244 aa, Homo sapiens
MELTIFILRLAIYILTFPLYLLNFLGLWSWICKKWFPYFLVRFTVIYNEQMASKKRELFSNLQEFAGPSGKLSLLEVGCGTGANFKFYPPGCRVTCIDPNPNFEKFLIKSIAENRHLQFERFVVAAGENMHQVADGSVDVVVCTLVLCSVKNQERILREVCRVLRPGGAFYFMEHVAAECSTWNYFWQQVLDPAWHLLFDGCNLTRESWKALERASFSKLKLQHIQAPLSWELVRPHIYGYAVK

SEQ ID NO: 18052 - DNA, 1722 bp, Homo sapiens
  CDS (39)..(1460)
agggcgtttctaggcctggtcggctggcggcggtccttatgtcgtcagaagatcgagaagctcaggaggatgaattgctggccctggcaagtatttacgatggagatgaatttagaaaagcagagtctgtccaaggtggagaaaccaggatctatttggatttgccacagaatttcaagatatttgtgagcggcaattcaaatgagtgtctccagaatagtggctttgaatacaccatttgctttctgcctccacttgtgctgaactttgaactgccaccagattatccatcctcttccccaccttcattcacacttagtggcaaatggctgtcaccaactcagctatctgctctatgcaagcacttagacaacctatgggaagaacaccgtggcagcgtggtcctgtttgcctggatgcaatttcttaaggaagagaccctagcatacttgaatattgtctctccttttgagctcaagattggttctcagaaaaaagtgcagagaaggacagctcaagcttctcccaacacagagctagattttggaggagctgctggatctgatgtagaccaagaggaaattgtggatgagagagcagtgcaggatgtggaatcactgtcaaatctgatccaggaaatcttggactttgatcaagctcagcagataaaatgctttaatagtaaattgttcctgtgcagtatctgtttctgtgagaagctgggtagtgaatgcatgtacttcttggagtgcaggcatgtgtactgcaaagcctgtctgaaggactactttgaaatccagatcagagatggccaggttcaatgcctcaactgcccagaaccaaagtgcccttcggtggccactcctggtcaggtcaaagagttagtggaagcagagttatttgcccgttatgaccgccttcccctccagtcctccttggacctgatggcagatgtggtgtactgcccccggccgtgctgccagctgcctgtgatgcaggaacctggctgcaccatgggtatctgctccagctgcaattttgccttctgtactttgtgcaggttgacctaccatggggtctccccatgtaaggtgactgcagagaaattaatggacttacgaaatgaatacctgcaagcggatgaggctaataaaagacttttggatcaaaggtatggtaagagagtgattcagaaggcactggaagagatggaaagtaaggagtggctagagaagaactcaaagagctgcccatgttgtggaactcccatagagaaattagacggatgtaacaagatgacatgtactggctgtatgcaatatttctgttggatttgcatgggttctctctctagagcaaacccttacaaacatttcaatgaccctggttcaccatgttttaaccggctgttttatgctgtggatgttgacgacgatatttgggaagatgaggtagaagactagttaactactgctcaagatatggaggtggattgtttttccctaatcttccgtcaagtacacaaagtaactttgcgggatatttagggtactattcattcactcttcctgcgtagaagatatggaagaacgaggtttatattttcatgtggtactactgaagaaggtgcattgatacatttttaaatgtaagttgagaaaaatttataagccaaaggttcagaaaattaaactacagaatattaaatattataatgtgccc

SEQ ID NO: 18053 - protein, 474 aa, Homo sapiens [sequence omitted]

SEQ ID NO: 18054 - DNA, 1894 bp, Homo sapiens
  CDS (34)..(411)
tccaagggaggtttttctgtgtttatccagctgatgcccataattgtattgatcctcgtgtcattattaagccagttgatggtctctaatcctccttattccttatatcccagatctggaactgggcaaactattaaaatgcaaacagaaaacttgggtgttgtttattatgtcaacaaggacttcaaaaatgaatataaaggaatgttattacaaaaggtagaaaagagtgtggaggaagattatgtgactaatattcgaaataactgctggaaagaaagacaacaaaaaacagatatgcagtatgcagcaaaagtataccgtgatgatcgactccgaaggaaggcagatgccttgagcatggacaactgtaaagaattagagcggcttaccagtctttataaaggaggatgaactggaatttttatttataccttttagcgtactctttattttttctgtaagtaagtttggtttcatcatgagggatgaaggaaaagatttgatactgaaaactaaactgaatagttggttcctgaaatcttggactgtttatgacctactggctcctttaaatagtaactgaaaactaaaatggaatattttagttaacgcttctacaagtattttcattttaaaagcttacatgattcctaactaaagtgtcatgagaaaggattatcacacctgtagcaatttccagttttagtgattctccattttttcccttgtcatgtaaatatttatggaatgatcattttgtgtacatacaggttactgcttttttatttaaattcttttagtgtttagctccatgagacacttcagtttaaattgatggaataaatgttatatgacacatttacattttccttatcaaggtgtcaaatatgtggactttaaacaatgaaactttttcaaaaagaaaaaacaaaaactttaactttgtgtaaaatcttatagtattatcagcttagagggaattgatatttttaatattgccgttatattccaaaatatatattgagataaatgaactggtgtagaatatcagtttgctatttagttttatgaattactatacatatacatgcatagaaatgaaatgctatactgataaattttaaagaaaatatgaggaaatggctataaatattaaactaaaagggtcttcaacagtaaagtgcagttatgtcatttaaaattccaatactttaaaggccaccaaattttgatgtatatgtccttgaagggctgctaaaatttatgaagaggactcacattttcccccatagaaatttgcagtttcttggtgatcatttaagcaggatccaaagaagttcctttacaaataagtaataagaaaaatgagtactaaaatacagctttgtgccttttaaccctatgccaactcctaaacatataagtagattacagtatacttatctgatcagagcatgatctgtttggccacatgcaagtgtgagcagaaatagagcagcacgtagaatagtaacttaaagcaagtcatcctttaaaaattctgagctaaaatctatttaccattgagtaattgaattaatcccataggaataagctccttgtaagtaaatccatgatatgaattagaaaaaaaaacagctggaaattgaagtttttgatgcctgtatactggatatgaaactatttgatttctagtcttctgtgtttagcagttgtaatattttaatgattttgcttcatactcggttaatggaacataaacatatctttgatacttctttgtgagtgagagaatgctagatagggtggctttgttctttgtttaagttttttttcctgaatgtagttaatttatggcatctgttgaataaaactgctaaaatgacctctt

SEQ ID NO: 18055 - protein, 126 aa, Homo sapiens
MPIIVLILVSLLSQLMVSNPPYSLYPRSGTGQTIKMQTENLGVVYYVNKDFKNEYKGMLLQKVEKSVEEDYVTNIRNNCWKERQQKTDMQYAAKVYRDDRLRRKADALSMDNCKELERLTSLYKGG

SEQ ID NO: 18056 - DNA, 2226 bp, Homo sapiens
  CDS (19)..(723)
taccgctagtggaagaagatggcggaaggcggagcggcggatctggacacccagcggtctgacatcgcgacgctgctcaaaacctcgctccggaaaggggacacctggtacctagtcgatagtcgctggttcaaacagtggaaaaaatatgttggctttgacagttgggacaaataccagatgggagatcaaaatgtgtatcctggacccattgataactctggacttctcaaagatggtgatgcccagtcacttaaggaacatcttattgatgaattggattacatactgttgccaactgaaggttggaataaacttgtcagctggtacacattgatggaaggtcaagagccaatagcacgaaaggtggttgaacagggtatgtttgtaaagcactgcaaagtagaagtatatctcacagaattgaagctatgtgaaaatggaaacatgaataatgttgtaactcgaagatttagcaaagctgacacaatagatacaattgaaaaggaaataagaaaaatcttcagtattccagatgaaaaggagaccagattgtggaacaaatacatgagtaacacatttgaaccactgaataaaccagacagcaccattcaggatgctggtttataccaaggacaggtattagtgatagaacagaaaaatgaagatggaacatggccaaggggtccttctactcctaaaaagccactagagcagagttgctagtgaacagtttaatttccacatacgtcacagaaagagagctaaagggctctggttatcatccacagactgaccagtcaacccctaaataacctgatattaactccacaaatgttagctagattggaccatgtgtaatctgagtcagaagtcggaatcagaagagataaatgatgcgttatcactcaacagtaatgtctgcaacagtattgtaaaattgttgtactttacctgtcgaccacatccatccttacctctctgatcaccttactatttaaggacagtccctctactctacctgtagtatttatctcaatgcttcctggtccttgctttttcttttattatctcctctctcctacatatataaatgcctagcatagtgccacacatatggtaaacaccagtttattatttttatttcttttctaatgtcatcttccccctcagcctatgaatataaacacatcttcatctttaaaaccaaaaaccatatacttcctccatttaccatccttaagcttttttttctttgacagccacctacatttaaaaggctatacttaatgttgcttgccacccattcaggatttaacaaagttcttatttgtctttcttttaacctagtttatttgacctgtctttagtatttctttttgataaccatcttctaaagaaattctctgaatttgaatgcatgatacgaccttttatgccaaggactttgcctctctgaccagtcctttgtctgtctagctcggttcctctttagggttgccacatttagttttgcaaattgtgcacagctctagggggcatcattcatatcatatgtagtctatgtgataggccctccttggcacggtgcagtgcagcttcactaactgtttgcagcagctctactcagaccttaaatgcattgacattcactaaatttctgtcagaagacctcttttatcataccatagtaggtgttcaaaattaggtgattctatgctaatcctctcccccagctcaaactgacacaaaatatgccattctgtatttctagactagaccacttttctgaattccagatttttcataaatttcatgtaggactcaccacctcaaattaaaccaaatctttttacccctccttctcccatcccctcaacctaaactgtcttcatttcctgtattgcctatttcaagtaccatccaagagccatcctgagttcctcctccagcctttcttctcttgtctagttagtcagcaagtcttgcagattctgcctcctcacctgaagttttcaaacagtacccctttacattcttgaaaattattaaagatccagagaacttctgttatatgggttatagctgttaatatttgtcatattcgaaattgaaataagattttaaggtattttaaaataacagtacaaaaccattgtattttgacatgaataacacttttatgaaaataactatattccaaaacaataaaattaccaaaaagtt

SEQ ID NO: 18057 - protein, 235 aa, Homo sapiens
MAEGGAADLDTQRSDIATLLKTSLRKGDTWYLVDSRWFKQWKKYVGFDSWDKYQMGDQNVYPGPIDNSGLLKDGDAQSLKEHLIDELDYILLPTEGWNKLVSWYTLMEGQEPIARKVVEQGMFVKHCKVEVYLTELKLCENGNMNNVVTRRFSKADTIDTIEKEIRKIFSIPDEKETRLWNKYMSNTFEPLNKPDSTIQDAGLYQGQVLVIEQKNEDGTWPRGPSTPKKPLEQSC

SEQ ID NO: 18058 - DNA, 1674 bp, Homo sapiens
attgtgttcacctgacttgagattgggaagtatagccttgttaaagctttgctaaacaggacttcttcttatgacttcaaccacatcctgtggtaggtgtcacattatggggctcaaaaagtcatagaaaaaagtcttcagttctcctctgttttagtcacactctttgtgctatggaagtgcttcctcttgcactaccttctccacctcgtcaattatcagaatcagaaaaaagtcgaatggaggaccaggaggaaaatactttaagagagttgcggttgtttctcagggatgtaaccaagaggctggccacagataaacgctttaacatcttcagcaaaccggtggatattgaagaggtcttgtttcagtagtgtgcaaacagtgaagttgaactggctaaaagaaaaaaatattgacatctttttttggaaggaaaaaaaagcaaaggcatggatgaatattacccctagcctataaaattttaatccatgtgataactaccgatgtcatcagcaaacatctggtgacttttggatgaaattagcgaccaatttatattggcctcttaattattattaacctttgtggtctcttactcttcgatttaagaggattaaaggttgccttagtcaaatatccatactagattatttttattccaggataaattctgctgtcaaagagtatattggtattaaccaatcaataccagttaatactggcatttcccaaattatgtatacctcatcaaaagaggtagctaaaaacctgaaatttctttgtctttcatattttggaaatgcctgtggctgggatgctgtttgaagttaaaacatatcccgtgcaactaaattatttttctttctaaggattttctctgctcccagtggaaaatttctcactttatatgtgtattattttgtgtgcttgtgggagcatggtttgtgatgatgagaaaagaaattttccatttgggaatctaatactatcaactacatttttggtttttgttttatcctgggataatgtagtgtgtggatgaacacaatgtaatctttactggcctctttcttatagttcagactccatgtttgaacagctttggtgtttttagtttttattcatttctttttttaaaaaaatgaattatgggtgattcagggtttaatgttgtatcctaattgtgaaatctgtgcttttggacctgagcagatacctttgaaaccattacctcatctgttactaggaagaatgagctagcatttacattcctcccccctggcaagtctgaaaagaaatactttcccccctttttggaatgaagagactatctataattttatttgtacctttatccacaatacactgttttttccatttgatcctcttatcaaccttgtaggatcattattattattcttactttgcagttgaggaaacagacttgttggctagtgacatagccaagacttgaaagttttttaaaattcaaagcccacattcattatcatagctactttatatctttccactgggataacaggacatgcctaattggctttttaaattaataaatatcagtttatattgctgggtcatccccccccccatagtgtttttaaataattttaaaactatcagccgattaaaaaattattttaaataaaaaac

SEQ ID NO: 18059 - DNA, 2142 bp, Homo sapiens
  CDS (220)..(666)
acaccgagtccgcggcggcgtccagggtcggcagcaaccgcagccgagcccgagcgggtggcggcgccatggcgtgcgcggggctgctcaccgtgtgcctgctccggccgcccgcgccccagccccagccccagaccccgcggcacccccagctcgcgcccgacccggggcccgccggacacacgctcttccaggacgttttccgcagagcagacaagaatgctctcatttgaggaattccagaattactttgccgatggggttctcagcctgggggagctgcaggaactgttcagcggcattgatgggcatctcaccgacaatttagaaacagaaaaactgtgtgactacttctcagagcacctgggtgtctaccggccggtgctggctgcattggaatcgctgaaccgtgcagtgctcgctgccatggatgccaccaagctggagtacgagagggcctccaaagtggaccagtttgtgacacgcttcctgctgcgggagacggtgagccagctgcaagcccttcagagctcgctggagggggcgtcagataccctggaggcccaggcccatggctggcggtatgtaagggtgctgtcaacctgtggggctagtgcacaagcgcccattgtacccccattccaaatccccacagtcccagcatcctagagcctgcattttcgggcggggaagccatggcagggtagccatggcggggtgaaatgagactggctttggggctaggcctcggagtcccaggaggcttgtcttccccacccaggcttatcccgtcctggggccccagtcctcggccctgtgagcctcacttcctctaggtcagatgcagagagcgtggaggcgcagagcaggctctgcggcagccggcgggcaggacgccgagccctgaggagtgtcagccggtcatccacctggtcccccggctcttctgacacagggcgcagctcagaggccgagatgcagtggcggctccaggtgaaccgcctccaggagctcatcgaccagctcgagtgcaaggccccccggctggaacccctgcgtgaagaggacctggccaaggggcctgacttgcacatcctcatggcccagaggcaggtccaggtggcagaggaaggcctgcaggacttccaccgagccctgcgctgctatgtggacttcacaggggcccagagccattgtctgcatgtgtccgcccagaagatgctggacggtgcctccttcaccctgtatgagttctggcaggatgaggcctcctggagaaggcaccagcagtcgcctggcagcaaggccttccagcgcatcctcatcgaccacctgcgggccccggacaccctcaccactgtgttcttcccagcctcctggtggataatgaataacaactgagccagacctgcacacgccgagggccccgggaccctgcctgcctccctctggagccttctggactggccagcccagcgcaaagaccagggcttgtctcctcctggacttgggcctggtggaagggctctcagcccagggatcagggactgggctgcttgctttctatttattattgatttatttatccctgtattttattgtttgtcacttcagcctccaagctactttggcttctgcctggctcaggagacctggattctggtccctgctgtccctgcctggctgagcgacccagggcaggtcccgtccctgtctgggtgggcctcaggccatctggccgcctagcgagggtcctgctttcttcctgctgtcttgggaccaggcttctgctcctcctcagccagcggcagaagcagggctgatgctcagggaccccccaaccctcaaaccttgcctccgaggctgggcctgagctgggtgccccgtcgccctcccaggccactaggctctgactcttccagcacccatggatgtgccagaggcctctgggttggtttgcatgtcatttgcatatcgtttgcatgccctcatcccacccattctcagggcagtatgggaagccccaaggtgacctagccaagtagcaataatttgggtccagggtcacctattgcccccagaggcctctgaaccccaggctgggaccccagcacagaggcaataaaggcagtggtcccttcc

SEQ ID NO: 18060 - protein, 149 aa, Homo sapiens
MLSFEEFQNYFADGVLSLGELQELFSGIDGHLTDNLETEKLCDYFSEHLGVYRPVLAALESLNRAVLAAMDATKLEYERASKVDQFVTRFLLRETVSQLQALQSSLEGASDTLEAQAHGWRYVRVLSTCGASAQAPIVPPFQIPTVPAS

SEQ ID NO: 18061 - DNA, 1995 bp, Homo sapiens
  CDS (620)..(1924)
agttagtgggtaggcctgagagccgaggaaaactgagcgtgggcctcagaaagaagtcaaggcacccgcgagccgggcaactgccctccttccgcgccggcggagcgattaaagtgaagaaacaatggccagcaatcacaaatcttcagcagctcgccctgtttcaagaggtggagttgggttaacaggaaggcctccttctgggatacgacccctatcaggaaatattcgagtggcaactgcaatgccacctgggacagcaagaccaggttctcgtggttgtcccatagggactggtggagttctgtcttctcaaatcaaagttgcccatcgccctgtaacacaacaaggtttgactggaatgaaaactgggacgaaaggtccccagaggcaaattttagacaaatcttactatcttgggcttcttagaagtaaaataagtgaacttacaactgaagttaataaacttcagaagggaatagaaatgtacaatcaagagaattcagtatatttgtcatatgaaaagagggctgagactttagctgttgagataaaagagcttcaaggacaactagcagactacaacatgttggtagattaacttaataccaacactgaaatggaagaagtaatgaatggttacaatatgcttaaagctcaaaatgatcgagaaacacaaagtttggatgtcatatttactgaaagacaagcgaaagaaaaacaaatcagaagtgtcgaagaagaaattgaacaggaaaaacaagcaacagatgacattatcaaaaatatgtctcttgaaaaccaagtcaagtacctagagatgaaaaccacaaatgagaaactgttacaggaattagatacacttcaacaacaattggattcacagaacatgaaaaaagagagcctggaagcagaaatagctcactcccaggtgaaacaggaggcggtattgctgcatgaaaaactttatgagttggagtcccatcgagatcaaatgattgcagaagacaaaagcataggatctccaatggaagagagagagaaattacttaagcagattaaagatgataatcaggaaatagccagcatggaaagacagttaacagatacaaaagaaaagataaatcagtttattgaagaaattagacaacttgacatggatttagaggaacaccaaggtgaaatgaaccagaaatacaaggagctaaagaaaagggaggaacatatggacacttttattgagacttttgaggaaacaaagaatcaggaactgaaacgaaaggcacagatagaagccaacattgttgcactcttggagcactgcagtcgaaatataaatcgtatagaacagatatcctctatcaccaatcaagagctaaagatgatgcaggatgacctcaattttaaatctactgaagtgcagaaatcacaaagtacagctcagaatttgacttcagacattcaacgtctgcagttggatctgcagaaaatggagcttctagaaagtaagatgactgaagaacagcattctctaaaaagcaaaattaagcaaatgacaactgatctggagatatataatgatttgccagctttaaaatcatcaggtgaagaaaagataaagaaattacatcaggagagaatgatattatcaacccacagaaatgcctttaagaaaataatggagaagcaaaacatagagtatgaggcactaaaaacacaattgcaagaaaatgagacacattctcagcttacaaatttggagagaaagtggcaacaccttgagcaaaataattttgcgatgaaagaattcatagcaaccaagagtcaagagagtgattaccagccaattaagaaaaatgtgaccaagcagattgcagagtacaataaaaccatcgtggatgctttacatagcaccagcggaaactgagtttaagtccactgaaagtctctaaggaagtatcctcttgctgctaaacttggtacaagttgactacc

SEQ ID NO: 18062 - protein, 435 aa, Homo sapiens
MEEVMNGYNMLKAQNDRETQSLDVIFTERQAKEKQIRSVEEEIEQEKQATDDIIKNMSLENQVKYLEMKTTNEKLLQELDTLQQQLDSQNMKKESLEAEIAHSQVKQEAVLLHEKLYELESHRDQMIAEDKSIGSPMEEREKLLKQIKDDNQEIASMERQLTDTKEKINQFIEEIRQLDMDLEEHQGEMNQKYKELKKREEHMDTFIETFEETKNQELKRKAQIEANIVALLEHCSRNINRIEQISSITNQELKMMQDDLNFKSTEVQKSQSTAQNLTSDIQRLQLDLQKMELLESKMTEEQHSLKSKIKQMTTDLEIYNDLPALKSSGEEKIKKLHQERMILSTHRNAFKKIMEKQNIEYEALKTQLQENETHSQLTNLERKWQHLEQNNFAMKEFIATKSQESDYQPIKKNVTKQIAEYNKTIVDALHSTSGN

SEQ ID NO: 18063 - DNA, 1997 bp, Homo sapiens
  CDS (206)..(1396)
aatttttaaacctactgtagtacaacaagccaggattgcccagaatggaattttgggagactttatcattagatatgacgtcaatagagaacagagcattggggacatccaggttctaaatggctattttgtgcactactttgctcctaaagaccttcctcctttacccaagaatgtggtattcgtgcttgacagcagtgcttctatggtgggaaccaaactccggcagaccaaggatgccctcttcacaattctccatgacctccgaccccaggaccgtttcagtatcattggattttccaaccggatcaaagtatggaaggaccacttgatatcagtcactccagacagcatcagggatgggaaagtgtacattcaccatatgtcacccactggaggcacagacatcaacggggccctgcagagggccatcaggctcctcaacaagtacgtggcccacagtggcattggagaccggagcgtgtccctcatcgtcttcctgacggatgggaagcccacggtcggggagacgcacaccctcaagatcctcaacaacacccgagaggccgcccgaggccaagtctgcatcttcaccattggcatcggcaacgacgtggacttcaggctgctggagaaaccgtcgctggagaactgtggcctcacacggcgcgtgcacgaggaggaggacgcaggctcgcagctcatcgggttctacgatgaaatcaggaccccgctcctctctgacatccgcatcgattatccccccagctcagtggtgcaggccaccaagaccctgttccccaactacttcaacggctcggagatcatcattgcggggaagctggtggacaggaagctggatcacctgcacgtggaggtcaccgccagcaacagtaagaaattcatcatcctgaagacagatgtgcctgtgcggcctcagaaggcagggaaagatgtcacaggaagccccaggcctggaggcgatggagagggggaccccaaccacatcgagcgtctctggagctacctcaccacaaaggagctgctgagctcctggctgcaaagtgacgatgaaccggagaaggagcggctgcggcagcgggcccaggccctggctgtgagctaccgcttcctcactcccttcacctccatgaagctgagggggccggtcccacgcatggacggcctggaggaggcccacggcatgtcggctgccatgggacccgaaccggtggtgcagagcgtgcgaggagctggcacgcagccaggacctttgctcaagaagccataccagccaagaattaaaatctctaaaacatcagttcgtggcttcagaagggaagaacagattttttcaaatgtcatgaaatttccttttgccagcatcctggaactataataaaaattcagaggaaagaacaacctatgactgggttttgttctgctgtgtccagatcatcctctggaagtcttgattgttgcctttctgctgctgtgctgtacgtgcaagttcctaaagccagggacatcccggagatgagctgtggatatagagtccgcacagcctgcgggagacagaatgtaattccttccaacacacacacacaggctttatggaatgccagaaaagcttcctcttggatgctgcctggagtaatgactttttgaccctcccctcttttttggagcaagcactatctttccttgtaaagaaatttggacaatttgagtagaaatggtgtggtatgtgcacatagaaactctcagaaaactgtcagatgagctagacagttgtcctctatctccatgggtcccgcatcccaaggatcgaaccaacaacagatcaaaaatacgtgaaaaaggaattgcatctgtattgaatgtgtacggactttttttcttgtctttgttccttaaacaatgtagtgcaacaactatttacatcgcatctcctttgcattcattattataagtaaactagagatgatttaaagtgt

SEQ ID NO: 18064 - protein, 397 aa, Homo sapiens [sequence omitted]

SEQ ID NO: 18065 - DNA, 2950 bp, Homo sapiens
tatcactgctaccttggctctccaaggaatgggcttgtgctagaccgctgccctacttaacagctgcctcattgcaagggcagtttttcttgcatgggttctctatattcccagagtatgtggcacaatctgtgttgtttatatgataccagatgccccacaagaacccttattcctctcatttcacattcttcctttaatagcctccttcagatcccatacctgacccctctctaacacaaaacttattgggtaagtgactttgaaaagttttgtggcacctgacccaccccagacactagggcaatcagaaggtctcctttttagcccagcacaggcccaggccactttgtcgtgtttgttttaacttctaaagaaaatatgtttcagcattataagaaaggcagaatgcagaacacctacatttttgttttagtttggtgccaaggctcaggctgtattggcaaattcccgaaagttttcccactttgcctggccctgcttctgtcttttctttctcagtaaacagttctgaaggcaggagtggaacccgggagtattttcatgtctttcatccttgaaagatttttatgtgcctgcattttttttttaattaaaaaatgccttttcattggtcttaagagaccgcattggagaatttcaggcttttgataaatgcttcttcaaagagattttcttctctagtctagccttccacattcttagattaatatggccaaccctgtacacatcactacactaaacactgctctagataaactgctcaagttcatttaactcatttgatgcacctaaaggggttcctcattttaaagatttgttagaccaagaagcaagagagtattcctagtattcccaaccatgaaaagtatcattctttgcaccaaatgttaacaaaatcattttgttctcctgcctcttctttttaaaggtgtttgatgattaagtggggtcactgaattccatttgtggactgaaaagtattcaatccacttttggggttcagagataaaacattttttcccaagtagctggggctcttccattttgcagataagtcaaataatcaacactaaaggaggctaaactgttgatgaatgagagactccctgactgctcagatgaccctagccacactgaaagggcacctacaggtcagtttagctacctcctgtctttcccatgcaaagctgataacacagttgtctttggacctgtagacctcttggattccaggtgtgatggagtaaagtgtgggattgttgttttgctgggatgcaaataactaaatgctttggtggttaattgctaagagtaaatactactttagccatccaagccgccttctgcagcaaaaggcttttgtggagaaccttttatgttcccaaccactttttgaatggtgtgccatttaaaaatccaggccagatcctattataaccaactctcaggatttacagccttcagttgtactagaattttgtttttatccaatactcattaaataagtgggccacttaggaagattcaaaatcttggttattacatgaagtttgttatatttcttgtcaacagtattgaaatgtaatatgtatgtgttcatgtatgaaaatttttactccacacaggtgtttcagtagagtggggcaggaaaagagatctcttcgatttctttcaggcctgaggcttttgtgaaatgcgtcagccccctgtgacagtaggttttgatgctagtgatcttcagatctttctctctggaaatgtgcagagagtgtcagtttcccaagttctgaggtaactctcagcccagatgtgaaatgggagcctaccagctggtatagaagggaatgggtaggaggcactgggtgctgactcattcagcactgtcccttttctatactgctgatacatcccatggttctgagaagccttatctcagtctatttggaagagagggaggaagagaaggaagtaacccaaagtactactcatttatccttgtatattgattagttaaagggataattaatttaatgctgaggagagtttgacagattttgaaaatgagtaaaggcaaaaaaaatttttttagcctttattttgcctttgggaattttacagagtcaaagtaggcagaataagaaaatagttcttcaggagggccgacctttaaagaacttcaacatagtttcggaattgtggggaagagaagagtgactgagctgagaagtaataatagaataaagggttgagtaacttagaactgaaaatgatctcttttaaaaagaaattaaatcagacaccacatggtggtgtccttggatctcactctgcagaattagcagtgtataaccatcttctcttttcatcttgttccaattctctcctctttcctttccattctgctttaagctcatgtgtcaggcagactttacctgagtgtcagacattacctaaaacacatacgttagccatgctgctggtatggagaaattccacaccatgattattagcctcctttaagctgaatgggatttaaccattctaggcaacacccctgaagggcatacctaacctcaatagtgttggcttttaaaacgtatgtttgtatggtagagaaactttgtaaaagaagaatccaagagaagtttgtgaggatcctacaaacccaggcccactcactttgctctaattctttctagtatcttgtagatctaatgggtctgggataaaaactttgaaaagtgtcaatattccatgtatgctgctgaaatgaagttaagtttggaaagaagtgatacctctagactgggtttatattaatctgggatataaatgaagaagacatactaatagaactccttgcttttaattggggaaatagggctttaataattttgacctcaactaaaaatgatatgcaatagtc

SEQ ID NO: 18066 - DNA, 2808 bp, Homo sapiens
  CDS (437)..(1606)
agttcgcctctgcagcctctgcggggaagtgccggggctgctcgaggctcagttcttaggactgcaaggaggcagccccggcgtgcggcggtgcgcacagtctagagtggccagggcgcgagagtgcaacgtcctcctggccccgagcgcgtcgtcgcgccccgggagcagaccctcgcccagcagttaccgccgtcccgactttccgttccagttgcagctcctgccgggcaacatgtcaagagccgccgccgctacagctgccgccgccacctggggaagagcagcagcagcagtggcggccgcgggcacacgggggcaataaaccgagccacccgggcgtccagcgtgccggggaaccctctctgcgctcactgcccggcgggacccacgccatgtgctgagccatgtccctggccgcgcccgcgggcagcgcatggggcagcgcctgagtggcggcagatcttgcctcgatgtccccggccggctcctaccgcagccgccgccgcccccgccgccggtgaggaggaagctcgcgctgctcttcgccatgctctgcgtctggctctatatgttcctgtactcgtgcgccggctcctgcgccgccgcgccggggctgctgctcctgggctctgggtcccgcgccgcacacgacccgccagccctggccacagctccggacgggacgccccccaggctgccgttccgggcgccgccagccaccccactggcttcaggcaaggagatggccgagggcgctgcgagcccggaggagcagagtcccgaggtgccggactccccaagccccatctccagctttttcagtgggtctgggagcaagcagctgccgcaggccatcatcatcggcgtgaagaagggcggcacgcgggcgctgctggagtttctgcgcgtgcaccccgacgtgcgcgccgtgggcgccgagccccatttcttcgatcgcagctacgacaagggcctcgcttggtaccgggacctgatgcccagaaccctggacgggcagatcaccatggagaagacgcccagttacttcgtcacgcgggaggcccccgcgcgcatctcggccatgtccaaggacaccaagctcatcgtggtggtgcgggacccggtgaccagggccatctcggactacacgcagacgctgtccaagcggcccgacatccccaccttcgagagcttgacgttcaaaaacaggacagcgggcctcatcgacacgtcgtggagcgccatccagatcggcatctacgccaagcacctggagcactggctgcgccacttccccatccgccagatgctcttcgtgagcggcgagcggctcatcagcgacccggccggggagctgggccgcgtgcaagacttcctgggcctcaagaggatcatcacggacaagcacttctacttcaacaagaccaagggcttcccctgcctgaagaaggcggagggcagcagccggccccattgcctgggcaagaccaagggcaggacccatcctgagatcgaccgcgaggtggtccgcaggctgcgcgagttctaccggcctttcaacctcaagttctaccagatgaccgggcacgactttggctgggattgagcagacccgggctatgtaccttacccacgtggcttatctattgacagagattatatcataacatggcttgaagtaaaaggcagtatccaagtccttcacctggtcttgccctgtctactttctgatcattctgatggtctgatgtggctgttgatgtggaactgcagaagagttcagagaagagtatgcaacaaagccataggaaaacacacaggagcttttccctccccttcaggtccccgccctctttccaagctggacaattttttattaagttgtttattccctgccttaaaactgaaacaggaaattttctggtagaaggagggtcatttagtcacgaacactgaagtgggtcaaaattctattctgggtcaaatccttgaattcaaacagatgtccataatcagtactgatggaatagagcaagtttttctatgtaagacaaataaatcaaacatcatgtgcatctcctcataagggtctgcaagggtctgatggtttaaagttcctaacagatctggttgcagcatctgccggagcttgcaccccatcatcggacggtcatcttcctgctgcagaagttaggtaacataagacttagatttcttcctgttctagcaatctgcaagaccaccaggcttaactttttagctgccagaagacaaacccccttttctgtttcggcaatttgtcctggcacgtgttttggacttcctccgatttacacgaaaagctctgatattcattggagtactttattttttttcctcagttttgtttcttttctcatgtaaaaacaaacaaaaaggtcaacaaaaaaaaattgaggtttttcttgtttctatctagttcatgctttctttgcggtgtttgaacagtagtctgttaacttagtaggtggtacctggaaaggtattttaagtatagtgactgtttaataaatacttaattggatgatggaggaggagaaattgttttcttcccaggattctctttgggggtcattttgtgtgacagatatattttagacatttggagaaacagtttcagatcctgccaggatatttttgtaaaaaaggaaaatggaagattccaataaactagaaacagtacgtatctaagatgctgacacagaagctagtgtgacttttcagcttatcaagaggatggccaataaaacttaaaggtgtggttag

SEQ ID NO: 18067 - protein, 390 aa, Homo sapiens
MGQRLSGGRSCLDVPGRLLPQPPPPPPPVRRKLALLFAMLCVWLYMFLYSCAGSCAAAPGLLLLGSGSRAAHDPPALATAPDGTPPRLPFRAPPATPLASGKEMAEGAASPEEQSPEVPDSPSPISSFFSGSGSKQLPQAIIIGVKKGGTRALLEFLRVHPDVRAVGAEPHFFDRSYDKGLAWYRDLMPRTLDGQITMEKTPSYFVTREAPARISAMSKDTKLIVVVRDPVTRAISDYTQTLSKRPDIPTFESLTFKNRTAGLIDTSWSAIQIGIYAKHLEHWLRHFPIRQMLFVSGERLISDPAGELGRVQDFLGLKRIITDKHFYFNKTKGFPCLKKAEGSSRPHCLGKTKGRTHPEIDREVVRRLREFYRPFNLKFYQMTGHDFGWD

SEQ ID NO: 18068 - DNA, 1927 bp, Homo sapiens
  CDS (653)..(1030)
gtggcatattgaagtgatctataaatatcttcagtcctctctgaagtgtgggtatttcttctatctaaaaaatacatacagtgactgtcttcaaatctacttggttcttgaccaaataggagctaatgggtaatgaatacctttttgtttgtttgtttgtttgttttgttttttttttttttaagggtctcactcttttgcccaggctggagtgcagtggcacaatcacggctcccaggctaatgtttttatttttaatttgtaatttttttttttattttttttgttgagatggagttgctccatgttgcacaggctgttctcaaactcctaagctcaagccatctgcctgccttggcctcccaaagtgctgggattgtagacataagccacctcacccagcctatgaatatctttctaacattgtaagaatgaggtaatgtttccatcagtctaatacagatatatttcttccctccaaaacagtttattttgattgtttattttattttgattgtaactccgtcataacttgacatggaaaatgctatatactatgaaaacttagctgaaagggaagaattgttttagaaagacaatatttaaaacaccgcactgccaatatattgatcctttatggttatttcctaaaatgctgttttcgaaacattcctttttcaccctgttgtgtggcttagacccatctcgtaatctgttaattggaaagaggctacagacaccagcagtgtgcgttctgcaggtacacgctgccaaagtaattcctgctcatccatgccctgtctctgtctcttttagagtcataccttatttgagtataggttgcttaattttgctagacttcctgaaaacactaaggtggagtatcagaagtgattttagtcacagttctgcgggagagcttagaataacatcctcctttgggaggtggtctcgggtgcgtggatgttggtatacagtctttattgtaagtctgatacaaaatgctaataaatttaatgtttttcttccttaatttattggcatagttcttcaggtagcacctcatttttattaatgatattgggattaactatgaacaagctatatgtagacatttgcatttaaggacattgcagtgtttcaaagatcccatcattgcagcttgtatcctttagatccaatcggaaacttctggagtcttacattaatgctcatttgagctaattagtaatctgtttaaacagatttggcaatactttaaagatactgtagactatttatgtatagatagatcatattacccattaaagtctggggaaaaaaattttttaattttactcttcttatgtactgaaaactttttttaaaaaaggtgatgatgaagtgcattctgtagcagcagcgcagctatgctttaaaccacacaaaaggctgtgtccaggtgcagcctccttcacccttcctgcccacggtgaggattgaataaccaggacttggggatattgtttgttgtcagggttattctgtgtggtaaggaatatttgtttcacatttatacattttctttttccactcacgtaagtttctatcttgggagcatagtccaaagtgcaaaacttggtgtttacaaggaaaattgtcttccagaactccactgtcatcactttcaccaaagtggaagtttgcatgaatatgctcagaatctaatattcaatgttctgttacattgtaagtgaagtccagctacaaaatagatttaatatattgaatttatttgtacatatgcagagtacggtatttctgtatggaatctgctttattcctatttttcccaactctgatgagtagaatattaaatgtgttgttatggaaatacagattattgcttctataggaagataattatgaaaataaaacctgaaactat

SEQ ID NO: 18069 - protein, 126 aa, Homo sapiens [sequence omitted]

SEQ ID NO: 18070 - DNA, 1883 bp, Homo sapiens
ttcattctgtcatcagatacctccaaatttagaacaatatctatccgtagccattggttttcggatatgctttaccctgggaacgtgcgtaaaatacatttccgtgtttggctatttctttcccagctgcatagagggtgtcaccattattttagataatagccatggccggtgcccactttaatcacttttccaatcacttttcactgattgcttctaaggcacttgatttcagatgtcactttttgctgaaatacctggataactgtttcagggggccttgtggactaccgagaagtttgcctccaggggttggtaaacttctaaaagtgccaagtcatgaatattttatgctttgcaggcccaagaagcaaaagtaagactattatgtagatacccataaaacgatttaaagtgaaatcatttaaaaatatgaaaaccattcttcacttgcaggctacgaacaagcagcctcctgtttgactggggttgctcagcgagccttctggcttctccggcacacacacattcaggtctccatctatgcaaatggagacctccttcttcttctcaccactgtaataaggagaaaacagacagtggaaggtttgtagaacctcatgattgactatagaggctttcagcatttttcctttactattaaatgggacactgtactaaaaaaaattctattgtttctatatttgttcatttattgattggatgttcattcatccaacaaatgtttattgaacaggtcctgtgtctccactgttccaggcacgggggatacctaatgaggaaaataaggcatctctgccctctggagtttttagtttacatatgaacaagtataatatgtaggcttttggatgacaggtatcatatagaggagccagggaaggggacaggatggacaggggaagagggttgttagttttacatgtgatggaaagggagagtgatcagaaataaggagcagaatcctgtgtgttgcagatgtctgggcaggcgcgctccggaaaaggaagaggtggcgcagaggccctgacctgggaatgtgtgactagggcggaggctggagacccatggcagatgaagccaggccttgagatgactgtaaggacttggaagggagagccagtgggatttactgaggggttgagtatggggtgaaagagagaaagagtagtctaggacgaccccagtggttttctcctgagcatcggaaggttgactttcgaagcaggagagcttcagtggcacagattgtgggggatgattggggctgtgtgggtacagagtgagtttgaggtgcctgtcagagatctacaaggaggtggccattaggccattaaaatctggagtataaaaatctggagttcagaaaagaagtgtaggcttttttgagagttgttgacataaagatggtgtttaaagctatgagactgggtgagataccagcaagtaagtcagagaagagcaggggccaaagcctgagccccagagcactccagcattaggaggtggaggagatgagggagcaccagcagaaacctcgaaagaccttccaggaaggtagggggaaagcaggagactggtgttcagaagccaactgcagaaagtgttcctgaggaggaggcagagagggggcttcggtgacacatgatgctgactgggtcaaatcccttgaggaccaagacttggccttggcattcagtaacatagtggtcactggagaccttgacaagaggtgtcagtggggccaggcgcagtgcctcatgcctgtaatcccagcactttgggaggccgaggcgggcggatcacctaaggtcgggagtttgagaccagcttgaccaacatggagaaaccctgtctttagt

SEQ ID NO: 18071 - DNA, 2036 bp, Homo sapiens
attacatggtgtctaaccaaatgagcaggcttaggaatttagatgagatgtgtaagattcacttacaggcagtagctgcttctagcatttgcaagatcctacacttttaccttctttaagggtgtacattttgatgttgaacatcagttttcatgtagacttaggactcatgtgcagtaaatataaataagtgtagcatcagaagcagtaggaatggccgtatacaaccatcctgttaaacatttaaatttagctctgatagtgtgttaagacctgaatatctttcctagtaaaaataggatgtgttgaaatatttatatgtactttgatctctccacatcacttataacttatgtgttttatttctccaagtgcggtgttcctgaatgttatgtatgcttttttttctgtaccacaggcattatctatacctggggccagattttctgcactttgaaatgttgcctttgcctaatgtaggttgactttctgaattgtggagaggcacttttccaagccaatcttatttgtcactttttgttttaatatcttgctctctgacaggaaagaaacaattcacttaccagcctcctcaccccatcctccaccatttccttaatgttccatggtattttcaacggaatacactttgaaaggtaaaaacaattcaaaagtatcgattatcataaattcacaaaatatttttgcaaccagaacacaaaagcaggctagtcagctaaggtaaatttcattttcaaacgagagggaaacatgggaagtaaaagattaggatgtgaaaggttgtcctaaacagaccaaggagactgttccctaatttattctcttggctggttctctcattgaattatcagaccccaagaggagatattggaacaggctcccttcatgccaagggtctttctaagttaatactgtgagcattgagcccccattaaaactcttttttacttcagaaagaattttacaggttaaagggaaagaaatggtgggaaactctccccgtaatgcttagccaactttaaagtgtacccttcaatatccccattggcaactgcagctgagatcttagagaggaaatataaccggtgtgagatctagcaatgcatttgaatcttcactccctaccaggctcttcctatttttaatctcttcacctcagaactagacatatggagagctttaaaggcaagctggaaggcacattgtatcaattctaccttgtgctatacgtaggagagatccaaaatttggatgcttctggagactcttagacatcttttcattgttgtccatttttaaagttgatgattgctggaaacattcacacgcttaaaagcaatggtgtgagttattaatgggtaaactaagaagtgttataggcaatgacttgaaatggtttttaaattgtatggattgttaagaattgttgaaaaaaaattttttttttttggacagcttcaaggagatgttagcaatttcagatatactagccagtttaggtatgactttggaagtgcagaaacagaaggatactgttagaaaatcctaacattggtctccgtgcatgtgttcacacctggtctcactgcctttccttcccacagacctgagtgtgaaagactgagagttgaggagttactttgtggatcttgtccaaatttagtgaaatgtggaagtcaaccagaccaatgatggaattaaatgtaaattccaagagggctttcacagtccacagggttcaaatgacttgggtaacagaagttattcttagcttacctgttatgtgacagtgatttacctgtccatttccaacccaaaagcctgtcagaaagcattctttagagaaaaccactttacatttgttgttaaactcctgatcgctactcttaagaatatacatgtatgtattcataggaacattttttctcaatatttgtatgattcgcttactgttattgtgctgagtgagctcctgtgcgcttcagacaaaaataaatgagactttgtgtttacgt

SEQ ID NO: 18072 - DNA, 2461 bp, Homo sapiens
  CDS (51)..(983)
tgaggtccgcggcctatttacccaagttggaggtaggggcctgtggaaacatgaagagggtaaacagctgtgtgaagagtgatgagcatgtcctggaggagctggaaacagaaggggagaggcagctgaaaagcctccttcagcatcaacttgatacttctgtctccattgaggaatgtatgtctaagaaagagagctttgctcctggtactatgtacaagccctttggggaggaagcagctgggactatgactttgtcccaattccagacactgcatgagaaggaccaggaaactgcttctctcagggaattagggcttaatgaaacagaaatcttgatctggaagagccatgtttctggtgaaaagaagacaaaactgagggcaactcctgaagcaatacagaaccgtcttcaagatattgaagaaaggatctcggagcgtcagcgcattctttgcctgccacagagatttgcaaagagcaaacagctgacccggcgagaaatggaaatagaaaagtctttatttcagggagctgatcgtcactccttccttaaggctctttattaccaagcataccacaaaaagacaagtgcagacaagtacatgacctcaatgaagaggaagataaaattaggcacaaaagatgaaccccaaaagaagaacaaaggtgatcccatgaacaacctggaaagtttttaccaagagatgataatgaaaaaacgtcttgaagagtttcaacttatgagaggacttaccagttttcccagagaagacttccaaaatctttcttacgagggtactaccagcgttctaggagccaaatggcagaaaaggactgggaggacctcaacatttagtattctcttagtttccttgctttcagaaacagtgttcacatcttcagccatgtatggcattccccatcttctgacaatgagcctcaagttttctaccaggattggcaagttatcttttaccccatagcatattgtgagggagggtatttaaaaatcatattggcttttagacagccttcaactgatttgccttattttaaccccatcccttcacatttatttctgaaggtaagtgaaattatcagttcctgaactatttaaggattcttaagtggtgacaggtgtgttcttggctctctccactaccagtttaaaattcagctttcttcagtgtgctgagttggttcctgctcatccaattatttttcatcttccagattattattgctgttgtctccttttcttgttcctcctgaccttgttgatttgtgttttttttttttttttttaagtgcctatagttttagagagttttctggatggaatgaaattaaatgaatgtgttcaatccaccatttttatgtgaaactaattctaatcataatgaaagagttttcttacggctgagcatggtgtctcacgcctgtaatcccagcattttgggaggccaaggcgggtggatcacctgagtttgggagttcaagaccagcctggacaacatggtgaaaccccacgtctactaaaaatacaaaaattagccaggtgtggtggcacatgactgtaatcccagctactcgggaggctgaggcatgagaatcacttgagcctgggaggccaaggttgcagtgagcagagattgcgccactgcactccagcctgggtgacagagtgagactttgtctcaaaaagaaaaaaacaaagagtgccttacctcctttatatgatattttggttgatcctcaatttgttttaggtattatacctgaagaaccttagccctcgggtgactgaaagagatcttgtgtcattgttcgctcggttccaggagaaaaaaggacctccaattcaattccgaatgatgactggacgaatgaggggccaggcttttatcacctttcccaataaggagatagcatggcaagcattgcatctagtaaatggatacaaactacatgggaaaatattggtgatagagtttggaaagaacaaaaagcaacggtcaaatctccaagcgacttctctcatatcatgtgctacaggtagcactacagaaattagtggtagctagaatatatataaattgtgggtcctggatggtctttcttgaattggaatcttggatctaggatttatgtatagacaccagtttgtttggagttgaagaggaaaaactaactgagggaggggaaaaaagtaatttcagcttttggagagaactggtagaaaacattttctattatataattgaagactatataggacagatgatatgctgagtatgaagggtaaagtgcaaagagtattattttctcaggatgaattacaacggattattcctaaggatttttaaaaatctttataatttttctggggtcctcaatatttgtctctagagataacattctttcttagactgcttcgtatacacagaaataaaaaact

SEQ ID NO: 18073 - protein, 311 aa, Homo sapiens [sequence omitted]

SEQ ID NO: 18074 - DNA, 2122 bp, Homo sapiens
  CDS (991)..(1338)
actagctaaaggaaaaagttttcttctcacaaaaacacagacacgtgattgttttcacaggttccattaattaactcaggtctggaagacataggacaaaatggagtttctgaagaagtccaggtgaattcagctttggagtcacttatgttcattttttttccttttcttttactattatcctaaaggttatttttcttgttgatatagagatttttgtaaaagattgctacattatttcaggattatatcctacatttcgattgctctcaaatgttttatccctaaagagtgagttttccacagactgtttggaagcaactagaaaaatctttgtgaaaaatctgaacaaattatcataatggctctcttgaaattttgcactttcacccttattaaggaaattataattagttactaacctttaaaaatagatatattctaataggatagaaagttaacttcctggcaaacaaaatactaagatctcaggggctactgcaggaaaatacctttttcgcacattaaaatgtttataaaattttcccctctcatttcaaatgcatggcaggaataacatttttggtggtctttaatgtgatggacagatttactgtcacttatcgattttatggaaaataaattggctatcttatttttataacaatcttatttttctcaaaacaaaaatcctaaccaaaaagttgtcattaaaaaaaaaaaattcaggtagactgaatgtttttctgctctaaccttaaatgttattaggtttggtttttgtttctaagctacttcaagactacctgaggtaataatggtaaactttattattcagaattcgattaaactaacttcagcatttccacagttctattaaacaatgactgatgttcacaatgacaacctacctgagatggctgcaaggccctaatgttccattatacattatagtcttttcagcatagtttagtgttgagtgcaattctaatgcattctacgtttttgaaaatcgataatccatggaaggtccatgggttgatacctcaggtcaaaaatgtgtttactctgttgattgctgtttcactttacttgtatatcagatatataagctatgaacacaagtttgtagtaaaagtatcttctgtctgggcaatggctcacacctgtaattccaacactttggggggctcaggtgggaggatttctagtccccaggagtttgagaccagcctgggcaataaactagaccccatgtctctaaaaaatgtaaaaaacatcaagaggctgagtcaggaggatcatttgagcttaggagttcaaggctgcagtaagttatgattgtgccactgcattccagcctgggtgacaagagtgagaccctgacccaaaaaagtatcttctgataaagtggcatttgaaaattgcagaaattttaatattttttcttttaatattaagaactttattgatctctctaggacaccttggtgaggaaattaatggcacttttcttgacatccaacctgggactctggtgattctgtgttctggtgaatttaagtttcagacatttctttgtgtcaccttttacaaggtgtttgcccttggtacgttatgaccaggtcaaaggttcccaaacacaaggctcattgtgtaccctggacaggaaattgaactgatgttgacatgtatgcatgcccaggaggaagactgggaaagatttaatgagttgaagtatgctgagaaacaatgaaatatttgaaaactgtctacataaaagttactgatgcacatgcattaaaaaaaaaaatgttgttgcaaatctaacactaaaaaatttttgactgggtgcagtggctcacacctgtaatcccagcactttgggaggctgaggcgggtagatcacaaggacaggagttcaagaccagcctggccaacatggtgaaaccccgtctctactaaaaatacaaaaattagccaggcatggttgcgggtgcctataatcccaactaccccggaggctgaggcagggaattgcttgaagcaaggaggggcaggttgcagtgagccaagattgtgccaccacactccagcctgggtaacagcaagactccgtctc

SEQ ID NO: 18075 - protein, 116 aa, Homo sapiens [sequence omitted]

SEQ ID NO: 18076 - DNA, 1834 bp, Homo sapiens
  CDS (287)..(1711)
acgcaagtccctttcctcccgacacgagtgcagtaaagaaaaacggttatgagcgtaaagtgacagcctcggccgatgggaatagggggaagtccgacactgagcaacgaacgcattcccgcgcctccaaaacctaggccgggggcgctggaaacccttaccggcactcggccaccgcggcagacgcttgctcctgccacgcccccccccctcccccgcatcacgtgtctgcactcgctttcctcggattcccggatgtggttgccaaaacaaaggggatttggtgatggaggctttgctagaaggaatacaaaatcgagggcatggtgggggatttttgacatcttgtgaagcagaactacaggagctcatgaaacagattgacataatggtggctcataaaaaatctgaatgggaaggacgtacacatgctctagaaacttgcttgaaaatccgtgaacaggaacttaagagtcttaggagtcagttggatgtgacacataaggaggttggaatgttgcatcagcaggtagaagaacatgaaaaaatcaagcaagagatgaccatggaatataagcaggagctgaagaaactacatgaagaattatgcatactgaagagaagctatgaaaagcttcagaaaaagcaaatgagggaattcagaggaaataccaaaaatcacagggaagatcggtctgaaattgagaggttaactgcaaaaatagaggaattccgtcagaaatcgctggactgggagaagcaacgcttgatttatcagcaacaggtatcttcactggaggcacaaaggaaggctctggctgaacaatcagagataattcaggctcagcttgtcaatcggaaacagaaattagagtctgtggaactttctagccaatcagaaattcaacacttaagcagtaaactggagcgggctaatgacactatctgtgccaatgagttggaaatagagcgcctcaccatgagggtcaatgacttggttggaaccagtatgactgtcctacaggagcagcagcaaaaagaagaaaaattgagggaatctgaaaaactattagaggctctgcaggaagaaaagagagaattgaaggcagctcttcagtctcaagaaaatctcatacatgaggccagaatacaaaaggagaagttacaagaaaaagtaaaggcaactaacactcaacatgctgtagaagctataagtttggaatctgtgagtgcaacgtgtagacagctgagccaagaactaatggaaaaatatgaagaactgaagaggatggaagcacataacaatgaatacaaagcagagattaagaagttgaaagaacagattttacagggtgaacaaagttacagttctgcactagaaggaatgaagatggaaatctcccatctaactcaggagttacatcagcgagatatcactattgcttccaccaaaggttcttcctcagacacggaaaagcgactcagagcagagatgcaaaaggcagaagacaaagcagtagagcataaggagattttggatcagctggagtcactcaaattagaaaatcgtcatctttctgaaatggtgatgaaattggaattgggtttacatgagagatggggttttaccatgttgtccagtctggttttgaacttcgggattcaagcaatccgccagcctcagcgtcccaaagtgctggaattacaagtgtgagctaccaccactggcagttaagaattttaacaatttgtcaatgaaacaagaatctcaattagagtctttatatacaatctgtactgttggaattttcaaataaatattgtaaagaaaatt

SEQ ID NO: 18077 - protein, 475 aa, Homo sapiens [sequence omitted]

SEQ ID NO: 18078 - DNA, 2955 bp, Homo sapiens
  CDS (68)..(2329)
gaaagatgatcaagtgaaaggtacagcagaagatcttgtagataccttctttgaagttgaagttgaaatggagaaggaggtttgccgtgatctagtgtgcacttcccccaaagatgaagaaggattcctaagggatttgtgtgaggtcttactatatttattgctacctcctggagatttccagaacaagatcatgcgatactttgtcagggaaatccttgcacgaggaattcttcttccattaataaatcaactcagtgatcctgattatattaatcagtatgtcatatggatgatccgtgattctaactgcaactatgaggcctttatgaacattattaaattgagtgacaatattggagagctagaagcagtcagagataaggcagcagaagaattacagtatcttagatctctagatacagctggtgatgatatcaacactatcaaaaatcaaataaatagcttactattcgtaaagaaggtatgtgactcaagaatacagcgattgcagtcaggcaaagaaataaatactgtgaaacttgcagcaaactttgggaaactttgcacagtccccctggacagcattcttgtagacaatgttgcactacaattttttatggattacatgcagcaaactggaggtcaagcacatctattcttttggatgacagtggaaggataccgggttaccgcccaacagcagctagaagttttattaagtcgtcagagagatggaaaacatcaaaccaaccaaaccaaaggtcttttaagagcagctgctgttggaatttatgaacagtatttatcagaaaaggcatctccaagagttactgttgatgactatttagtagcaaaattagcagatactttgaatcatgaagatccaacccctgaaatctttgatgacattcaaagaaaggtatatgaattgatgctacgagatgaaagattttatccttccttcagacagaatgcactttatgtgcgcatgttagctgagcttgacatgttaaaagatcctagtttcagaggatccgatgatggggatggagaatcttttaatgggtctcctacaggaagcataaatttgtctttagatgacctttcaaatgtttcttctgatgactcagtacaacttcatgcctacatttcagacacaggcgtttgtaatgatcatggcaagacatatgcattatatgccatcactgtacaccggcgcaacctaaacagtgaggagatgtggaaaacctatcgtcgttatagtgacttccatgacttccacatgagaatcactgaacagtttgaaagtctctcaagcatattgaaacttcctggaaaaaagacttttaataatatggatagagattttttagaaaagagaaaaaaggatctaaatgcatatttgcagttactgttagctcctgaaatgatgaaggcatccccagctttagctcactatgtgtatgatttccttgagaacaaagcctacagtaaaggaaaaggggattttgctcgcaagatggacacttttgtaaatccacttcgcaattcaatgaggaatgtttcaaatgcagttaaatcccttcctgatagcttggcagagggaatgactaaaatgtcagacaacatgggcaaaatgtcagaaagattaggtcaagacataaagcaatcattttttaaggtgcctcctttaattcctaagactgattcagaccctgaacatcgccgagtttcggctcaacttgacgataatgtggatgacaatattccacttagggtaatgctgcttctcatggatgaagtattcgacttaaaagaaagaaatcagtggttgcgaaggaatatcaaaaacctacttcaacagcttattagagctacatatggcgatactattaatagaaaaatagttgaccatgttgactggatgacttcacctgaacaagtagccgactcagtgaaacgtttcagagatgcattttggccaaatggcattttagcagaggctgttccatgcagagataaaagtattcgaatgagaacaagagtagcaggaaaaacgaaattacttgcaattatgccagatgagctgaagcacattattggggctgagacaacacggaaaggtattcttcgtgtttttgaaatgtttcagcacaaccaattaaataggagaatggtttatgtcttcttggaaggctttttagaaaccttatttccacagtataaattccgtgaacttttcaacaaactgcattcacggtcaaagcagatgcagaaatataaacagaaacttcaaactactcaagcgccttctttgcagaaaaggtgacactccactctatgaagctggtgttcattttgtccaggactaatggtatggacagatcttctggggcttaactcaaatactgttgtgtctgcaccagtcttttagtgtctcaaaatagattattaatacatccataagtctgtggttcttctcattctcatctataatccaccactaccaagagagatttctgtgtcttaaatgatttggtgcatattttgcaacattgagagaaaactgcccccatctcaagcaagaatggcgttggtttcttccatttcaaactaatcagcattctccagcaatgacaaagtgccagagtgtatatatgaaagctaaggaaagcacaaaacaatggttcagagataaattggctaatttgtttaacagttggagactgtgcaatgtacgacttggaggagtttgtttggcataatgattttgtaggtctgtcagcattttgatatattgtggattagccaggtgaatgatccttgaaacatctctttcaggtctggagaaagagacagaatgcccttaaagtgtgaaataaccttatacctgaattacagttttgtgatataaaataaagctgagtataaaataaaaccaatcaaacacag

SEQ ID NO: 18079 - protein, 754 aa, Homo sapiens
MEKEVCRDLVCTSPKDEEGFLRDLCEVLLYLLLPPGDFQNKIMRYFVREILARGILLPLINQLSDPDYINQYVIWMIRDSNCNYEAFMNIIKLSDNIGELEAVRDKAAEELQYLRSLDTAGDDINTIKNQINSLLFVKKVCDSRIQRLQSGKEINTVKLAANFGKLCTVPLDSILVDNVALQFFMDYMQQTGGQAHLFFWMTVEGYRVTAQQQLEVLLSRQRDGKHQTNQTKGLLRAAAVGIYEQYLSEKASPRVTVDDYLVAKLADTLNHEDPTPEIFDDIQRKVYELMLRDERFYPSFRQNALYVRMLAELDMLKDPSFRGSDDGDGESFNGSPTGSINLSLDDLSNVSSDDSVQLHAYISDTGVCNDHGKTYALYAITVHRRNLNSEEMWKTYRRYSDFHDFHMRITEQFESLSSILKLPGKKTFNNMDRDFLEKRKKDLNAYLQLLLAPEMMKASPALAHYVYDFLENKAYSKGKGDFARKMDTFVNPLRNSMRNVSNAVKSLPDSLAEGMTKMSDNMGKMSERLGQDIKQSFFKVPPLIPKTDSDPEHRRVSAQLDDNVDDNIPLRVMLLLMDEVFDLKERNQWLRRNIKNLLQQLIRATYGDTINRKIVDHVDWMTSPEQVADSVKRFRDAFWPNGILAEAVPCRDKSIRMRTRVAGKTKLLAIMPDELKHIIGAETTRKGILRVFEMFQHNQLNRRMVYVFLEGFLETLFPQYKFRELFNKLHSRSKQMQKYKQKLQTTQAPSLQKR

SEQ ID NO: 18080 - DNA, 2964 bp, Homo sapiens
  CDS (231)..(1796)
ctggcctcccgaaggcgggaggaggggagccgggggctgggctgagaaaggaccctgggtagggagcagtgcgagggagacagcgccctcagagggaggactattgggaggcggcaggagggacagcgaacgtttcctcctctgctcctgaatcggaggaagccctaggggacctctttctcctggacattgaagatatggccctttggaggtgacccaggagagaagggatgaaggcctttggtcctccacatgagggccccctccaaggactcgtggcctcccgcattgagacttatgggggccggcatcgagcctctgctcagagcactgctggcagactctatccccgaggataccctgtgctggatcccagtcgccgacgcctccagcagtatgtcccctttgccaggggttctggccaggcccgaggcctgtcacccatgagactgcgagatccagagcccgagaagaggcacgggggccatgtgggggctggcctgcttcactcccccaaactcaaggaactcaccaaggcccatgagctggaggtgaggctgcacactttcagcatgtttgggatgccccggctgccccctgaggaccggcggcactgggagataggagagggtggcgacagtggcctgaccatcgagaagtcctggagggagctggtgcctgggcacaaggagatgagccaggagctctgccaccaacaggaggccctgtgggagctcctgaccaccgagctgatctacgtgagaaagctcaagatcatgactgatctgctagccgccggcctgctgaacctgcagcgagtgggactgctgatggaagtgtcagctgagaccctgtttggaaatgtccccagcctgattcgaacccaccggagcttttgggatgaggtgctggggcccaccctggaggagactcgggcctcgggccagcctctggaccccattggtctgcaaagtggcttcctgacgtttggccagcggttccacccctatgtccagtactgcctccgagtgaagcagaccatggcttacgcccgagaacagcaagaaactaaccctctcttccatgccttcgtgcagtggtgtgagaagcacaagcgctctgggaggcagatgctctgtgatttgcttatcaagccccaccagcgcatcaccaagtacccactgctgctccatgctgtgctcaagaggagccccgaggcacgagcccaagaggccctgaatgccatgattgaagccgtggagtcattcctgcgacacatcaatgggcaggtccgccagggcgaagagcaagagagcttggcggctgcagcacaacgcatcgggccctacgaggtgctggagccacccagtgatgaggtggagaagaacctgcgcccattctccaccctggacctgacgtcccccatgctgggggttgcatctgagcacaccagacagctgctgctggaggggcctgtgcgagtgaaggagggacgagaagggaagctggacgtgtacctgttcctcttctctgatgtgctccttgtgaccaagccccagcgcaaggcggacaaagccaaggtcatccgaccccctctcatgctggagaagctcgtgtgccaacccctgcgagaccccaacagcttcctgctgatccacctcactgaattccagtgtgtctccagcgccctccttgtgcactgtcccagtcctacagaccgtgcccagtggctggagaagacccagcaggcccaggccgccctacagaagctgaaggcagaggagtatgttcaacagtagagggagctcctgaccctctatcgggaccaggacagggagtcccccagcaccaggccctccacgccttccctggagggctctcagagcagcgcagaggggaggactcctgagttctcgaccattatcccccacctggtggtgacagaagacacagatgaagatgctccccttgtgccagatgatacctcagactctggctacggcaccttgatcccaggcacccccacggggtcccgctccccactgagccgtctacgccaaagagcccttcggcgggaccctcgcctcaccttctccaccctggaactccgggacatccctctgcgtccccaccctcccgacccccaagctcctcaacgccgaagcgcccccgaactgccggaaggaatcctaaaaggaggcagtcttccccaggaagacccaccaacctggtctgaggaagaagatggggcctccgagcgagggaatgtggtggtggaaacactccacagggcccggcttcggggccagcttccctcctccccaacccatgctgactctgccggggaaagcccctgggagtcctcaggggaggaggaagaagaggggcctctgttcctgaaagctggccacacatccctgcgcccaatgcgggctgaggacatgctcagagagatccgggaggagctggccagccaaaggattgagggggccgaggagccccgggacagcaggccacggaagctgactcgggcccagctgcagaggatgcgggggctccacatcattcagctggacacccctctgtccgcatcagaggtatgaggaatgcagaggacctttggcatgcatctctcccagaggagatctctccccagtagtgctggtcaccctccggcatctgtgactctacctcaaggaccacatttcccaaaggaagcctggcccaggcaccctgcctcctgctctgtttggggatcaagaactgtaaatttatgtatcataggtgcacctgagccccacagaaagttgtgcataaaaatgacagccctggctgggcatggctgcctgtaatcccagcactttgggaggctgaggtgggaggatcccttgagcccaggagttccagaccagcctgggcaatatagggaaaccctgtctttacaaaaaaaaaattttaaaaatt

SEQ ID NO: 18081 - protein, 522 aa, Homo sapiens
MKAFGPPHEGPLQGLVASRIETYGGRHRASAQSTAGRLYPRGYPVLDPSRRRLQQYVPFARGSGQARGLSPMRLRDPEPEKRHGGHVGAGLLHSPKLKELTKAHELEVRLHTFSMFGMPRLPPEDRRHWEIGEGGDSGLTIEKSWRELVPGHKEMSQELCHQQEALWELLTTELIYVRKLKIMTDLLAAGLLNLQRVGLLMEVSAETLFGNVPSLIRTHRSFWDEVLGPTLEETRASGQPLDPIGLQSGFLTFGQRFHPYVQYCLRVKQTMAYAREQQETNPLFHAFVQWCEKHKRSGRQMLCDLLIKPHQRITKYPLLLHAVLKRSPEARAQEALNAMIEAVESFLRHINGQVRQGEEQESLAAAAQRIGPYEVLEPPSDEVEKNLRPFSTLDLTSPMLGVASEHTRQLLLEGPVRVKEGREGKLDVYLFLFSDVLLVTKPQRKADKAKVIRPPLMLEKLVCQPLRDPNSFLLIHLTEFQCVSSALLVHCPSPTDRAQWLEKTQQAQAALQKLKAEEYVQQ

SEQ ID NO: 18082 - DNA, 3611 bp, Homo sapiens
  CDS (93)..(3335)
cgtactatctgaatgcccaggatggggctgggggcgaggaagagaaggccgagggcggggatggggaggagcacgacctgtttgctgggctgatgccactggaacaggagagtcgcatggaggtactgtctgcctgtgctgaggccctgcatgcgcatggctatagcagtgaggcctcccgtctcactgtggagcttgcccaggatctgctagccaacccacccgacctcaaggtagagccgccccctgccaagggcaagaagaacaaggtatccacgagccgtcagacctgggtggctaccaacaccctgagcaaggcggccttcctgttgacagtgctaagtgagcgtccagagcaccacaacctggccttccgagttggcatgtttgccttggagctacagaggcctccggcttctaccaaggccttggaggtgaagctggcataccaggagtctgaggtggctgccctgctcaagaagatccctctgggtccaagtgagatgagtaccatgcggtgccgggcagaggaacttcgggaggggacactctgtgactatcggcctgtgttgcctctcatgctggccagtttcatctttgacgttctctgtgctccagtggtttctcccacaggttcccggcccccaagtcgcaactggaacagcgagacacctggggatgaggagcttggatttgaagcagcagttgctgccttgggcatgaagacaacagtgagcgaggcagaacatcccctcttatgtgaaggcacacgtcgggagaagggtgacctggcattagcactaatgatcacttacaaggacgaccaggccaagcttaagaagatcttagacaaactcttggaccgagagagccagacacataagccacagacgctgagttctttctactcatctagccgcccaaccacagccagccagaggtctccttcaaagcacgggggcccatctgccccagggaccctgcaaccactgacctcaggctctgcagggcctgctcaaccagggagtgtggcaggggctgggccaggccccactgagggcttcacagagaagaatgtgcctgagagttccccacattccccctgtgagggtcttccatctgaggcagctttgaccccaaggccagaagggaaggttcctagccgcttggcacttggcagtcgtggaggctataatggacggggatgggggtccccaggacggcctaagatgaagcacacaggcatggccagcattgacagcagtgcccctgaaacaacatcggatagttcccccaccttaagccggagaccacttcaagggggctgggcccccacctcctggggtcgaggtcaggacagtgacagcattagcaactcttcttcggactccctgggctcctcatcctccagtggaagtcgccgggccagtgccagtggaggagcccgggcgaagactgttgaagttggcaggtacaagggccgccgccccgagagtcatgcccctcatgtacccaatcagccatcagaggcagctgcacacttctacttcgagctggcgaagacagtgctgatcaagacagggggcaacagcagcacttccattttcacacatccatcttcctcagggggccaccagggtcctcaccgcaacctgcacctttgcgccttcgagattgggctttatgcccttggcctgcacaactttgtttctcccaactggctctcacgtacttattcttcccacgtttcctggattacaggccaggccatggagataggcagcgcagccctgactatactggtagaatgctgggatgggcacctgacaccccctgaggttgcatccctggctgacagggcatcacgggcaagagactccaatatggtgagggcggcagcagagctggccctgagctgcctgcctcacgcccatgcattgaaccctaatgagatccagcgggccctggtgcagtgcaaggaacaggacaacctgatgttggagaaggcctgcatggcagtggaagtggcagctaagggtgggggcgtgtaccctgaagtgttgtttgaggttgctcaccagtggttctggctatatgagcaaactgcaggtggctcatccacagcccgtgaaggggctacaagctgtagtgccagtgggatcagggcaggtggggaagctgggcggggtatgcctgagggtagagggggcccagggactgagccggttacagtggcagcggcagcagtgacagcagcagccacagtggtgcccgtcatatcggtggggtctagtttatacccgggtccaggactggggcatggccactcccctggcctgcacccctacactgctctacagccccacctgccctgtagccctcagtatctcactcacccagctcaccctgcccaccccatgcctcacatgccccggcctgccgtcttccctgtgcccagctctgcatacccacagggtgtgcatcctgcattcctaggggctcagtacccttattcagtgactcctccctcacttgctgccactgctgtgtctttccccgttccttccatggcacccatcacagtacatccctaccacacagagccagggcttccactgcccaccagtgtggcctgtgagttgtggggccagggaacagtgagcagtgtccatccagcatccacgtttccagccatccaaggtgcctcactgcctgccctgaccacacagcccagccctctggtgagcggaggttttccaccgcccgaggaggagacacacagtcagccagtcaatccccacagcctgcaccacctgcatgctgcctaccgtgtcggaatgctggcactggagatgctgggtcgccgggcacacaacgatcaccccaacaacttctcccgctcccccccctacactgatgatgtcaaatggttgctggggctggcagcaaagctgggagtgaactacgtgcaccagttctgtgtgggggcagccaagggggtgctgagcccgtttgtgctgcaggagatcgtcatggagacgctgcagcggctgagtcccgctcatgcccacaaccacctgcgtgccccggccttccaccaactggtgcagcgctgccagcaggcatacatgcagtacatccaccacagcttgattcacctgactcctgcggactacgacgactttgtgaatgcgatccggagtgcccgcagcgccttctgcctgacgcccatgggcatgatgcagttcaacgacatcctacagaacctcaagcgcagcaaacagaccaaggagctgtggcagcgggtctcactcgagatggccaccttctccccctgagtctttcacccttagggtcctatacagggacccaggcctgtggctatgggggcccctcactcagggggagtgaaacttggctggacagatcatcctcactcagttccctggtagcacagactgacagctgctcttgggctatagcttggggccaagatgtctcacaccctagaagcctagggctgggggagacagccctgtctgggagggggcgttgggtggcctctggtatttatttggcatttataaatatataaactccttttttactct

SEQ ID NO: 18083 - protein, 1081 aa, Homo sapiens
MPLEQESRMEVLSACAEALHAHGYSSEASRLTVELAQDLLANPPDLKVEPPPAKGKKNKVSTSRQTWVATNTLSKAAFLLTVLSERPEHHNLAFRVGMFALELQRPPASTKALEVKLAYQESEVAALLKKIPLGPSEMSTMRCRAEELREGTLCDYRPVLPLMLASFIFDVLCAPVVSPTGSRPPSRNWNSETPGDEELGFEAAVAALGMKTTVSEAEHPLLCEGTRREKGDLALALMITYKDDQAKLKKILDKLLDRESQTHKPQTLSSFYSSSRPTTASQRSPSKHGGPSAPGTLQPLTSGSAGPAQPGSVAGAGPGPTEGFTEKNVPESSPHSPCEGLPSEAALTPRPEGKVPSRLALGSRGGYNGRGWGSPGRPKMKHTGMASIDSSAPETTSDSSPTLSRRPLQGGWAPTSWGRGQDSDSISNSSSDSLGSSSSSGSRRASASGGARAKTVEVGRYKGRRPESHAPHVPNQPSEAAAHFYFELAKTVLIKTGGNSSTSIFTHPSSSGGHQGPHRNLHLCAFEIGLYALGLHNFVSPNWLSRTYSSHVSWITGQAMEIGSAALTILVECWDGHLTPPEVASLADRASRARDSNMVRAAAELALSCLPHAHALNPNEIQRALVQCKEQDNLMLEKACMAVEVAAKGGGVYPEVLFEVAHQWFWLYEQTAGGSSTAREGATSCSASGIRAGGEAGRGMPEGRGGPGTEPVTVAAAAVTAAATVVPVISVGSSLYPGPGLGHGHSPGLHPYTALQPHLPCSPQYLTHPAHPAHPMPHMPRPAVFPVPSSAYPQGVHPAFLGAQYPYSVTPPSLAATAVSFPVPSMAPITVHPYHTEPGLPLPTSVACELWGQGTVSSVHPASTFPAIQGASLPALTTQPSPLVSGGFPPPEEETHSQPVNPHSLHHLHAAYRVGMLALEMLGRRAHNDHPNNFSRSPPYTDDVKWLLGLAAKLGVNYVHQFCVGAAKGVLSPFVLQEIVMETLQRLSPAHAHNHLRAPAFHQLVQRCQQAYMQYIHHSLIHLTPADYDDFVNAIRSARSAFCLTPMGMMQFNDILQNLKRSKQTKELWQRVSLEMATFSP

SEQ ID NO: 18084 - DNA, 4262 bp, Homo sapiens
  CDS (40)..(2415)
aaaagtgctcgggacaaggacatagggctgagagtagccatgggctctggaggagacagcctcctggggggcaggggttccctgcctctgctgctcctgctcatcatgggaggcatggctcaggactccccgccccagatcctagtccacccccaggaccagctgttccagggccctggccctgccaggatgagctgccaagcctcaggccagccacctcccaccatccgctggttgctgaatgggcagcccctgagcatggtgcccccagacccacaccacctcctgcctgatgggacccttctgctgctacagccccctgcccggggacatgcccacgatggccaggccctgtccacagacctgggtgtctacacatgtgaggccagcaaccggcttggcacggcagtcagcagaggcgctcggctgtctgtggctgtcctccgggaggatttccagatccagcctcgagacatggtggctgtggtgggtgagcagtttactctggaatgtgggccgccctggggccacccagagcccacagtctcatggtggaaagatgagaaacccctggccctccagcccggaaggcacacagtgtccggggggtccctgctgatggcaagagcagagaagagtgacgaagggacctacatgtgtgtggccaccaacagcgcaggacacagggagagccgcgcagcccgggtttccatccaggagccccaggactacacggagcctgtggagcttctggctgtgcgaattcagctggaaaatgtgacactgctgaacccggatcctgcagagggccccaagcctagaccggcggtgtggctcagctggaaggtcagtggccctgctgcgcctgcccaatcttacacggccttgttcaggacccagactgccccgggaggccagggagctccgtgggcagaggagctgctggccggctggcagagcgcagagcttggaggcctccactggggccaagactacgagttcaaagtgagaccatcctctggccgggctcgaggccctgacagcaacgtgctgctcctgaggctgccggaaaaagtgcccagtgccccacctcaggaagtgactctaaagcctggcaatggcactgtctttgtgagctgggtcccaccacctgctgaaaaccacaatggcatcatccgtggctaccaggtctggagcctgggcaacacatcactgccaccagccaactggactgtagttggtgagcagacccagctggaaatcgccacccatatgccaggctcctactgcgtgcaagtggctgcagtcactggtgctggagctggggagcccagtagacctgtctgcctccttttagagcaggccatggagcgagccacccaagaacccagtgagcatggtccctggaccctggagcagctgagggctaccttgaagcggcctgaggtcattgccacctgcggtgttgcactctggctgctgcttctgggcaccgccgtgtgtatccaccgccggcgccgagctagggtgcacctgggcccaggtctgtacagatataccagtgaggatgccatcctaaaacacaggatggatcacagtgactcccagtggttggcagacacttggcgttccacctctggctctcgggacctgagcagcagcagcagcctcagcagtcggctgggggcggatgcccgggacccactagactgtcgtcgctccttgctctcctgggactcccgaagccccggcgtgcccctgcttccagacaccagcactttttatggctccctcatcgctgagctgccctccagtaccccagccaggccaagtccccaggtcccagctgtcaggcgcctcccaccccagctggcccagctctccagcccctgttccagctcagacagcctctgcagccgcaggggactctcttctccccgcttgtctctggcccctgcagaggcttggaaggccaaaaagaagcaggagctgccgcatgccaacagttccccactgctccggggcagccactccttggagctccgggcctgtgagttaggaaatagaggttccaagaacctttcccaaagcccaggagctgtgccccaagctctggttgcctggcgggccctgggaccgaaactcctcagctcccaaatgagctggttactcgtcatctccctccagcacccctctttcctcatgaaactcccccaactcagagtcaacagacccagcctccggtggcaccacaggctccctcctccatcctgctgccagcagcccccatccccatccttagcccctgcagtccccctagcccccaggcctcttccctctctggccccagcccagcttccagtcgcctgtccagctcctcactgtcatccctgggggaggatcaagacagcgtgctgacacctgaggaggtagccctgtgcttggaactcagtgagggtgaggagactcccaggaacagcgtctctcccatgccaagggctccttcaccccccaccacctatgggtacatcagcgtcccaacagcctcagagttcacggacatgggcaggactggaggaggggtggggcccaaggggggagtcttgctgtgcccacctcggccctgcctcacccccacccccagcgagggctccttagccaatggttggggctcagcctctgaggacaatgccgccagcgccagagccagccttgtcagctcctccgatggctccttcctcgctgatgctcactttgcccgggccctggcagtggctgtggatagttttggtttcggtctagagcccagggaggcagactgcgtcttcatagatgcctcatcacctccctccccacgggatgagatcttcctgacccccaacctctccctgcccctgtgggagtggaggccagactggttggaagacatggaggtcagccacacccagcggctgggaagggggatgcctccctggccccctgactctcagatctcttcccagagaagtcagctccactgtcgtatgcccaaggctggtgcttctcctgtagattactcctgaaccgtgtccctgagacttcccagacgggaatcagaaccacttctcctgtccacccacaagacctgggctgtggtgtgtgggtcttggcctgtgtttctctgcagctggggtccaccttcccaagcctccagagagttctccctccacgattgtgaaaacaaatgaaaacaaaattagagcaaagctgacctggagccctcagggagcaaaacatcatctccacctgactcctagccactgctttctcctctgtgccatccactcccaccaccaggttgttttggcctgaggagcagccctgcctgctgctcttcccccaccatttggatcacaggaagtggaggagccagaggtgcctttgtggaggacagcagtggctgctgggagagggctgtggaggaaggagcttctcggagccccctctcagccttacctgggcccctcctctagagaagagctcaactctctcccaacctcaccatggaaagaaaataattatgaatgccactgaggcactgaggccctacctcatgccaaacaaagggttcaaggctgggtctagcgaggatgctgaaggaagggaggtatgggaccgtaggtcaaaagcaccatcctcgtactgttgtcactatgagcttaagaaattcgataccataaaatggtaaagacttgagttctgtgagatcattccccggagcaccatttttaggggagcacctggagagatggcaagaatttcctgagttaggcagggatcaggcattcattgacactcagggagtgtcacacatttctgttctgcaattaaagggagaatgaggttcatccaccaaattttaagcagaatataggaagggcaggggtggggagtttcagggtctgctggtcctggcaacttatattaaatccacctcctcaagataagccttagggatatttatggctgagggaagtgggatggtctaaggcatggggaagggtgattggctgtggggaaaatgaagtaataggttcattctgcccaagtgtacttggggttcatggcatttcataaggacatttgtgtagaaaattgttttgctggctgggcacggtggctcacgcctgtaatcccagcactttgggaggcggaggtaggcagatcatgaggtcaggagatcgagaccatcctggctaacatggtgaaaccccgtctctact

SEQ ID NO: 18085 - protein, 792 aa, Homo sapiens [sequence omitted]

SEQ ID NO: 18086 - DNA, 3580 bp, Homo sapiens
  CDS (806)..(1966)
aatggagagcgcctcagtcttccacccaaggtgagaataatgtttgaggtacaggacttgaaatacgcgaccttggccacagtgtcgcgctgcggcatggtctggttcagtgaggatgtgctgagcaccgacatgatcttcaacaacttcctggccaggctgcgcagcatcccgctggatgaaggggaggatgaggcacagcggcggcgtaagggcaaagaggatgagggggaggaggccgcttcccccatgctgcagatccaaagagatgcagctacgatcatgcaaccgtacttcacgtccaacggcctggtcaccaaggcgctagagcacgccttccagctggagcacatcatggacctaacacgcctgcgctgcctgggctcgctcttctccatgctgcaccaggcctgccgcaacgtggcgcagtataacgccaaccatcccgacttccccatgcagatcgagcagctggagcgctacattcaggtcagggggcatcaggggcttcacagagctcaccactgcgccagaccacaggtctgaggacctctgaaatgctgcacctgtggggatgtgcgctctctcctaggcgaggcagagccttcgttgaggggctaggaaaggtgcagtgggtgtctgtgatgcaagaagactgggaaccactgtctttaggttaactttgctgtaagtgtctttcttttgttgttgaaattttataaaaatcaaagtttaattccctttttaatagcgatatctggtttatgccatactctggtccctgtctggagacagccggctaaaaatgagagcagagctgggtgaatacatcagaagaatcacgaccgtgcctctgcccactgcgcccaacatacccattatcgattatgaggtgtccatcagcggagaatggtctccgtggcaggccaaggtgcctcagattgaagtggagacgcacaaggtggcagcccctgatgtcgtcgtgccaacgctgtacaccgtccgccacgaagccctcttgtacacttggctggccgaacacaagcccctggtcttgtgtggccctcctgggtctggcaagaccatgacactcttcagcgccctccgggccttgcctgacatggaggtggtgggtctcaacttctccagtgctactactccagagctgcttctgaagacttttgatcactactgcgagtacaggcgcacacctaatggggtggttttggctcctgttcaacttggaaagtggctggtgttgttctgtgatgaaatcaacttgccagatatggataaatatgggacccagagggtcatatccttcatcagacagatggtggagcacggaggcttttaccgtacctcagatcaaacatgggtgaagctggagagaatccagtttgttggggcttgtaatccccccacagaccctggaagaaagcccctctcacacaggttcctgcgccacgtgcctgtcgtgtatgtggattacccgggccccgcctccctcacacagatctacggcaccttcaaccgcgccatgctgaggctcattccatccctgcggacgtatgcagagccgctcactgctgccatggtggagttctacaccatgtctcaggagagattcacccaggatacacaacctcactatatctattcaccccgtgaaatgactaggtgggtgagaggcatctttgaagcgctgagacctctggagaccctgcctgttgaaggcctcattcggatttgggcacatgaagctctgcgtctcttccaagatagactcgtagaggatgaggagaggcgttggactgatgagaacatcgacacggttgctctgaagcacttccctaacatcgacagagagaaggcaatgagccgacccatcttgtacagcaactggctgtcaaaggtagcaaactcgcatcatttcagacatacttctttttctgccatccctttctaacactaacgaattctaacgaattatcttctactcaaaaatatctttaggctgggtatggtgtctcacacctgtaatcccagcactttgggaggctgaggcaggaggatcacttgatcccaggagtttgagaccagcctgggcaacatagtaagactccacctctacaaaaaaatttgaaaatttagccaggcaaggtaactcacgcctatggtcccagcaacttgggaggcttgagcccaggaagtcacagtgagctgtggtcacaccaccatactgcagcctgggtaaaagagcaaaaccctgtttcaaaaaatacttcagaaaacaaaatatcagccgggcgcggtggctcatgcctgtaatcccagcactttgggaggctgaggcggtggatcacctgaggtcgggagttcgagaccagcctgacctacatggagaaaccccatctctactaaaaatacaaaattagctgggcgtggtgacgcatgtctgtaatcccagctatttaggaggctgaggcaggagtatctttggaacccgggaggcagaagttgcggtgagctgagatcgcgccattgcactgcagcctcagcaacaagagcgaaactctgtctcaaagaaaaaaaaaatacagcgaggtgcaatggcacacgcctgtaatcccagcactttgggaggccaaggcaggcagatcacttgaggtcaggggttcgagaccagcctggacaacatgctgaaactccatctctactaaaaagacaaaaattagccaggcatggtggcatgtgcctgtaatcccagctactcaggagtctgagaatcgcttgaacccgggagacagaggttgcagtgagccaaggtcacgccactgcactctagcctgggcgacagagggagactctgtctcaaaaaaaaaaaaaaaattgccaggtatggtggcgtgtgcctatagtcccagctacttgagaggcaggagaatcacttgaacccaggaggcagaggttgcagtgagctgagatcaggccactgcactctagcctgggtgacagagtgagaccctgtctcaaggaaaaaaaaaaaaaaaaaaagatgtatctttgaaactcttaatcacatttctaattgagtttgtgtattgagtgagcagtgggtccgttttcagttctttccttatggacacccattatcccagcaaagtttattaaataataatttactctgcagtatctgtctgtcatcatagtttccctgtgtgcataggtatccgttagttgttctctgtgctaaaaccacatggtcctgattatggtaataagtctgtttaatagggcaggcccaggccaggtgcggtggctcacgcctgtaatcccagcactttgggaggccgagaccggcagatcacaaggtcaagagatcaagaccatcctggccaacgtggtgaaacccgtctgtactaaaaatacaaaaattacctgggcatggtggtacgtgcctgtagtcccagctacttgggaggctgaggcaggagaattgcttgaacccaggaggcggaggttgcagtgagctgagatcgtgccacagcactccagcctggtgacagagcgaggctac

SEQ ID NO: 18087 - protein, 387 aa, Homo sapiens
MRAELGEYIRRITTVPLPTAPNIPIIDYEVSISGEWSPWQAKVPQIEVETHKVAAPDVVVPTLYTVRHEALLYTWLAEHKPLVLCGPPGSGKTMTLFSALRALPDMEVVGLNFSSATTPELLLKTFDHYCEYRRTPNGVVLAPVQLGKWLVLFCDEINLPDMDKYGTQRVISFIRQMVEHGGFYRTSDQTWVKLERIQFVGACNPPTDPGRKPLSHRFLRHVPVVYVDYPGPASLTQIYGTFNRAMLRLIPSLRTYAEPLTAAMVEFYTMSQERFTQDTQPHYIYSPREMTRWVRGIFEALRPLETLPVEGLIRIWAHEALRLFQDRLVEDEERRWTDENIDTVALKHFPNIDREKAMSRPILYSNWLSKVANSHHFRHTSFSAIPF

SEQ ID NO: 18088 - DNA, 2883 bp, Homo sapiens
  CDS (200)..(2824)
tgtatcacaggaaaggtcagtttcctggcatcacatttcaaaaccacatcattaggcgatgacctagacaagctgctggaaaaaatgcaacaaagaagaggagacagtgtggttacccctttcgatggagaccttaatgaatgtgtgtcaccccaggaggctgctgctatgattcccacacaaaacctggatttagataatgaaaccttccacatttatcaaccgcagcaacagttgccagaaaactcttatcccaggtgtgtgctatagcggacagtggcagccagagcctggacctcggtcacttcagcaaagtagacttcatcatcattgttcccagatcggaggtgttggttcagcaaactcttcagcggattcgacaatcagtgtcatttcaggctctttgtcacatagcgaacccagtcatgggctagctgatagagtcattaattgcagagaagttctggaagctttcaacctcctggtgctccaggtcagctccttcccatacactctgcagacccaacagtcccgcattagctctagcaatgaggttcactggatacagctggatactggggaggacgtgggctgcgaggagaagctgtactttggcttgagtgagtacagcaagtctctgcagtgggggatcacgagcccacttctgagatgtgacgagacttttgaaaaaatggtgaacacactcttggagaggtaccccaggctgcacagcatggtcgtccgctgctatcttctcatccagcagtactctgaggccctgatggctctcaccaccatggcgtcactccgcgaccacagcacaccagaaacactcagcattatggatgacctcatcagctccccaggcaaaaacaaaagtgggaggggacatatgctcattatcagggtgccctcggtgcagctggcgatgttagccaaggagcggctacaggaggtgcgcgacaaactgggtctgcagtatcggtttgagatcatccttgggaacccggccaccgaactcagtgttgcaactcactttgtggcgcgattaaagagttggagaggaaatgaaccagaagagtggatccctcggacataccaagatttagacggtctaccttgtattgtgatattaactggcaaagatcctcttggagaaacctttcccaggtctttgaagtactgtgacctccggttaattgactcaagctatttaactcgcacggccttggagcaggaggtgggtctggcatgctgctatgtctcaaaagaggtcatccggggacccactgttgccctggacctcagcgggaaggagcaggagagagctgctgtcagtgagaatgactccgatgagctgctcatcgacctggagcggccccagagcaacagcagcgctgtcacagggacctcgggttccatcatggagaatggagtgagctcttccaacacagctgacaagtcccagaagcagtccctgacccccagctttcagagcccagccaccagcttggggctggatgaaggggtctccgccagctcagctggagccggagccggggagactctgaagcaggagtgtgactccctgggcccccagatggcgagcagcaccacctccaagccgtcatcatcatcctcaggacccaggaccctcccatggccgggacagcccatcagaggctgccggggcccacaggcagccctgccaccagtggtgatcctatccaaagcggcctacagtctcctgggctcccagaagagtggcaagctgccatcctcctcctccctgctgccccacgccgacgtggcctgggtgagctccctgcggccactcctgaacaaggacatgagcagtgaggagcagtccctctactacaggcagtggaccttggcccggcagcaccacgctgactatagcaaccagctggacccggcctctggcacccgaaacttccacccccgacggctcctgctgacagggcccccacaggtgggaaagacgggctcctatttacagttcctcaggatcctcttccgcatgctcatcaggctcctggaggtggacgtgtatgatgaggaggagatcaacaccgatcacaatgaaagcagtgaagtgagccagtcagagggagagccctggcctgacatcgagagcttcagtaaaatgccttttgatgtcagtgtgcatgaccccaagtacagtttgatgagcctggtgtatactgagaagctggcaggggtcaaacaagaagtgataaaggaatccaaagttgaagagcccaggaaacgggaaactgtatccataatgctgaccaaatatgcagcctataacacctttcaccactgtgaacagtgccgccagtacatggacttcacctctgcctcccagatgtctgactccacccttcatgccttcacattctcttcttctatgctgggagaagaggttcagctatatttcatcattcccaaatccaaagagagtcattttgtcttcagcaagcagggcaagcacctggagagcatgcggctgcccctggtttcagacaagaatttgaatgcagtcaagagccctattttcactccttccagtggtcgacatgagcacggactcctaaaccttttccacgccatggagggcatcagccaccttcacctcctggtggtcaaagagtatgagatgcctctgtaccgcaagtactggcccaaccacatcatgctggtgcttcccggcatgttcaataatgcaggcgtgggtaaggggcccccctgggatggggagaagggcttcgaagataaactgagctccattcccctggcatgaaactttcagattcccctgcctctagaaattgtcctgccctcctcaccactcttcgg

SEQ ID NO: 18089 - protein, 875 aa, Homo sapiens
MKPSTFINRSNSCQKTLIPGVCYSGQWQPEPGPRSLQQSRLHHHCSQIGGVGSANSSADSTISVISGSLSHSEPSHGLADRVINCREVLEAFNLLVLQVSSFPYTLQTQQSRISSSNEVHWIQLDTGEDVGCEEKLYFGLSEYSKSLQWGITSPLLRCDETFEKMVNTLLERYPRLHSMVVRCYLLIQQYSEALMALTTMASLRDHSTPETLSIMDDLISSPGKNKSGRGHMLIIRVPSVQLAMLAKERLQEVRDKLGLQYRFEIILGNPATELSVATHFVARLKSWRGNEPEEWIPRTYQDLDGLPCIVILTGKDPLGETFPRSLKYCDLRLIDSSYLTRTALEQEVGLACCYVSKEVIRGPTVALDLSGKEQERAAVSENDSDELLIDLERPQSNSSAVTGTSGSIMENGVSSSNTADKSQKQSLTPSFQSPATSLGLDEGVSASSAGAGAGETLKQECDSLGPQMASSTTSKPSSSSSGPRTLPWPGQPIRGCRGPQAALPPVVILSKAAYSLLGSQKSGKLPSSSSLLPHADVAWVSSLRPLLNKDMSSEEQSLYYRQWTLARQHHADYSNQLDPASGTRNFHPRRLLLTGPPQVGKTGSYLQFLRILFRMLIRLLEVDVYDEEEINTDHNESSEVSQSEGEPWPDIESFSKMPFDVSVHDPKYSLMSLVYTEKLAGVKQEVIKESKVEEPRKRETVSIMLTKYAAYNTFHHCEQCRQYMDFTSASQMSDSTLHAFTFSSSMLGEEVQLYFIIPKSKESHFVFSKQGKHLESMRLPLVSDKNLNAVKSPIFTPSSGRHEHGLLNLFHAMEGISHLHLLVVKEYEMPLYRKYWPNHIMLVLPGMFNNAGVGKGPPWDGEKGFEDKLSSIPLA

SEQ ID NO: 18090 - DNA, 3351 bp, Homo sapiens
  CDS (167)..(2110)
gctgtttcggtcgggagtgggtgggagagaagccggggcaggggaggagccgccggagctgtcggagccggcccttggaagaaaatcctcgctgtgtccaggctgaggcggggggctaatgacagtgtgagctctagatggtgtgagaccaccccaaagccaagaaatggctacagccgtggaaccagaggaccaggatctttgggaagaagagggaattctgatggtgaaactggaagatgatttcacctgtcggccagagtctgtcttacagagggatgacccggtgctggaaacctcccaccagaacttccgacgcttccgctaccaggaggcagcaagccctagagaagctctcatcagactccgagaactttgtcaccagtggctgagaccagagaggcggacaaaggagcagatcctagagctgcttgtgctggaacaatttcttaccgtcctacctggagaactacagagctgggtgcggggccaacggccagaaagtggcgaggaggcagtgacgctggtggagggtttgcagaaacaacccaggagaccaaggcggtgggtgactgtccatgttcacggccaggaagtcctgtcagaggagacggtgcatttaggagcggagcctgagtcacctaatgagctgcaggatcctgtgcaaagctcgacccccgagcagtctcctgaggaaaccacacagagcccagatctgggggcaccggcagagcagcgtccacaccaggaagaggagctccagaccctgcaggagagcgaggtcccagtgcccgaggacccagaccttcctgcagagaggagctctggagactcagagatggttgctcttcttactgctctgtcacagggactggtaacgttcaaggatgtggccgtatgcttttcccaggaccagtggagtgatctggacccaacacagaaagagttctatggagaatatgtcttggaagaagactgtggaattgttgtctcactgtcatttccaatccccagacctgatgagatctcccaggttagagaggaagagccttgggtcccagatatccaagagcctcaggagactcaagagccagaaatcctgagttttacctacacaggagataggagtaaagatgaggaagagtgtctggagcaggaagatctgagtttggaggatatacacaggcctgttttgggagaaccagaaattcaccagactccagattgggaaatagtctttgaggacaatccaggtagacttaatgaaagaagatttggtactaatatttctcaagtgaatagttttgtgaaccttcgggaaactacacccgtccaccccctgttagggaggcatcatgactgttctgtgtgtggaaagagcttcacttgtaactcccaccttgttagacacctgaggactcacacaggagagaaaccctataaatgtatggaatgtggaaaaagttacacacgaagctcacatcttgccaggcaccaaaaggttctcaagatgaacgcgccttacaaatatcccctaaaccggaagaatttggaagagacctcccctgtgacacaggctgagagaactccatcagtggagaaaccctatagatgtgatgattgcggaaagcacttccgctggacttcagaccttgtcagacatcagaggacacatactggagaaaaacccttcttttgtactatttgtggcaaaagcttcagccagaaatctgtgttaacaacacaccaaagaatccacctgggaggcaaaccctacttgtgtggagagtgtggtgaggacttcagtgaacacaggcggtacctggcgcaccggaagacgcacgctgctgaggaactctacctctgcagcgagtgcgggcgctgcttcacccacagcgcagcgttcgccaagcacttgagaggacacgcctcagtgaggccctgccgatgcaacgaatgtgggaagagcttcagtcgcagggaccacctcgtcaggcatcagagaacacacactggggagaaaccattcacgtgccctacctgtggaaaaagcttcagcagaggatatcacttaattaggcatcagaggacccactcagaaaagacctcctagctaggtccccatgtgaggagatctgctttcagccctcacctaagggaggtgaggaagaggaaaagccctcttgtcagcctgggaagaccttttcgagggagtctccctgacctgctcagatctgacattacctcttcctgcaactaaacacgagcctgggcagaacctctcagccttcctctacgccttgaggggatgtttcatccaaagtacaacctgaattgaggcttctccttcactggagtgcacctgcctctacctcatgggtataaagtaggagaactaagagacttaagaggtcgtggttcctatatcgtccaaaaaataggctgttacatatcctaaagactgctcaacagcttcaagttgaaagtggccaaggacagccccttaggtttgggaagggacgagcctgaaggattctgtctttactggggtcaaatcttaaagcacacagctctggactcaagacaggaggtttgcgtcctgatggctttgccacacattcacaggataactgcatagatccctcgctgtctgattcacttcttaccatgcactttcctttgatgctgaggagaaatggaagtgggcgaaaaatctcaaggctgcttcatgtggaccttgtcaagctgctccctcccccagcgtcaaattgttatcaggtgccaaacactgctagaaaggagggcctagtcagaagcctctttccatacgagttttggttttgtttttaatatttttttctattaaaatactcatgcatttaaccttcccattattcaaccagtctcttggttgcatccctagcacttctactacaagtgagatggtagtgtttgagtgcttattgagtaaagcataattcggtcataatgaaatcgttcacattccctcatatgcacaagcccaccaaccccttcacaccccccttcacaggggtcgtatgagtaaggggatttggaaactgtcaacttacaaaggcactataacaattacagaatcatgattgccatgggccactttatttacatgaagacaactggagaacgactaagaccaaattatggaaaataagaaaaagctgttgctggcaagaccatcaagactgttctgacaccctgtccccatcatccctgactgagtactctgacatcacggaaagtgttgaacctgggaccctgaggaattcaccaggagtaaatggctttcctgtaaaaaaaaaaaaaaaaaaaaag

SEQ ID NO: 18091 - protein, 648 aa, Homo sapiens [sequence omitted]

SEQ ID NO: 18092 - DNA, 3498 bp, Homo sapiens
  CDS (2268)..(2567)
acttagatatgcagctgaaggggttcctgggtttatttctcctgagaactggcatgggctccgagttttgccattcctggcttcggtcctagcattctaagctgcctgaccttgggcatttgtcaacctgtctgaaccttagtatcctttcctctctgtagagtgggaagagatggagtctgtgaagcgcctggtgcaagctgtactaatacacctaacaatgagctcctccctccctccctccctccctgcctccttgcctccctgcctccctccctcccatggggaggccagaatctggctgcttgctgccacctagtggctctttggggtcatcttccctcataggaaccacagatccagtagcctagagcagaaagggaaggaagattcaaccaaggggtgattatgtttaccgtgtgtctggcactcggggagatagtgcatgggactacataagtaagacagcatcgaagaggtgtcttggagtgtggttaggagcgagggctctggagtcagacaagctacagactagctgagtgaccttggggcaagttatttcatttcactgtgcctcagtttccccatctgtaaaatttgtataacgataacctacctcgcgtatctacagtgcctagcatagtgccccacataaatgtgttcactaaatgtacgtcgttattaatcataggagcttgcagtctcactagggccgactggaaaactattaagtgatcctcaaagccacaggcgctcagagactggagagatcaaggtgcagaagactcagggaagggtagtcttgagggcagctgcccttaaagggtgggcagcatttagtgaagcagatggagggaagttgaccagcatcccagatgtggggaagaggccagcagcctagtctcctccacggcccagcccccactgtcttaccaaagaacagctttaaccaaacccctctgggcatcaggaccaccgctacacctcttgccaggctgcagagctatgcagtctggaggcccagctctcgtcagaagctggggcatgggctctaggggaacctggggtcggatgagcccctgagcaggtggcaggtgcctacatgtcccagtgtgggttcgtgtttgtgtaaagctctcctgcccccacccccaggcaccagcacagcctttgccttcactctctcccctcccctgtccctgggggattgaataagggaagctggggttggccgtccttctagcttgattggcagcaccagcgctgtgacggaaggatgtgttgtgccagcagcctcttggccgcaggacaaatgcacatttaaagagataacctttttgtgtcctggctgggaaagaggtcagtgcagatgtttttgggtccaggtgttggctgtgagttttcctttcctctatgaactgaactcagcagcctagtggacagtcacctccttacaggtgtaaaatccaagccagtcaaccatagcaggtggcagacttagctgccttccctgtggtgtggtgcagaccatgacccttgaggcaaatgggtgagctggccccacctcgcctgcagcctcctctgaggctcccctgctgcctccccactagccgccctgaatcacctacttcccagcacccccagcccgtggttctcatcccgtcttccatctgtgatctggcactcattcttccagagccaaagaggaatcccctcttctcatgcagaagacagtcatgcctgcccttgtgtgtcaaaagcattgcatttatgccctgttagaacccctgtcacaagcatggtgcctgaacacaggtgcctctgtggtctcttctcatcctcacccaatgggtactatgctagccccattttacagatgaggcaaacgtggcacggagaactccactaacttgcctggatgattcatgcatccatccattcacttagcaaatacttatttaacttctgctttgtgctagctagtggggatgtggcagtgggaatgtggcagtggggatgtggcagtggggatgtggcagtgaggaagacgacagacaggctccttgggaagcagagtaagcaagtgaggagacaggcgggcgtggtgaggctgcgcaggcgctgagatcgagttgctgggggaggcctctctgaggtggtagggcttgagttgattctgaaggacaagaagagccagccctgggggtctgggggaatggtattccaagtggagggaacagcaggtgctgggggcagggaggtgacagatgtgtcccaggtacagagaacagagtgaacaggagagaggagggggccagggcattccaggtggggaaaggcagcaggtggcccggtggtaccacctcttttggcgagggctttggaccttacccggtgtgatgggaagtcctggaagtgtgttaagcaggggagtctttttgatcagattttctagaaaacgacagtgggctgctgtggacctcagagaggcatgtgtgatagtgtgtttcgggctcttcccacgaaactcggctctgcacagtgagacctcatatcctggttctgtttgatgagtgagcgaatgcacatggcaggcggtcatgtcccttgggcctgtgaggtgaggaagggtccctgagccctgtggggatagagactcttccaccattctgacatgatccgagttagcaggcagcactgtccagatggaaatggggatgggagacggaccatctctctcagcgggtccagccatgagccagcagactgtttcccattggcccccatctttcagagtgggatgatctttctaacaaagaaacccacacaggaatttggtgtgtgtgtgcatgtgtgtattacctttcaggatggaagccggtggggtgtggagcgaggggctggcatggttggcctcgcccagctcctgtaccctgtgtgtgcctagagcatgcacctgctccctctgttgggctgagactcagaggacactgggcaggtggtggggggtaggagggtcgtggctgtgttgggtggggccacatcaggtgtgtggcacagagggggagggggaggtggagtggcagtgtgttccacccagcagtccctgtgtttgacctcttcgtacactctcagttgtattagctctcagaatgaaaacgagatacttttccccaatctatgtacgttgttcttaagaatgtacacttggccaggtgcagtggctcacgcctgtaatcccagcactttgggaggccaatgtgggtggatcacctgaggtcaggagttcaagaccagcctggccaacatggcgaaaccccatctctactaaaaatacaaaaatcacctgggtgtggtggtgggcacctgtaatcccagctactagggagactgaggcaggagaattgcttgaacccaggaggtggaggttgcagtgagccgagaccgcgccactgcactccaacctgggcaacaagaacgaaactctgtctcccaaag

SEQ ID NO: 18093 - protein, 100 aa, Homo sapiens [sequence omitted]

SEQ ID NO: 18094 - DNA, 3441 bp, Homo sapiens
aaggagcgtccctgcttcacccccaacttggctggagaagaaaggacaagaggcagcagggtgaagaagaagccccccatcccagctggtggagatagttctggaactggaccccgcagctgcgtgggcagccgacacacccaccccagcactggcaccagaccagagccagagccaggacctgggcaaagtgcagccgtgcaccctgcctggtcactgctctcccagccctgcctgggcctacctcctgcccagctctgcttgggaccctctgggcatgcagcagcagtagcctaagggctctggtcacttccagggctctatagggcagcagagcagagcaaaagggtgcatatgctgggagctgtcacctccactcctaggcttttctgcctagagcagaattataggggcagtatacatccaggggtctgtgcggtggggctgggggattccttaagtgactttgggaaggatttgttttcccgagcatcaatttcacacctgggcattgcaccccaggctatgcagtctttcagtgtgaggaaggggcagaacaagaatgaggcggccccgtggcctcaaggaagcttgtggctttggaggatctgactccgcagagtctgtgccaatgtggggtgagcagggcccctgccatggagcagcaggaatttgagggacggagcaggttaaagaatgggaaacatcttcacttgtttttttttcttgcaaactactccctgctactcattgagactggttactggaagcaacttgttaagatttttctttctgggcgggcgcggtggctcacgcctgtaatcccagcactttgggaggccaaggcgggtggatcacctgaggtcaggagttcgagaccagcttagccaatatggtgaaaccccgtctctactaagaatacaaaaattagccgggtgtggtggcatgtgccagctactcgggaggctgaggcaagagaatcacttgaacctcggaggctgaagttgcagtgagccaagattgagccattgctctccagcctgggtgacacagcaagactctgtctcaaaaaaaaattttttatttctttcttttccatggaggcctagagtccctgtgaaggctaggaaggggctgctgatcccaggagtgcccacgaggagtggggggcactgttggcccataatcaggcaaacacccatcatttcatgggggattcatgaaatcatagtcaggcaaacacccgtcatttcatggctaagcatttgcagaaggtggaggattctcccccgagtccccaaatcagcagcctgtgctagggaccagagcaccgggggcaagaagacagaaccaatgtgggagtggggatggtcactaaatctgactgtgccacacaagcccatgatgaccttggcactggtttgggtggcaggatatgaaggaagctgtaggcattattgaaaaaatcattgttcagccaacagggtgaggctcccagcaaggccgtgccatcttcccacctccctgtgcccagagggttagactgtaagctcccggagggcgaggctggggctgagcgtgcctccacgtccccaaggcacagggtgcacagtgggtgctcactgaatatagtggactagtgagcagaggatgagaggactaccctgtaatgagccttggacagtctggcatttgccttaactcccactcccatgccctgggatcactgttggatatttactccatgaggacaaatactggggaggtgtggagaggagggagggcaggttcctcttactttcacccattgctgagaatgagcgcctgttggcactgcctttgtgagcctccgggagcaggtaacctgcggcccaagcccgcctaggactccacatcaggcaggcacaggactggccccttgtcctcataaaaactctcagtacagcttaaactctgtaagatctaaccagccaggaggaccctcgcttcctctccgccatgcttgccacctcttgcttctgagagtccatctcagttcgcagttctgtgacttgcattgacctggctccaatcaagctacaactcaagcagtcacggggagaaggattgtagatgggccagtgactcacagggtcaggcactcgggggagcctgagtcaggaggtcagtgggccctggaagggagggggcaagcctgggtgggtaaggttctgggccccaggcaagaaggcagagtttctccgcaggggtgtgtgcaagagctagctgcgcagaaggtctccgctggctctccaagccgggcttgtgaaataggaacgccaacatcctcctccacaggcagtggcaggcacctcctcctcaggtgccccccaagccctatctgatgggcaaaggtgaacgcagggcggtgggcttttcctgtgcagagggagactgattcaaagggtcatttatgacctttcacaagtcccacatcctgcccaatggccaggtcttgggatgctgttgcaagatggttctgtgactccatgtgactgtctgatgattgccccagctggggaaaaggctcccatgtctctttctcataaaaccagtgggcaaggccgggcgcagtggctcacgtctgtaatgccagcacttcgggagaccaaggtgggcggatcacctgaggtcaggagttcaagaccagcctgaccaacatggtgaaaccccgtctctacaaaaatatggaaattagctgggcatgacggcgggtgcctgtaaccccagctacttgggaggctgaggagggataatcagttgaacccaggaggtggaggttgcagtgagccgagatcgcgccactgcactccagcctgggtgacagagcaagactccatctcaaaaacaaacaaacaaaaaactagcgggtgaaatgattcagtgacctaaggacagccagagcactaagctgctgggaacccatctgtgctgaaatgtagatttcccaggaaactcaggcttgggacaggcgcctacctgctcctcgggcaccaggtgattaggagaggtcgaatctcatttccacgtgagtgaggataaagactgggctgccaaggaggactcctcatagacattgacaaattgctctgccccgcctgtgatcccagacgactcctgcagtctgggatcctgagtgtcctgtgggttcatctcggatgggcgctgcataaacagcctgcagggaacgtctgggagaaccagcttcacaacagatataataaggaagaagtttgaaatattgcaagaattgcgaaagtgtgacacacagatacaaagtgggcacatgctcgtgggaaaatgttgccaatagacttgcttgactctggagttaccccgaaccttcaatttgtttaaaaaaaaaaaggcaatatcttgacgtgcaataaagtgaactgcaat

SEQ ID NO: 18095 - DNA, 3138 bp, Homo sapiens
ctagcatcagtaggtttaccatagaaggattcagtggagatagcgagggtggtgagtgttgctggattgagcccgtccctgcagcctgggcacgggagcactgcagtgccatgaaggagagggctgggggataatagcacagccggttcctatttccttttccacctggttaagactcccggggaggccctgcccagcagtccttatgagatgctgccttcctcttttttgaaaggcatagatgataaggaggtggacatgttttgagaagagaacctagagctcattacttgtatttgaggcatgtattgcttcactcccactttgggagagttttttctggggaagttaaaggctattcaggatcagagagtttcctgcatggtcccaggggctgggaggagccacctgctcagctggtggttagctgatagcacccagcctacccaccaagataggaggcagctcagatgtcactgggattcgcagtaccacaggctgtccctgggcccaagcagttagctagctgcaccccgggagggggtgttgagagcactgaagctcctgtgggagagtgcctttgacatccccccactccccactgcccagaactaggaggtagtgaaaggtgtcagtggcaagaaggctgggccagagcatggagggaggccaacctgggctccacacccacctcctccaccaccggctggctgtgcgaccctgggcaggtggcgggggttaagcctcagtgtccttctttgaaaaggggcatcatcctatcctcggtttgaggattagacgtgatagtgcgcaggaagcactctggtgcctggtacattgtaagtgctcaataaatgcagcttcccaaaatgatttcaatggcacatggtcctgcatccaggtgggatctgctacttgagtctccccctcaaaggggcctgctgaaatacgcagctcagtgggaaaccaaaacatacacccctttcctccagtgctccccaggaagcgccaagtcctgagcccagccagcaacttcgaagaagtgccctccaacaagtggcagtgggcacttgagcaagtgacttaacgcagccctctccccagcccctgcatccatctgggcctcattatctgggaggtggcttcttgtttcagagttacaggccctgaacaattttgtgttgggatgtgccataggcagtgccaggaaggttctttcatgagtaatttaacttgttactaagtttgctatcagccggggggctctttccctgggttcccttctttccctgggtccccttccccgcaaagcaaagtccaactcaagttagaaacatcccacagcctggagtcaggctgccctctcttcagttggtgtgtgatgtagaagcaggaagggcttcccactgataaccctaaaaataactgcccagaaatgctgtcagatggggccaagaggtgcacaggagcctgtgcccagctgccgacctggaacgtgggactttctagagggcttggaggagccctgccccttccaggcctcttcccaacagtgcttctcacgcctgctgctccattcccttttcctccttcctcccgcgcccccccctttcctggggtcacttcctgatgccattcttcaacttcgcccctgtcccccccaaaagcaatcaaatccacaacctaataaggcaaaagaatgaggagaatgtccgcctcccagcctctcccctaacagggtgcaggcctgaagcaaatttggaaaatgttacaacggagtgacaaccgatgggggctgggggtggggcggtgcagccttgttcaggagctgcccattgttggcctgaggcaggaccctaagggaaggccacccggtttgcgctttcctgatcaggctgttgacacccttctagcacaagaaaatgtatggaaagtaactgcctgagtcagctgcatctccagttgtgggatccacgtgccaggagaacacgaagtacacacaggtccgcagtgggagcccgctcggagacacctccccgccatcacggctgggactgtgcatatccaaacacttcttgcctctgagatgagcagttttcttccccttgactgtgccagggttcaattagcctgggcattaattaaaacttgtcaacacttagagtggggcccccagaaatctgtcacccctcctagatcattatcccaggctaatcaaccctctctaaggcagtttccattcttgacttagtgggagggaggaacaagcccctcggtgctggggagctctgggggaggtagggactgactgggcccaacccactttgttttggaaggtcaagcttagttattaacctgaatgcttgggggagggggtgaaggagaaagaactgagtctagggatgtgccaggtctttcaaattgctaattatcagcgagcatgaggtcatccgtaaatatatccaattctttagcttgtaattaaggtgctcattaaaagtgcagggaagtcttgttttcctaaaaggggaaaaaaacaacaacacaaaaagtctttgttttgacctgacacgatggctcagaacagggggaggactcaaggcacaggactagtttcctgccttaaagagcctttacaggaaattgactgcaaacagtattggtgaccctgccaaggaggcaaacctagggtgatgtcattgttcgaagctgtcaccgccaagcctctggccttggggcgaggagagttggtgggattaaaaaatgagtgtgtgtatgtgtgtgtgtgtttagcagtctctaaagaggcgagtcaagggaaaatcctagcgggagaaaaatcacaaggggtggggggtgtctcagaaatattcttagctgggttcaactttcctcgtttttctaagtttaaaaaatcctctcttactatttttgctcatcaaaatgctgctgctttttcagaaacagccttttttgagccattccctatttagtgttttgggtaattggctgttacagtatggaatttgtggcccaaaggcagcgtggtaagttagacactaggtgcacggtgccccattgttatgaagtgtggaaactgagacgctggactagtctgatgtatctgtttcttccacc

SEQ ID NO: 18096 - DNA, 2797 bp, Homo sapiens
  CDS (1392)..(1904)
aactaacatgttttgggaggaagttttctcccttctgaggcacatgcctgtctctcagtaaacactggcctaaagcaaggttgggaagtgactttctccccgacaatatgtcaggctggtgggaagtctcctctcaggaacgtctgtgagaagaagcaagtgattacaagctggtggatgcataaggagctcttgatcttgggagtgggaaggggccactcccatctgcacatggcctcttgctgtttccctggcttgtagcatggagatttatgggcatgtaacttttacagtcacttttttttttttttgaaacagagtctcgctctgtcagccaagctggagtgcagtggcacaatctcagctcactgcaacctccgcctcccgggttcaagcgattcttctgcctcagcctcctgactagctgggattacaggtgcacgccaccacgccagtctaatttttgtatttttagtggagatggggtttcgccatgttggctaggctggtcttgaactcctgacctcaagtgatctgcccgccttggcctcccaaagtgctgggattacaggtgtgacccaccatgccctgccatgatgtcacttttctagcaagaggtctccttgtctgtattcaagtggggggaggtagaatggggagcaacaggtgtgaccagaaaacagtctccccacccagcccacccatctctttccccatcccaggagggtcctctgtggcctgtggagggtgacagtgccccacactgggagcccttttcctcccagatctgagccccttctgaaggggtgggatgatttgaaggggagctgctctggtatttcaggaggttgaaaaaggaaggtggctgtacgtcttgtgctggatttcctgggcctggagaggacaagggccatggaatctacagggagagatgctggagcccactcagaccctgcattctcgaagcaggaatcccttgggtgtgtttgtgcccagaaggaccggtgaagctggcactgtgtgtggaaccatcctcttctggaagcttacgctgctagtggtgtcactgcaagcaggagggcagcccttagtagcagaacttggtggcccgagctctggtggtctgagatacgctggagttcttacctacacaacaggaaatgttcagagtgctttccttcctccctgcttctctcccatcctccttccctccttccacaaagcatttcacacatacatcaaagaagaacgaagagagcaataaactctcttgtacctatcaggcagctatcagctacctacagtgagcatctcaggaccacttgtttcaccttttttttttttttttgagatggagtctcactctgtcacccaggctggagtgcagtggcatgatctcagttcactgcaacctccgcctacctggttcaagcgattctcgtgcctcagcctctggagtagctgggattacaggcacccgccaccacgcctggctaatttttgcatttttagtagagatggggtttcaccatgttgaccaggctggtctcgaactcctgacctcaagcgatacacccaccttggcctcccaaagtgctgggattacaggcatgagccaccgcacccggcctgtttcaccttttttcttttttttaagttctttttttagttgtagagacgaggtctcactatgttgctcaggctggtctcgaacttctgggttcaagcaatctgcccgctttagcctcccaaagtgctggcattacagatatgagtcactgcgcctggcctcttttttcatctttatgcactcacatccactcacacgatcagattatttaaaagcaaacctcagacattatagtattttacccataaatactttaggctgtatctctaaaggctaaaattttcttcttaagagatgaggtctcactctgttgcccaggctggagtgcggtagtgtgagcttggctcactgcagcctcaaactcctgggctcaagtgatctccctgattcagcctcccaagtagctaagactacaggcacacaccagcatgcctggctaattttttgtgtgtatatatggtcttgctatgttgcccaggctggtcttgaactcctggcctcaagcagtctttccacctcagctgggactacaggcgcatgtcaccaggaggataagaattttttaaaaacccaattgcactatcacactttggcacctttggcatcttttttttttgagacagagtctcgctctgttggccaagctggagtgcagtggcatgatctcggctcactgcaacctccgtctcctgggctcaagtgattctcctgcctcagcctccctagtaactaggattacaggcactcgcaaccatgcccggctaatttttgcatttttagtagagatgggatttcaccatgttggcctggctggtttcaaactcctgacctcaggtgatccacctgcctaggcctcccaaagtgctgggattacagtcttgagccagtgcgcccagccactttggcatcttttaatgcccaatccttatttgccttttcctgattttctcaagaatacatttttatatagctgtacccccttatctgcggggtgtatgttccgagatcctgtggatgccgtgaaaccacagataatgccgagcccttgtatactatattttttcctatacatacacacctataataaagtgtaattataaatgaggcacagtaagagtttaacaacaataattgataatgcactgtaataaaagttatgtgaatgtg

SEQ ID NO: 18097 - protein, 171 aa, Homo sapiens
MISVHCNLRLPGSSDSRASASGVAGITGTRHHAWLIFAFLVEMGFHHVDQAGLELLTSSDTPTLASQSAGITGMSHRTRPVSPFFFFLSSFFSCRDEVSLCCSGWSRTSGFKQSARFSLPKCWHYRYESLRLASFFIFMHSHPLTRSDYLKANLRHYSILPINTLGCISKG

SEQ ID NO: 18098 - DNA, 4768 bp, Homo sapiens
cttgcttccctctttgcctggtccaagtgagtgtctgctgcctctgtcctgccttgttttcctggctctaaaccaactccacccactcttaatggaaactcagtctggctttgtgtgtttctgggaagcacatgacttctgggaatgggcaaggaagaggagtgaaacaaaaactgtcagctatgtgtgcctggtctgggatccttctctgggtgacagtggcatcatgaatcttagaatcagctcccctttaactagggacaattgtaagcacttggcctcagagttgaggttcttgaatgtttgctaattttatgtgcatgatccttgcccaaatatttgtcatccgtccacatagattcacgtgtgcatacaacatgtacaagtaatatttgggctgcccataagaactggaagattcatagggaatgcatatacccttctcagtatggttaggattctgtttttgcttcatttaattccagagttcctcagcctcagcaggttctgcttttacctgtcacagaaatgtccagtgtttaatgcatttggttgctggggcttacatgccagcctcctctgatatgtacttggtttttaaaaacccattttgttctctcttgtttcctctctatttcagcctagtatcagaaggccaggcgagactgcaacactgctcatcaccccgcggcgtgatccctgctcttaggtgctgggcagaggggaagggtggtcagggtgaggatggtgagggagggctggtgaggggctcagaggaatacttggaacaacagcagtgttattgtagtgtggcagtttcttttatacataggtgagagtttttaaagtgtaagggaaaaattaattttttaaaaaacaccatgcttggagggtgggggtagaaatagacacaatattatttctaaggaatcgggttttcatttactctggactggtgaaaatattttttaaagccagtgctctaagacctcagcttttatctcagaaccccatgggttccagaccaagagtacaggaaatcaaattgttgtcctgtctgtctatagcttggaacagggagctttgattactgactccggttccacacactgtaagatcaaaaaaccatctccacatttgaaagagatgtaaggtgtattcatagggatggtggctcaacaaatcaagcaaactggaatcaaggggagggggatgggaatgaaatggaaagggaggctgattcccttcccctgacttaccactaatttactaggctacctactctcatgagtaacctctcaccgctacccagcacatgccacaatcctatgctcttgccttcttttatctgcactgtgtgaagggactcttttaaataaatgagcaagtgtcctaagctatgtcatccaaagattgtcctttcgattctcaaatcctgtgactgggatcactcaacagcactgtgatgtattattttcaatgaggtgcctttcttaactgaccaaatgctgccttgtttggcccctaaatcaataaaatatgttaaaatttgtatcccctgttgtggcattttttttagataatctaagctagaaaaatgacattgaattctggacctggctggaaggaaaagaagccctttcttgtcactggcagctgtgtggtagggaggtccaagtatgtgcatatgagataagcctgcaacctcttgaccttcagctcctatgcaggcttctcttgagcccagagacaaggcagcttggtctagtggagatagcactgtgcttggagttcaggggacctaggacaaatcccagccagttagttattcactgtgctcctgtttcctcagctgaaaaaggaagttggttatgccaccttcttggccttaatggcattaaatgaaatttataggaagaaggtttttgctcagtacctggcatgcaacagacattggataaatgttagttggatccagatatacacagaaagatatctgcttcctgccaggctggataactgttgaatggacacttgtccatagtctagaaagccagtgcttctaatccttaagccagatctttgactaccttttcagttgcttctttaacactctttgttgcttctctgtgtgtcctagtttaaattcatttcctctccagcaaaagtgagcttaaataatttctccaaactaaagctctcatgtttttggaagggctgcctttgcaagtgaggtttctgagaaatgactgttgttcccaaaacaagagggagctgggctggaagcaccactattcttctttaggcatcttgttacagagagaggcagggtcttcactgacatattaaatcctgttccctgaaccagcccctccctcttctgctccacttcctcacctgtgcagagtcattttcaggtgttagccttactgatttgcactgatctgtttgttccctgagctttttaaataccctgtgaaaattttctttcctcccttggtcatcatgcatctaattgtggggaaatgtttgtcaaaccaacctgcaaagcagcacggtgtagttgagaagaataaacagagaagactgggtgagctattgtttgtttgcttctttgggcctgggtttcctcatctaatctgcaaaccaagaatgcagactagtcctaccactcccggaagactgacgttgtgccaggtattatgcaaaggcttcatgtaaccctcgacttcacgtaaccctcacacagcaccctgtggagtcagaactgtccttcacttttataggtgaggaaaccagactcagagaggtgaagtggcattcctgaggtcatgcataagaggcagtcaggactgaaacacagtctctaacacttatccgtccccttgatcttgttgctgaagtgatttaattacttgcgtagctctgcacacaggaagggctgctctgaataagagctcttttccatggacactcagcgctgccggaactgattttgaagaagtcactgccggctctgagggcctagggtatgtgtcttaggatctcctgtgtgcacaaagtgtcactgacagaacacagcaggatggagagcagcctcctcagaagcctcacaagtctttcctcagatgaagacagagcaacgagtcagaagacagatttcaacagcgacttcaccatgcgaccttggacaagttatctcacctcatcagtagaataggaatgatccctacccctcaaaggtgctgatgacactagtgaccaagatactcatgtgggttggactgcccaggacacagcagatgcttagtaaacacagatggaattcagagggaaaatgtaggcattgaagaaagttgtcttactgaccatccggaaccaggctaaggatcccctagaaatcatagacctctgaaattatatgcagaattctttatgtgttttcataattaataatagtctaacatattaaattctagctgtgtgagaggttctgcatgcattatctcatttattctcctcgataaccctgtggaggtaagtattgctattatctctatggtatgtctgtagactttgagattcagacatctgataatggcagaaccagagcctgagtccaagtctggctccacaccccagcctcttaacactgtgccaattgctttgacactttgctggggagagatgaaatgatctcaaaggcactcatgatacagaaaaggctatgagccatggatccaaacaaaaggagaaactcaagtaggtttgctctgttacagtgaaggacctgccacaggtaagacctttttctattttgccatcctccgttgtttccttattgttggtactaaagttccaatgtgctggatttgcatagctcctggaatcacccgtattccagaaaggctggaggggtgagttatgttgggggaaggagccggttcccatctcttgtcctccacgattatctcctggttctggataaggtggccaggagagggtgtgtatgtaggctgttgagtcacaggcagccgtctcagattgcagctctgtgtagcggatgatgttgcattattcataactccagggggagcagtgtgcttctgatgttttgggaatgcagcagctctgggtttagagtcatccgtggcagtgtgatgatgagctgctctcacagagggccccttccaggtgcccagtccagattgaggtgcccccagcagaaaacaggtggaaatggaaagacagagcatcagagggcaagacaacatgggcctagatcctgtgcaggtagccctcaagccaataagccaaacagatctgcactttgggggtaaagttgctatggagcaaataatttgattgtgtggtgttctgtaagggttttgcagacaaattcctctgagcttagctaggagttcattatgcttcctgtttagctggtcttctttcttctactaataagaaatgcttcatttttggccgagcacggtggctcatgcctgtaatctcagcactttgggaggccggggcatgcggatcacaaggtcaggagtttgagaccagcctggccaacgtggtgaaaccccgtctctactaaagatacaaaaaaatcagctgggcatggtggcgctcacctgtaatcgcaactatttgggagttcgaggcaggagaattgcttgaacccgggaggcggaggttgcagtgagccgagatcgcgccattgcactccagcctgggcaacagggtaaggctccgtctcaag

SEQ ID NO: 18099 - DNA, 2923 bp, Homo sapiens
  CDS (92)..(1603)
gaaactacaggctgaaaagcatgacgtaccaaacaggcacgagataagtcccggacatgatggcacatggaatgacaatcagctacaagaaatggcccaactgaggattaagcaccaagaggaactgactgaattacacaagaaacgtggggagttagctcaactggtgattgacctgaataaccaaatgcagcggaaggacagggagatgcagatgaatgaagcaaaaattgcagaatgtttgcagactatctctgacctggagacggagtgcctagacctgcgcactaggctttgtgaccttgaaagagccaaccagaccctgaaggatgaatatgatgccctgcagatcacttttactgccttggagggaaaactgaggaaaactacggaagagaaccaggagctggtcaccagatggatggctgagaaagcccaggaagccaatcggcttaatgcagagaatgaaaaagactccaggaggcggcaagcccggctgcagaaagagcttgcagaagcagcaaaggaacctctaccagtcgaacaggatgatgacattgaggtcattgtggatgaaacttctgatcacacagaagagacctctcctgtgcgagccatcagcagagcagccacgagacgctctgtctcttccttcccagtcccccaggacaatgtggatactcatcctggttctggtaaagaagtgagggtaccagctactgccttgtgtgtcttcgatgcacatgatggggaagtcaacgctgcgcagttcagtccaggttcccggttactggccactggaggcatggaccgcagggttaagctttgggaagtatttggagaaaaatgtgagttcaagggttccctatctggcagtaatgcaggaattacaagcattgaatttgatagtgctggatcttacctcttagcagcttcaaatgattttgcaagccgaatctggactgtggatgattatcgattacggcacacactcacgggacacagtgggaaagtgctgtctgctaagttcctgctggacaatgcgcggattgtctcaggaagtcacgaccggactctcaaactctgggatctacgcagcaaagtctgcataaagacagtgtttgcaggatccagttgcaatgatattgtctgcacagagcaatgtgtaatgagtggacattttgacaagaaaattcgtttctgggacattcgatcagagagcatagttcgagagatggagctgttgggaaagattactgccctggacttaaacccagaaaggactgagctcctgagctgctcccgtgatgacttgctaaaagttattgatctccgaacaaatgctatcaagcagacattcagtgcaactgggttcaagtgcggctctgactggaccagagttgtcttcagccctgatggcagttacgtggcggcaggctctgctgagggctctctgtatatctggagtgtgctcacagggaaagtggaaaaggttctttcaaagcagcacagctcatccatcaatgcggtggcgtggtcgccctctggctcgcacgttgtcagtgtggacaaaggatgcaaagctgtgctgtgggcacagtactgacggggctctcagggctgggaggaccccagtgccctcctcagaagaagcacatgggctcctgcagccctgtcctggcaggtgatgtgctgggtatagcatggacctcccagagaagctcaagctatgtggcactgtagctttgccgtgaatgggatttctgaagatttgactgaggtctctcttggcctggaagaataacactgaaaaaacctgacgctgcggtcacttagcagaggctcaggttcttgccttgggaaacactactagctctgaccttccatacctcacttgggggagcacagggccccgctgggcctcctcaccaacggcagtgccaaaatcagcccccacatcaaggtggtgttctctgtgctttctctcgtccttccaaagtcggttctggcctaacgcatgtcccaacaccttgggttcatttgcccggtgaactcactttaagcattggattaacggaaactcccgaactacagacccctccctggtgggttgcatgaatgtgtctcattactgctgaaatgtcctcacatcccttccactgttcttcagagctttctggctctctttcccccacaaaattcgacatatttaaaaatctccgtgtggctttaaaaaaatggttttttgtttttttgtttttttgaggtgggagaggatgtgtgaaaatcttttccagggaaatgggttcgctgcagaggtaaggatgtgttcctgtatcgatctgcagacgcccagaaggtgggtgcacactgcatgcttgggggtgccaagggattcgagacctccaacatacttgtctgaaggtggtgattctggccatggcccctctgccaagcctgtgtgcgatgcccttggtgctttagtgtaagaagcctaggctcagaagcacagcagcgccatctttccgtttcaggggttgtgatgaaggccaaggaaaaacatttatctttactattttacctacgtataaagttttagttcattgggtgtgcgaaacaccctttttatcacttttaaatttgcactttattttttttcttccatgcttgttctctggacatttggggatgtgagtgttagagctggtgagagaggagtcaggcggccttcccaccgatggtcctggcctccacctgccctctcttccctgcctgatcaccgctttccaatttgcccttcagagaacttaagtcaaggagagttgaaattcacaggccagggcacatcttttatttatttcattatgttggccaacagaacttgattgtaaataataataaagaaatctgttatatacttttc

SEQ ID NO: 18100 - protein, 504 aa, Homo sapiens [sequence omitted]

SEQ ID NO: 18101 - DNA, 3264 bp, Homo sapiens
  CDS (1844)..(2356)
tcatcaagaagctgcagtacagatatcctttccttcctgacccagggcccctgcaccatgggcattttggagagagagggaccctcttgcccttcagtcctcgtgggggaagccgagcagcatattgggtggcagtgtgattgaagtagggacacaggagccccatggaccgaggttcccacctctaccctcccgcattccagctttgagctcaggcaagttcctcatctctaaaagggccgagtgaaatgatgtgaagaggctggaacatagtctgggaatgtgtgtctggtggcagttgtggtcattggatgactctaaaaacgaattagacatgccccagactgggaggggtaaatgtgccggtcctgcagacgcctcggagagaccctcatggtcggctccggcagcttctcagagctgagccccagggcgttgggcacgaaggataccaagacccaaaaagacagctcaggggtcagcacagtcaccttccctggagcggaccctgcgactgccacatccacaactggaatgggctcctgtccccagatctaccccatgggcccaccctcagtaaatgtcaccctctgcagtagtggctgaggaggaccccaggggtttggaaggacccacttgtgtgacccattgcctcttcaagtccaaacctgcccatcctaagaggctgacctgcagctgctgctctaggagggtagcctgggtcagctgctcctcagccacctctttgcacatagcccacggctgccatctgctgggcagccaccaccacctggggtaggaagtcctgagtccacccgcgcccccgctccttcctgtgtgccctgagccttcactactccactcagggcctcctgcagacctcctggcctcctattctcccctcgtgttgacctttagaatccctgatctatcaagacagacgtggacatcctccattggcggagcctcgggtccccggcaagttctgttactcagagcacctgctcacaggcctgactcagtgaatggctgtcactcacacgtgtcaaggacttgctggtcaggcgagatgtgctttacacctgtgctttcacctagccctagctctatgaccattttttaatatgtgtgtgtgggtgtgtataaaattaccatattatacatggggccactgctctataactccctattgtgtaattgaggaaaccgaggcccagagacatgaaggacctgacccatgtggctgcttggtgggagagcagccacacgctgcttgccccctgctgcctgcgcccaggctctcagcctctgcctggctcagccatcatggaaatattgcagcatcaaggtctgggcctggttggctggcgacccctgtgctgtgggccaagacacagtccctggtacgttgctctgtcctgagccccatgacttggaaggtcgtggatcactagagagcaggcaggagggtgtcagagagatctggggagtcgatggcgagcacaacagccgggcaggaaaccctgaccacaaagcagagcccgacctcagggcatgagctagagctgatcgggtgcttgaagtgctgccctggagacagggagccaatgtggagcgtgctgcagctctgggaagagagacccggcccggtgtcacggaggtgagagttcccttgcagagcccagggaggcagcctcaggatggaaactcacagaaagactggagggagatacttctggcctacacacctgcctagggacctggggtttggagggtgtttgttttgggcccaccgttctctacctaaagttcagcaaggcactctctacgtgtctgtaatctcatgtccctccccatcccctggctttccctccctccttgccccatcctgggccagccagcagggctcctcctctggctcttcagacctttcagccagtgctgtcagtgcccctgggagggaagggcatccctgaggcacccgaatggtccctcagggtgcagggaggcagaagtctggccacagaggagcctcctaaggcagcagctgcagcaagcgcaccctctccccactctccccacgccagagcggcttccagagcagatgctgtttccatcctcctcgtcaaaaccattctcactgctgagcttgacaatctgggcaaggcttgtggggcgcttgacaaacagaatctgccctgtgccgcctggttccgtggcctccagcatgagcctgcaggcagggcgctgcgggaacccagttgtgctgccccagcccatgcctccgggtctgctgtgcatgaatgagtgctcacttgtcccgggtttaggacgtggtcaagtgaacagcagggtctaactgtgcttacttagcccagttcaaacagaacaaaggaaaaatatagaaagcaacatctgttgatcatttaggttttttttaaaccaccatgtcactttgagtccttcatgggtttttgaacagcatttatcaagaagaaaatgtgggctttttcccctctcccgtgttttgtttgtcctgtagatagagggaggaaagccttgcagtggcaggcgggaccccctctggtggcgggaccccctcttgcggtggtcttgcggggccagccgggacctgtcactttattatttaaggagtgtgtgtgtagagtcgctggcttattaacagtattgtgtgtgggttgggtttttagtttgttccttctttttgaagtcccttcatttcaatccttgactctctctccccttcccttgcccagctctgttgaatgctgctgtgcgcgtgtgagggccgctctgcacacagggcccttgggttgtgtgaactgaaattctccctgtatttgtgagactcgcaggagtccccatctgtagcacaggcaatgccagtgccatgctgcagcctcagaaaccaggcctctcactccagcagcaggcagaaccgtgtctgtggtcgggtgctgtccacagctctgtctgccttgttcttgggcttgagctggatagaggtggggtctcttcaccttccctgaattcagaacagaccctgtgcctggccccagtgtgcccaggcaaatccccaggccctcactgggagcatcttcccgctccggccccacgacctccacagggttacattgtaatatatatgccccagctaacctgtctgatggtggcatcttcctgcagacatttcaaacatgtaacttttatatgaaaaaaaataaacacagatgaaagctgccc

SEQ ID NO: 18102 - protein, 171 aa, Homo sapiens
MSLPIPWLSLPPCPILGQPAGLLLWLFRPFSQCCQCPWEGRASLRHPNGPSGCREAEVWPQRSLLRQQLQQAHPLPTLPTPERLPEQMLFPSSSSKPFSLLSLTIWARLVGRLTNRICPVPPGSVASSMSLQAGRCGNPVVLPQPMPPGLLCMNECSLVPGLGRGQVNSRV

SEQ ID NO: 18103 - DNA, 3568 bp, Homo sapiens
ttgacactgttaactcctccctgtttcttgaaatcctctcttctcttgttttctctgtggcaccctttgctcctgtgttcctcctttttctatgcatccttaggggttcccgggggttttgttcatggtcctcttctttctcaatctgttttcgagaaacttgcaaaagtacaactcagcctaacatgcctgtccaagttccagacctgaagagctccagcctcctcgtggatccctttatctcaacacgtctggaacagaactcatgtgggtctctttctgggcttcttatctcagtaaatttcaccaccaaatatccagttctgaagcaagaaacactgggcttcacttttgattcctccctccctctcaatgcccaaatctcatgggtctaaagtcccatcaatgttatcacttgcatatttttgaaatccacaccattgcaacccatttccaaagtagactactgattgccaggggctgggggctaggcggggcaggggaaatagggaaatgcttccattttcattctcaccaatgctgtcctggaccactgcaaagccttctgactggtcttcatgctctcctcacctcctctttctaaagcatcctgcttaacattgctaaaataatttgtctaaatggaaatttgaccgtattactccctagcttaaaatactccgggggttccgcattgtctcctccatagcatggccataaagtcctgcaagaatcacatgctttggcctttgtcctcctccagcgtgtcattccttgcaggtgaccccttctggtccagtgggtctccatcctggtgtgtctcaacctgtggatgatgcttgagccctcctctcagagattctggtctggaaagggccctaaacgttgttgttgttgttgttgttttaagttcccagagctgctaatatgcctccaggggtaggcacaactgtgaacctagccctacatgtgaagggtttgcaagtgccaggtcccgaacctattgagtagaaggaaccaaagtaagcagcattgcctccgtcatttcccaccctcttatgatattttaaggaaagggtttttcactcagctatgcagcaaatattcctggaaatcttgcctgggtcataaggaaatgagggctcttgtattgcctagctcccttccttttgcctgctagagaggagatagggtagaggctttcactgcgtaagttgagcagatagttgtatgctccttatgagcaattgggtgagggtggcagcgggtggaagatgaccatcaagaatggtctgtctcccttccattgcttgaattcctatctacctgatggtttgctacagctgcagtaacagtaacaaagaccacaaactgagtggcttcaacaacaaacacttagtgtcttacaggtctggaggctggaagcctgagatcaagggctgattccttctgagggctgtgagaaagaatctgttctctgtgtctttcctagtttctggtggtttgctggcacagtcttggtgttcctgagcttctagatgcatgaccacgatctctgcctttgtgttcacaaggtgttttccctgtgtgtgttggtatccaaattccccctttttaaaaggataccaatcttactggattggggcccaacctattccaatatgacctcatcttaactaattccatttgcaatgccctgatttccaggtactggaaattaagacttcaacataggaattctggggggaaacagttcagctcataaccctaacaagagagtggcaggccagagacttgccagactgatacctaaaaagggcagctacacattcaaaacagggagtgagtcatccctcttctcttgtctgtccaaaacaattcaaacccaagaggagaaacgagaaagagaccacctttgcagataaaccccaaatccctaaccccatacattctgaagtcatcttaatttccttttaatcccccaaatcctgttgacatctcagatcccagttgctaattagccatgcttctattcaatgtgttatatgcctagttattgggcagatgcatactctcatttgataataactagctaaacccaaaatgccttttatggatgtgatatttcatcattcaaatctgattaataagaccagcttgaagaaattgcgggaactgatgttttagttgaagggttaaaaagaaaataacatttggaatagtgacactgaaattaagtgacattaagaacaaatatctaagtttctctctccacaccgtggtagccagcccctctttcttttctctcattttcatggggtatgaagaacttttacttacatcatcctggtgcagcgtttttcccccttgaactactgacatttcaggctgaatgactgtttgtcgtggagtctgtcctgtgcattggaggatgtttagcagcatcctggcctccacccactagatgccaagagtgtctccagacattgccagatgtttcctggagggtaaaatcaccactgtcttagaatatacaaaagcaactttgtcactctaaaatactatgcagatgtgtggaattatctcatttattacttccaatagccgagtggtttgtgtagatgggaagatggggagagttgtttaaatgacctgcttcagatcccactgcagatctgtcttagtcctatgctcatgagattacactgcaatcaccacaagcttctattctaaagggttttaatcattctttcagataggaaagggtgttgtccccaattcaccaccagaggacatctctgagagttagccgtgatattcctgggcttgataggacatggagcccatgctagcttttcatctaaatgctgctagcactgctcacatatttgcatacagttcttataggacaatgcagccatgcgcttgcttgtagaggagacatgtagatctttcctaatgtttattttgggttaagttctctttgcaggggtatccataactactgagaattagatccttatgtttaaatggcataaaatgcaatgtgtgaatgaggtatctccccgccctccaaaaacaaaaaaaaaatacatagcttttcatggtcacgagggctaatctgattctggctgccactgtggaaggcttagttaatctaattaaatgaagctagtgcctcctgatttcctagtcctgctctcccttctccatcaaggaatggctttaatggcccaacaaagggctcagcctggtgcaccatgaatttgaaataatgtcccgcactgggttaactgaactcttctgccagcagagctgatgccatctgcccatttattgacagccttgtcagcaaaaatctggagtctgagggttggcaggcagccaacttgctttccactgtctctccagtgtctcagtaacagatgttgtgcctcatgcctggagctgctgttggcaatcgctgcatgctcatgttatttatcagggcgtggagggagggcaggaagggatacatgttttccaggaaggaatttgtattcctttccaggttcttggtttgcagatt

SEQ ID NO: 18104 - DNA, 2653 bp, Homo sapiens
tctaatatgctggtgctatggtttggatatttgtcccctctaaacctcatgttgaaatttgatccccatgttggaggtgggcctcatggaaggtatttgggtcatgggggtagatacctcatgaatagattaatgccttcccttagtggtgagggagtttttcttctattaattcccacaagagctggttgttaagcagagcctggcactttcccctttttcactgtttcttcttctctcaccatgagagaagccttttgccttccaccatggatggaagcaacctgaagctttcaccagaagtcaagcagatgccagtgccatgcttcttgtacagcctgcagaaccatgagttaaataaacctcttttctttataaactacccagtctcagttattcttttatagcaatacaaaacagactaagacagctgggtttctatagaagtagtcaactgtagatttgtagcaacagcctttacaagcaaagcaaggtgcagaaattagtagttaactaggtcatttccagaaatatatctggcactattacataaggattaatagtactgcctctggaactagttctgggtttgcattccagctttgcctctcactagcagtgtgaacttctgggtaagtttcctctttgtgcctcaattttctcacctgtaaaaagggaatgacagtaatagtcccaacctcatagaattattacacaaattaatatttggaatatgcctggcatggccaggcaaggtggctcacgcctgtaatcccagcactttgggaggctgaggtgggaggaatacttgaggccaggaggtcaagaccagtcttggcaacgtagtgagaccctgtctccacaaaaataatttttaaaaatcagctcagtgggggtagcgcacacttgtagtcccagctgctcaggaggccaaggtgagcatattgcttgagcccaggagttcaaggctgcagtgagcttgattgcactactgcactccagcctaggtaacagagtgagaccctgtctctgaataatatgcctggcatatagaaggtgctaaataaattaaacactatgtaccaggcattgatttagcctctgggaatatagtggaaggaaaaaggaaaggtcctacacttggagcttagaagttatattgacaacttccatttcaccttttcccaaaagttttcccccatggttaagtgcaagtgagcaaataattgattttattttattttatttgtattacttatttatttttgagatggagttttgctcctgttgcccaggctagagtgcgatggtgtgatctcggctcgctgcaacctccgcctcctgggttcaagcgattctcctgccgcagcctcccgggtagctgggattacaggagcccgccaccacatccagctaattttttgtatttttagcagagatggggtttcaccatgttggtcaggctgatcttggaactcctgacctcaggtgatccacccacctcagcctcccaaagtgctgggattacaggcgtgagccactgtgcccggccattttttttttattatttttcagagatggagtctcacagtgtcacccccaagctggagtgcagtggcgtgatcatacctcactgcagcctcaaacttctggcctcaagcaatcctcctgtctcagccttctgagtacctgggactacagggatgtgccaccgtgtttggctaatactattaatttttgtagagaaagggtcttgctttgttgcataatctagcaaataaattttaaaaataatttctgtcacaccagaaggctacgctataatatccattcattggcaaacatttttgagctcctactatgtgccaggtactacataaaagaaatagaggccaggcacagtggctcacaactgtaatcccagcactatgggaggccaaggcagacggatcacttcaggtcaggaatttgagatcagcctagccaacatggcgaaaccatctactaaaaatagaaaaattagccaaacatggtggtgcatgcctgtattcccagctactctggaggctgcggcagaagaattgcttgaacctgggaggtggaggttgcagtgagttaagatcacaccactgtactccagcctgggagacaggctcaaaaaaaaaagaaaaagaaaaaaaagaaatagagtctttgtcctcaaggaattcctaagagggatattcagctgtaaaactcttattgaataatgcaatactatgcgtgcatttccatgtatttatacatataattttattgataatatatataaggtaacgccttgtttatcaggaaataacttttacccaacaacctagccaagaattagggattattaaggaaaagaggcgcctgtaatcacagcactttgggaggctgagacaggcagatcacctaaggttgggagttcgagaccagcctggccagcatggtgaacacctttctctactaaaaatataaaaaattagccaggcatggtggcatgtgcctttaatccctgctactcgggaggctgaggcaggaaaatcgcttgaacccaggaggcagagatttcagtgagccaagatcgcgccattgcaatctagcctgggcaacaagagcaagactccatctc

SEQ ID NO: 18105 - DNA, 3112 bp, Homo sapiens
  CDS (10)..(2685)
atcaagaacatggagaaggacaatgggctggatgtgttcaagttgggtgaccgcgacttcctgcgcagcatggagaacgccatccgctttggcaagccatgtctcctggagaacgtgggcgaggagctagacccagccctggagccagtgctgctcaagcagacgtacaagcagcagggaagcacggtgctgaagctgggggacacggtgatcccctaccatgaggacttcaggatgtacatcaccaccaagctgcccaacccacactacacgcccgagatctccaccaaactcaccctcatcaacttcaccctgtcgcccagtggcctagaggaccagctactgggccaggtagtggcagaggagcgacccgacctggaggaggccaagaaccagctgattatcagtaatgccaagatgcgccaggagctgaaggacattgaggaccagatcctgtaccggctcagctcctccgagggcaaccctgtagatgacatggaactcatcaaggtgctggaagcctccaagatgaaggctgctgagatccaggccaaagtcaggattgcagagcagacggagaaggacatcgacctgacgcgcatggagtacatacccgtggccatccgcacccagatcctcttcttctgtgtgtccgacctggccaacgtggaccccatgtaccagtactcccttgagtggtttctcaacatcttcctctcgggcatcgtcaactcagtgagagcagacaacctgaagaagcgcatctccaacatcaaccgctacctgacctacagcctctacagcaacgtctgccgcagcctctttgagaagcacaagctgatgtttgccttcctgctgtgtgttcgcatcatgatgaacgagggcaaaatcaaccagagtgagtggcgatacctcctgtctgggggctccatctcgatcatgactgagaatccggcaccggactggctgtcagaccgggcttggcgagacatcctagcactctcgaacctgccaaccttttcctccttctcttccgacttcgtgaagcacctctcagaattccgggtcatcttcgacagccttgagccccaccgggagcttttgcctggcatctgggaccagtacctagaccagttccagaagctgctagtcctccgctgcctgcgtggggacaaggttaccaacgccatgcaggactttgtggccaccaacctggagccacgcttcattgaaccccagacagccaatctgtcagtggtgttcaaagactccaactccaccacacccctcatctttgtgctgtcacccggcacagaccctgctgccgacctctacaagtttgccgaagaaatgaagttctccaaaaagctctctgccatctccctgggccaggggcagggccctcgggcagaagccatgatgcgcagctccatagagaggggcaaatgggtcttcttccagaactgccacctggcaccaagctggatgccagccctagaacgcctcatcgagcacatcaaccccgacaaggtacacagggacttccgcctctggctcaccagcctgcccagcaacaagttcccagtgtccatcctgcagaacggctccaagatgaccattgagccgccacgcggtgtcagggccaacctgctgaagtcctatagtagccttggtgaagacttcctcaactcctgccacaaggtgatggagttcaagtctctgctgctgtctctgtgcttgttccatgggaacgccctggagcgccgtaagtttgggcccctgggcttcaacatcccctatgagttcacggatggagatctgcgcatctgcatcagccagctcaagatgttcctggacgaatatgatgacatcccctacaaggtcctcaagtacacggcaggggagatcaattacgggggccgtgtcactgatgactgggaccggcgctgcatcatgaacatcttggaggacttctacaaccctgacgtgctctcccctgagcacagctacagcgcctcgggcatctaccaccagatcccgcctacctacgacctccacggctacctctcctacatcaagagcctcccactcaatgatatgcctgagatctttggcctgcatgacaatgccaacatcacctttgcccagaacgagacgttcgccctcctgggcaccatcatccagctgcaacccaaatcatcttctgcaggcagccagggccgggaggagatagtggaggacgtcacccaaaacattctgctcaaggtgcctgagcctatcaacttgcaatgggtgatggccaagtacccagtgctgtatgaggaatcaatgaacacagtactagtacaagaggtcattaggtacaatcggctgctgcaggtgatcacacagacactgcaagacctactcaaggcactcaaggggctggtagtgatgtcctctcagctggagctgatggctgccagcctgtacaacaatactgtgcctgagctctggagtgccaaggcctacccatcgctcaagcctctgtcatcatgggtcatggacctgctgcaacgcctggactttctgcaggcctggatccaagatggcatcccagctgtcttctggatcagtggattcttcttcccccaggctttcaacaggcactctgcagaattttgcccgcaaatttgtcatctccattgacaccatctcctttgatttcaaggtgatgtttgaggcaccatcagagttaacacaaagaccccaagtagggtgctatatccatggattattcctggaaggtgcccgctgggatccagaggccttccagctggctgagtctcagcccaaggagctgtacacagagatggccgttatctggctcttgccaacacccaaccgcaaggcccaggaccaggacttttacctgtgccccatctacaagacactgactcgtgctggaacactatcaaccacaggacactctaccaactatgtcattgctgtggagatccccacccatcagccccagcgacactggataaagcgtggtgtggccctcatctgtgccctggactactagactcagacagaagggctggggccattaaagctgaattttctaagc

SEQ ID NO: 18106 - protein, 892 aa, Homo sapiens
MEKDNGLDVFKLGDRDFLRSMENAIRFGKPCLLENVGEELDPALEPVLLKQTYKQQGSTVLKLGDTVIPYHEDFRMYITTKLPNPHYTPEISTKLTLINFTLSPSGLEDQLLGQVVAEERPDLEEAKNQLIISNAKMRQELKDIEDQILYRLSSSEGNPVDDMELIKVLEASKMKAAEIQAKVRIAEQTEKDIDLTRMEYIPVAIRTQILFFCVSDLANVDPMYQYSLEWFLNIFLSGIVNSVRADNLKKRISNINRYLTYSLYSNVCRSLFEKHKLMFAFLLCVRIMMNEGKINQSEWRYLLSGGSISIMTENPAPDWLSDRAWRDILALSNLPTFSSFSSDFVKHLSEFRVIFDSLEPHRELLPGIWDQYLDQFQKLLVLRCLRGDKVTNAMQDFVATNLEPRFIEPQTANLSVVFKDSNSTTPLIFVLSPGTDPAADLYKFAEEMKFSKKLSAISLGQGQGPRAEAMMRSSIERGKWVFFQNCHLAPSWMPALERLIEHINPDKVHRDFRLWLTSLPSNKFPVSILQNGSKMTIEPPRGVRANLLKSYSSLGEDFLNSCHKVMEFKSLLLSLCLFHGNALERRKFGPLGFNIPYEFTDGDLRICISQLKMFLDEYDDIPYKVLKYTAGEINYGGRVTDDWDRRCIMNILEDFYNPDVLSPEHSYSASGIYHQIPPTYDLHGYLSYIKSLPLNDMPEIFGLHDNANITFAQNETFALLGTIIQLQPKSSSAGSQGREEIVEDVTQNILLKVPEPINLQWVMAKYPVLYEESMNTVLVQEVIRYNRLLQVITQTLQDLLKALKGLVVMSSQLELMAASLYNNTVPELWSAKAYPSLKPLSSWVMDLLQRLDFLQAWIQDGIPAVFWISGFFFPQAFNRHSAEFCPQICHLH

SEQ ID NO: 18107 - DNA, 2993 bp, Homo sapiens
  CDS (569)..(1174)
ttaggtcccctcaatggggacacagctataactgtccagctctgtgcatcagaggaggctgagcggcaccagaaggatataaccagaattctccagcaacatgaggaggaaaagaagaaatgggcacaacaggtggagaaggaaagggagctagagcttcgagacagactggatgagcagcaaagggtcctggaaggaaagaatgaagaggccctgcaagtcctccgggcctcatatgaacaggagaaagaagcgcttacccactctttccgggaggccagttctacccagcaggagaccatagacagactgacctcacagctggaggctttccaggccaaaatgaagagggtggaggagtccattctgagccgaaactataagaaacatatccaggattatgggagccccagccagttctgggagcaggagctggagagcttacactttgtcatcgagatgaagaatgagcgtattcatgagctggacaggcggctgatcctcatggaaacagtgaaagagaaaaatctgatattggaggaaaaaattacgaccctgcaacaggaaaatgaggacctccatgtccgaagccgcaaccaggtggtcctgtcaaggcagctgtcagaagacctgcttctcacgcgtgaggccctggagaaggaggtgcagctgcggcgacagctccagcaggagaaggaggagctgttgtaccgggtccttggggccaatgcctcgcctgccttccctctggcccctgtcactcccactgaggtctctttcctcgccacatagggtgcagggcctgggcccaccacgacgcctgaagtcacagctccttccaaggtttttctggagaagacagcaggagcctctcagttcttttccaggaaggaacgagggtgggagcgagatggagatcctgggtgtgtgcccagtgagccctggggccttgagttacatggaatcacccacagggttttggaggccccgagaagcgtcttcccttgagttggccaagggaataagcaagaggagacatttcctccctgccccagcactctgtcccaatccgagaagttccgaggctttcccggggcagtctgtgtcacgctggccatttgacataaaggagacagcccctggtcccagcttgtcagctctgctgccgacttgctgacttatcaacttcctctaggtgtttccactccaccctggcctgctcagagcctcagtttacccctgcattaaaatggtggggggactggtcaaaggactcttatgtcactgcagtgtcccattctaggattgtctgaaggccagagtaggggttggggggagtgtggacaaaccccgcaaatcagagtggggaaggtgagtggtagagagggggtctctgaaggcccttggggctgacagggccaggcagcctccccagctgaggcatcattcctgggccagagtcgtgtccaccaagggacagtagccagagctcctcttcctttaccaggcaaggtgcatcccctcagccctcctggcccttcagtcttggtgccacctgggcacaggggcaagcttggtggttgtgagtccattcatctatcagagctggaacctcatccctgcacagatgaggaaaccaaggcatggagcagttcccagagtcgaatctagttctcatctgtcatccgggtcttatcctttgctctgtttttctcttcaggctctggaaaatcagatctgtgacttaatcttcctctccctggccctcacccacttagtttctttttcattcctgctccctgccttaactcctcctcccactgcccctgatcccaggcccaggcttttacaacctggtgctcagcttccccatcagtgaaaaggggtggctagagtaactaacctcagcaggccgtccagtcctgatagtctgtggatttcggatccttctcaggaagcttcatgtctaatggagactataattataactcctgttctgcgtagagcatttgcatcaaaggctttccatacccctccctcccctggtcctcataagatccttgaagcaggttcctattcctcattggcaacatggcaaacagatcacaggagtcaaagggccttgctcaaggtccccagcttcagccccaggccctaagccagcgtcagaacagtcaatctgcatttttcatcagtcattctatagtgacatcatcccagactgccttctgtattcccctgtgtacagtctccttctgtttctaggtttagaagttcagaggtgactgtgtttctccatttccacagccaaatgggggaagaggtgaggctaggggagtgctgtgctgattctccagccatggtcagacaggtcacccaggagcctcgaggaaagccctggagggaatcacatgtgtactttttcatgaagctttttgcaaagcacatctgcgatacactagtttattgaactaatgtccaggagtagacgtgattggtggccaagttatttggggacacctaaacagatcagtgacctgaatgacttctcagaacctttaatatgccaatgtgtgtggcaaacttacaagaagggagctaagtatccagcctctcccaaacctctttgaacaaagcttctgtccctcccacacctctcacctcacaggcacatcaggctgcagaatgcgctttagaaagcattgttttagtccaggcacagtggctcacgcctgtaatcccagcactttgggaggccgaggtgggtggatcacaaggttgggagattgagaccatcctggctaacacagtgaaaccctgtctctactaaaaaaatacaaaaaattcgcttggcgtggtggtgggcgcctgtagtcccagcagcttgggaggctgaggctggagaatggtgtgaacccaggaggcggagcttgcagtgagccatgatcgcgccactgcactccagcccgggtgacagagcaagactccgtctc

SEQ ID NO: 18108 - protein, 202 aa, Homo sapiens
MRTSMSEAATRWSCQGSCQKTCFSRVRPWRRRCSCGDSSSRRRRSCCTGSLGPMPRLPSLWPLSLPLRSLSSPHRVQGLGPPRRLKSQLLPRFFWRRQQEPLSSFPGRNEGGSEMEILGVCPVSPGALSYMESPTGFWRPREASSLELAKGISKRRHFLPAPALCPNPRSSEAFPGQSVSRWPFDIKETAPGPSLSALLPTC

SEQ ID NO: 18109 - DNA, 3233 bp, Homo sapiens
gcaggtagaggaatgaattagatcccgaacctgaaatctggatgaaatcacacaaacatccacaggacaaacaaggtagcctgcattaagttgcctgtaagacttctgactctgaattcttccctgggagctcaatagcaggtgttggggctgctccaagaatggagagggcagtatgcatacctcagtcctaccaaccaagaactgaagtaggaagctgtgtccatgctcctgacatgagaaagtcttgccaatagaaaaagagggggaaagacagagactagctcaggtcacaggggtgagtgtgggcaacttacccagggaggacataaatgccaggttctccagcgtcacatcacgttacaggcatctctgagcctcactaaggagattccattcctcctgggtaaatttcacagccacgtcttcaaaagtcactgtgccctgttatgatgttgacagatgaaaccacaaaccacccctatgctgaggtatcacaatccatctctcccacacatctactctcgcacatcctcctctcaaggtcctcaaacataggagaaactaggcccactggtcatggggtacagccaccaacaacaatagttagttgaacaaataggtatctgtgcggtggctgtgatataagagtccaccccctcctgacaggcacttcccctagtatggccgaggtcatggaaagcccaatgtggcaccttcagcacagcagagataccctctctgaacgcacctcattctttttttttttttttttttttttttttttgatacggagtctcgctctgtcacccagggtggagtgcaatggcgcgatctcggctcacgcaacctccgcctcccgggttcaagcgagtctgctgcctcagtttcccaagtagctgggattacaggcatgcgccaccacgcctggctaattttgtatttttagtagagacagggtttctccatggttggtcaggctggtctctacctccggaccaacccgcctaggcctcccaaagtgctgggattacaggagtgagccactgcacccggccccaccctccactttcttgtatgcgttccttaaatgcttctacagccataaaggcctgagggaagaggctgactttacaggactgtgtccctgataggatctggtaagctcaggcctccctgaacgcttttgtgtccacggagccaggtgaccttggactattgtctaacctgcgtgtctcagcacaaagtgtcatctctaccacctatatgatctacaaggattcaatctcaaagggccccaacgtcatcccctctctactctgttatttatttggcctttaggaaactttaaaagcctggactttgatccagtcccttctttcttggaaattctcctatttctagtgtcctcgcaatgatttcacagcccccagcctccttgcttttccaggaggagttccgcctcacaggttgttccctacaggcgcctgtggaccccaggttccatcctcccggatccgtccatctccaggccattgcccgcgcccctccctgtacctgtcgctctccccaccgcatcccacgggtgtctgaaacagggatccctcccgagagcgcctcagtgtcccgacgccgggtccgggttgcagagccgtaagcaggtgccgctccctcgctgctttaggacttgtgtgactaggaggtgaccggagagcacggaaggcgccacaattacctgaacggggaaccttagcgcggccgccgccatgggaccacgtggggtaagctgggttgagagcagcgggcgccgttaaagagctgcagagtcacgtctgtgcaaagagaagaacgactctcgacctcctggatccagtcaccaccacggtcccaacacagcgctccaaggactccctaacgccaatggaaatggtcgctactaaagggcgccgggagtcccgcctctaccttacttgcgcacacggaaacgccttcaatgtgaactctcactggctctgccgtgctgtcatttgacgcagagctttctgggtaatgtagtttcccaggttccaaggccgtaaagagagagattcccaggggcgcttcggaaggaaaagcccagctccacctccggggccctcagggaagcctcctgacccgcacggtggcgcgcgcctgtaatcccaaattttgagaggctgaggtgtcaggactgcttgagcccaggtggtccaggctgcactgagctatgactgcaccactgcactccagcctgggcgacagaacctgtctcaaaagaaaaagaaatgttaattaagcgttagtgctgttaagggaggagaccacctctcatattgttttatgcccaatttctgcctccaaagaaacaagtaaaaactaaaaggcagaaatgaaatccacaggcagacagccaggtgccaaccctgggcctggttaaagatcgacccctgaccaaaccggttatgttatctatggattccagacattgtatggaaaagcattgtgaaaatccctgtcctgttctgttccgttctgattaccactgcatgcagcccccagtcgtgtaccccctgcttgctcaatcgatcacaaacctctcatgtggacccccttagagttgtaagcccttaaaagggacaggaattcctcacttggggagcttggtagttggagatgtgagtcttgccaaagctccaggctgaatacagccctgcggcttgtcctgctacatttcttggttccctgactgggaagccaggtgattaacagatagtcgaggcagccccttaggcagcataggcctgccctgtggagcatccctacaggggactctggccagcttgagggacgcagaacctgagagcactcccgggtaggcaattgccccagtggaacacctcgccagagtggcgtgtggcaggccaccacagaggatcaatgcagcggctgaacactgggaaggaacaggcacttggagtccggacatctgaaacttggtaagactagtctttggaacttgcccactccatttgagtggaagggtggcctgatcacccacggcatgcctgtaccggcactttggtttttgtttttgacttgatttggattgcttgatactttcgttttggttttgacctggcttggatttctggatactctgatttgggttttgattctggtttggtgtaaacggtaaaagtgtatgtgtgcccttt

SEQ ID NO: 18110 - DNA, 5509 bp, Homo sapiens
  CDS (4563)..(5003)
atatcaacactctgccccctcttcctccagccctgtctccccagactcctctgtcagccccccacaagccactcccattcattctccctcaggggaagagccctgccaagatggccctgcagcttctctcaagatcctgctggcttgggctgggggaatacagactgaggtcaccctgggcccctgggctagtggtttctagcacttacggaggatttccctccatcgcgtgagttcttgggagaaggtggcaagatgctcaacttactgggcacaagagtcactgaatcggtgccctctagggttctttctcttttgccatcttatccatattttaaggggtttctctttttctggggaagaggagagtgagcgaattgggggtcaagggggaggtgataagagaaagaaaagaggacagggctgggcacagtggctcacatctgtagtctcagcgcttcgggaggccaaggcaggaggatcacttgagctcaggaattccagaccagcctgggcaacatagtgagacccccatctctactaaaagaaaaaaaaaagaagaaaagaggacaggaagaaatgaaacaatccctttagtcataattcagttttaaattggggtctgtcccccgcagccgtcattttatcctttgtaaaatatcttgtcctctactttctgaccccctttttggtcattttctgggatgaatgagcgcaggacagagaatttctgttgttaggaataatgacagtattctccgcagctctcctggcagtgataggtcctagtcctagcgcaggaatttgaagctcgattagatcaaaagaaatggggccaaagtgtttttgactcatgctcgatattgacacagtgggtgggtgtcagggttttgctgtccaggggcaacagttggaggtcgacacctgagaacgttaatttcaccctctgtggttgggtgatggatggtgggggttaggggattgggcaatgctcctgaaccccactgccagttccccttgacggcagaccccccactcactgtaccacagtgtggacagaggaaaaggtgtatctcgccctgaggatagcacagcattggctgttcaagctcctcctctctgcgccggtttttgcataggcggtctcttgagcatttcaagaaacttgttcttatggctttcctgctgcacccgggaagatgggctcattctgcagttggcaagccttgttgttgaacaggctaacaggtcaactcactgacacagcaagtatatctcaaaaggaaattattggccggccgccatggctcacgcctgtaatctcagtactttgggaagccgaggagagcagatcacttgaggtcaggagttcgagaccagcctggcaaacatggggaaacccagtctttactaaaaatacaaaaaaaaaaaaaaaaaaaaaaaaaaaaacaataaccaagcatcgtggcaggcatctgtaatctcagctactagggaggctgagggaggagaattgcttgaacccaggaggcagaggttgcagtgagctgagatcacaccactgcactccagcgtggttgacagagtgagactccatctcagaaaaaaaaaaaaaaaagattattgtagataaattagcaacaagacgtgtcttttaggaggtaaaaccaaatgccccatagcattaggaatgtttcagctgtcccttttgtaaaagtaacccttggggactgaagaaaatgcccacgctcccagaaggagaaggagaacatttcccaggaagcctggcatgctcacagatgtcctagagccctcacacttctcacaggaaccagttccccagcctgcagtgacaggtgaggatcacaaccctctatgtgggaattggaggcctctgttttccagctctgggaccccgggtgggtctttcatccttggtgttttgctttccccaattagcagcaaaggaaattcctgacctcaattagtgattggtcagatggcaccacgtttgtgaaattgcttgaggaaatacgtgccatcttttactaatgtcatagttaatctagcatactatcactggccatcacttgcatgaagtttaaattctctaaaaggcccgcaaattaaatcagagatgatgacgtaccctttgggaattacattacaacacctttctgtttctggaatgttctttatagaacagcgatgtgattgatctctgatgggcagcacggcctctgggtgagtgatggccgacagggctgggacagagagcttcgtaacatttctaggcagccagttctggctggtatcctggccactgctcacactctactgtactgggacatgccaaccattcctttctctgaagagcttcagcaaagcccaggcctcccaaatgatgtttatcaaccctagagagacaagtgaggtctagtggttcgagtcagcaagggtggggagccatgagggttcaggtgctcccctgacactcgggttttttcttctttcagggtcactgtgcaaatcatttaaggaaatctctccttctttctctctgcctgtctctccctccctccctccatcagctctccatgcatatacatcaagaaaccattctaccatctaagacagggcggagggaggctgtgctggttggttatttgtagctccttcagaatgagaagctgcacaggcaccaattataattggtaacttctatgctgaccccagagatgagaaacgttgtctgctagatcccagcagcctctgaagcccagagccaaggaacgtcttagagactttgcaggaaaatatttgaaagttcaaaatgtttagagtcgacattagacacttttccctctgaactcagagtggggacttcttgaattggcccccaatccaaacgtctttccttcttcctaatctttttttttctctccctgatgcagttcaccattttatttagagtcaaaggcagagtcaaagggggacagggacattgaagctttgttcccacaatatcagacagaagactgagtcacgtgtatcagccaagactcccagaccaaaatgttccagagtctggggactccttaaggtcagcccagagacctgactttgcaaagagagactctccccgacaatgcccatgtcctcccggtcctctccccaccgagtctgttaggtcgctgtgatattttccattctagaaagaatccggaccgggcgcagtggctcatgcctgtaatcccagcactttgggaggctgagtcgggcagatcacctaagatcaggggtttgacaccagcctggccagcatggcaaaaccccgtatctactaaaaatagccaggcgtggtggaccacatgtgtggtcccagctactcaggaggctgagggaggagaatcgcttgaacccaggaggcagaggttgcagtgagctgagatcgtgccaccgcactcccccagcctaggcaacagtgtgaaactctgtctcaaaaaaaaaaaaaaaaaatccagtagtttgctaaagcttccataaggcttccaggaatctagtctcctttaggaaggatgccttttgatctcatatttttgttttaagaatgatgtgtggcaagagttctggtatgacaagggggataagtttttcatgtgattaatgaggtccccaaaatatctggttgggccatcaatctaacctcagttagcaaattacagccaggccctaatgcagatcctattcttattacgatggcctttacataaattatctactttagttatcacaactctgggatgtgggttttaagacctccattttacaaacatgtatctgagaatcaggaaggtgaagggtcaaagtccgatagtgattcactgggaagagccaagattctaattcaggtctttttttttagacagtctcactctagcacccagcctggaatgagatcaggcagtggcgtgatctcagctcactgcaacctccgcctcccgggttaaagcaattctcctgcctcagcctccagagtaactgggactacaggcgtgtgccatcacacaagtctaatttttgtatttttagtagagacagggttttgccatgttagccaggctgttctcaaatacctggcctcaagtgatccacccacctcggcctcccaaagagctgggatggacaggcttgagccaccatgcccagctctaattcaggtcattctgacttcagagcccagacccttcacccagcactgaattggtctaggccttcgtgagttattgttacatcaccgtttgggagtgggctactttttattaaaacctgggtctccataacagagcgatgtagaaagaaaggaagtcatgggttgtactcgccatgcttgcttagagggtaaaactcaaccagatgggcgcaaatgataggctgtgtcaaaatgaaataaaaagcccttttccttccttctgcggcaagccaaaatccttcgagggcctggcagccaggattgttttatgaacaaggaaattcgcctgaggaagtcgacttcagtctgaatgcaaggaaaaaagttgaggttagcaaggaagcataagtcgaggaaaggcccacagggtagggaggaggaggaggaggaagacaattcacaccaggtgaagaaaacaagcgccatgcctcagtgtttcctccagcccgcagacttccatcgtgttaacatgaggtcggaagtcgctgtccttgccagtgtggacagcaacgtcgagggcagaggaagggcagagctgcaggcattcagacagccctggctggacagtaagggcccccaggcacggaaggtaggctgtacacggggcatccaggagtggtgggtccacacccctccatggccttcaccaccgcccccatgcctgctttctcctgtgtgggaaagaccttgggttccacaggccaggcaggaagctacaatggtgaacctcgcccagtccgtgtgtgtgctgtagacagtggccacagaaaggacagatgagcaagtgaccgtttctagttgttttcacgaagttctgtgtactggcaaagcctgttgccttcagcacactcacaaaaagttgatttcctgaagaagaaaacaagcaaacattggacacacgtgtgggaaatgcaaacaaacacattgtcactaccgaaggtagaaactggagcagataccttataaaaaccactgctttagccaggcgcggtggctcacgcctgtaatcccagcactttgggaggctgcagcgggcggatcacctgaggtcaggagtttgagaccagcctggccaacatggcaaaaccccgtctctactaaaaatataaaaattagctgggcgtggtggtggacacctgtaatccccactactcaggaggctaaggcaggaaaaccacttcaacccaggaggcagaggttgcagagagtcaagactgggacactgcactccagcctgggtgactgagactctgtctc

SEQ ID NO: 18111 - protein, 147 aa, Homo sapiens [sequence omitted]

SEQ ID NO: 18112 - DNA, 3403 bp, Homo sapiens
  CDS (220)..(1659)
ttcccccagcactgctccagcccctctgtcaccccgcccttcggctcccctcgcagtggtggcctcctcctttccagagacgtcccccgagagacacgaagcagcagtgagagcctcatcttctctgggaaccagggcagggggcaccagcgccctctgcccccctcagagggtctctcccctcgacccccaaattcccccagcatctcaatcccttgcatggggagcaaggcctcgagcccccatggtttgggctccccgctggtggcttctccaagactggagaagcggctgggaggcctggccccacagcggggcagcaggatctctgtgctgtcagccagcccagtgtctgatgtcagctatatgtttggaagcagccagtccctcctgcactccagcaactccagccatcagtcatcttccagatccttggaaagtccagccaactcttcctccagcctccacagccttggctcagtgtccctgtgtacaagacccagtgacttccaggctcccagaaaccccaccctaaccatgggccaacccagaacaccccactctccaccactggccaaagaacatgccagcatctgccccccatccatcaccaactccatggtggacatacccattgtgctgatcaacggctgcccagaaccagggtcttctccaccccagcggaccccaggacaccagaactccgttcaacctggagctgcttctcccagcaacccctgtccagccaccaggagcaacagccagaccctgtcagatgccccctttaccacatgcccagagggtcccgccagggacatgcagcccaccatgaagttcgtgatggacacatctaaatactggtttaagccaaacatcacccgagagcaagcaatcgagctgctgaggaaggaggagccaggggcttttgtcataagggacagctcttcataccgaggctccttcggcctggccctgaaggtgcaggaggttcccgcgtctgctcagaatcgaccaggtgaggacagcaatgacctcatccgacacttcctcatcgagtcgtctgccaaaggagtgcatctcaaaggagcagatgaggagccctactttgggagcctctctgccttcgtgtgccagcattccatcatggccctggccctgccctgcaaactcaccatcccacagagagaactgggaggtgcagatggggcctcggactctacagacagcccagcctcctgccagaagaaatctgcgggctgccacaccctgtacctgagctcagtgagcgtggagaccctgactggagccctggccgtgcagaaagccatctccaccacctttgagagggacatcctccccacgcccaccgtggtccacttcgaagtcacagagcagggcatcactctgactgatgtccagaggaaggtgtttttccggcgccattacccactcaccaccctccgcttctgtggtatggaccctgagcaacggaagtggcagaagtactgcaaaccctcctggatctttgggtttgtggccaagagccagacagagcctcaggagaacgtatgccacctctttgcggagtatgacatggtccagccagcctcgcaggtcatcggcctggtgactgctctgctgcaggacgcagaaaggatgtaggggagagactgcctgtgcacctaaccaacacctccaggggctcgctaaggagcccccctccaccccctgaatgggtgtggcttgtggccatattgacagaccaatctatgggactagggggattggcatcaagttgacacccttgaacctgctatggccttcagcagtcaccatcatccagaccccccgggcctcagtttcctcaatcatagaagaagaccaatagacaagatcagctgttcttagatgctggtgggcatttgaacatgctcctccatgattctgaagcatgcacacctctgaagacccctgcatgaaaataacctccaaggaccctctgaccccatcgacctgggccctgcccacacaacagtctgagcaagagacctgcagcccctgtttcgtggcagacagcaggtgcctggcggtgacccacggggctcctggcttgcagctggtgatggtcaagaactgactacaaaacaggaatggatagactctatttccttccatatctgttcctctgttccttttcccactttctgggtggctttttgggtccacccagccaggatgctgcaggccaagctgggtgtggtatttagggcagctcagcagggggaacttgtccccatggtcagaggagacccagctgtcctgcacccccttgcagatgagtatcaccccatcttttctttccacttggtttttatttttattttttttgagacagagtctcactgtcacccaggctgaactgcagtggtgtgatctaggctcactgcaacctccacctcccaggttcaagcaattatcctgcctcaggctcccgagtagctgggattacaggcatgtgcaactcacccagctaattttgtatttttagtagagacagggtttcaccatgttggccaggctggtcttgaactcctgaccgcaggtaatccacctgcttcggcctcccaaagtgctgggattacaggcgcaagccacccagcccagcttctttccattccttgataggcgagtattccaaagctggtatcgtagctgccctaatgttgcatattaggcggcgggggcagagataagggccatctctctgtgattctgcctcagctcctgtcttgctgagccctcccccaacccacgctccaacacacacacacacacacacacacacacacacacacacacacacacacacacgcccctctactgctatgtggcttcaaccagcctcacagccacacgggggaagcagagagtcaagaatgcaaagaggccgcttccctaagaggcttggaggagctgggctctatcccacacccacccccaccccacccccacccagcctccagaagctggaaccatttctcccgcaggcctgagttcctaaggaaaccaccctaccggggtggaagggagggtcagggaagaaacccactcttgctctacgaggagcaagtgcctgccccctcccagcagccagccctgccaaagttgcattatctttggccaaggctgggcctgacggttatgatttcagccctgggcctgcaggagaggctgagatcagcccacccagccagtggtcgagcactgccccgccgccaaagtctgcagaatgtgagatgaggttctcaaggtcacaggccccagtcccagcctgggggctggcagaggcccccatatactctgctacagctcctatcatgaaaaataaaatgtttgtctttgc

SEQ ID NO: 18113 - protein, 480 aa, Homo sapiens
MGSKASSPHGLGSPLVASPRLEKRLGGLAPQRGSRISVLSASPVSDVSYMFGSSQSLLHSSNSSHQSSSRSLESPANSSSSLHSLGSVSLCTRPSDFQAPRNPTLTMGQPRTPHSPPLAKEHASICPPSITNSMVDIPIVLINGCPEPGSSPPQRTPGHQNSVQPGAASPSNPCPATRSNSQTLSDAPFTTCPEGPARDMQPTMKFVMDTSKYWFKPNITREQAIELLRKEEPGAFVIRDSSSYRGSFGLALKVQEVPASAQNRPGEDSNDLIRHFLIESSAKGVHLKGADEEPYFGSLSAFVCQHSIMALALPCKLTIPQRELGGADGASDSTDSPASCQKKSAGCHTLYLSSVSVETLTGALAVQKAISTTFERDILPTPTVVHFEVTEQGITLTDVQRKVFFRRHYPLTTLRFCGMDPEQRKWQKYCKPSWIFGFVAKSQTEPQENVCHLFAEYDMVQPASQVIGLVTALLQDAERM

SEQ ID NO: 18114 - DNA, 4411 bp, Homo sapiens
  CDS (54)..(389)
tttttgtgctggtttttcctcatcttcatggatttatctacctttggtctttgatgttggtaaccttcggatggggtttctgtgtggattttttttttttttatgttgatgctattcctttctgtttgttagttttccttctaacagtcaggcccctctgctgcaggtctgttggagtttgctggaggtccactccagaccctgttttcctgggtatcaccagcggagactgcagaacggcaaagattgctgcttgttccttcttctggaatttttgtcccagaggggcacccacaagatgccagccggagctctcctgtatgaagtgtctgtcgacccctgctgggaggtgtctcccagtcaggaggcatgggggtcagggacacacttgaggaggcagtctgtccctcagcagagcttgagcactatgctgggagatccgctgctctcttcagagtcagcaggcaggaatgtttaagtctgctgaagctgtgcccacagctgccccttctaccaggtgctctgtctgtcccagggagatgggagttttatctataagcccctgactggggctactgcctttctttcagagataccctgcccagagaggaggaatctagagaggcagtctggctacagcagctttgcggagctgcagtggactccacccagtttgaacttcctggtggctttgtttacactgtgaggtgaaaaccacctactcaagcctcagtaatggcaaacgcccctccccccaccaagctcaagtgtcccagcttgacttcagactgctgtgctggcagtgagaatttcaagccagtgcatctcagcttgctgggctctgtgggggtgggatccactgagctagaccacttggctccctggcttcagcaccctttccagaggagtgaatggttctgtctcgctggcatgccagacgccactggggtatgaaaaaaaaaaactgcagctagctcagtgtctgcccaaacagctgcccagttttgtgcttgaaacccaaggccctggtggcataggcacctgagggaatctcctgttctgtgggttgtgaagaggatgggaaaagcgtagtatctgggtcagagtgcaccgtccctcaaggcacagtccctcacagtcccttggctaggagagggagttccccaaccccttgcacttcccgggtaaggcaatgccccaccctgctttggctcaccctccgtgggctgcacccactgtctaaccagtcccagtgagatgagctgggtacctcagttggaaatgcagaaatcacccactttctgtgttgatctctcttggagctacagaccagagctattcctatttggccatcttgccagccaccgttttgagattttttttatgtttaaatctttgctccatctagcatttactttggcataaatatgtcttcaatatagaagtttaactttctttagtgaaatctacgtatcttttcttttatgatttctggcttagatattctggtttgtttcttggaatgaaatttcttgggaagaacgtgaggagtgagctggagtaggacacacccaggtggctggcaagaaacccctctgaagaagtctctctctcagggaaaggtccataattttccattccagttcagctcagtcaacatctactaagaacctactctgttccagagactgtgttaagtgccaggggcacagagatgaggaacatctctgcttgcaagtgggagtgacaaatttagaaacagaatgacgacacagtgtggtaggtgcaatgagcaaaaagcataaggatcagtgagcacacataagggtgcctatcccaggctggaagggaaaagcctatctgagaaggcctcctggaggagatgaatcctgggccgagtttgtttttcccatttgaataactagaatattagaataagaccattcaataaagacaattctgaaatcaccttccaattaaaacaactcttactttgtaacttcatgttgcttatatgacataatgcacagcatattacctgctaagatacacactttcaatatcattggaaagacagaactggaacagaaagctgccttaatcaacaacagaatatagctcccagaccaagggcgagaggtctccagtgtagggacaacctggtgcacagcgattacgagagaaggctaaagtggaaccctaatttctccatgcagctaaaagcagtttactatttctgaaactcaatctagaaggtagggaactttaagataggagactggttgctttctatgacagtcagggcaagattgtaaaggggcttatgctttatgtaaagaatgggacatgagaaacactgaggtgttgtaagttgaggggtgtctgatctgacaaaacaacttggaaatcatcagcatgagatgagattgcccagggatatcaggttgcagaggatttaacctttgcagatccttgatccctttgaggatgtgataaaagctacagatgctctttccagaaaaacaaacatactgaaaaccacaccaacatatacacaatttcaggggatcctcagattaagaatatttgatatatagaggactgagaagtagcctgaggaagcggatattcaaaggatgggaagaagatgaggggagcaggaaaagggccaaagaaaaatgacccaagaggtactggaagagccaggagacaagtgttgggaagctgtgggagcacagagatccaaggaggatgtgatcagcagtgttgaatgctgtagagatgtcagctaaggtcaggactgaaacatgtcttttgcacttacagttaagaaatcacagccgatagaagtggctcacatctgtaatcccagcactttgggaggccaaggtgggaggacgacttgagcccaggagtttgagaccagtctgggcaaaaaagcgagacgccatctctataaaaattttaaaaattagctgggtgtggtggtgtatgccgtagtcccagctacttggaaggttgaggcaggagtccagaagttcaagtttgcagtgagctataatcgtgccactgcactccagtctgggtgaaagagcgagaccccatctctaaaactaaaaagaaagaaagaaaaatcactggtaatggtattgagaaaagtctctgcggagtaactagtaatgttagctccagatatactttttcaagcccgagaattatataggtggcatctaggtggaagtaagggtaggggacttgtcttgaccctgcatttgcagagaactaatacgtcaaataattgtcaattgtccagaaaaagtgttgaaggggcttatggagattatgtctgtttgtccctgttgccaccactataatggagtcaaaagccagaaagcaacagttgaaggaatgatgtgaggaaatggagaagtttggtttgttaggtaggagagacctgaagggcagttaaaataagaaacaaaaacaagacagggatttgtctccaagaagtggacacatcctgatatttctatcctatacactaagaaaaagaaaggggaaaacagagaggctcaagacacagagaaaagtggctgaagggccaagcatccaggaagagagtctggacttgaagaggaggagagccccccacctggaagtgcaaggtggggggcctgtggctgtgtataatttcctccaagtatgaattgaagtggatcagccccaatggcctctattttccccataacataagaggtgaggttgactgctgagagtagagatgggagttgtatggaagactggaggaggacaatgcctattttttagaatcactgatgagggatgtatgggaaaggcagctaaacaaggacaaattaaagaacagctcagcaggctggtgatggagcagtgtcagtcatggtcccgacaagaagcagatggcacattcaagtggtgtaactgaggagcatgtcaggaagagaatattcaccaaggtgtgaacagggtgaagggaaactcataaaggccagtgaagcaccctggaactagcaagagtggggagcctttcccacccccagacctcaggggcaagaggagggagcagatcccagatccagagggaattggggtaatttaggagagggctgccacactggaactcatacagcacagatgctgacattatctgaagccaggcagccctctctgtctccaggttctggtgactgctccatcctcttgtcccagtcccaggggattctgctattacttgtggtttcactatactctttctatacttttataaatataactttattagattatccagtttgaatacaccatctatttcctgaaggaaacctgacatacatggttctttaaaaagactaataaaatagacaaactctag

SEQ ID NO: 18115 - protein, 112 aa, Homo sapiens [sequence omitted]

SEQ ID NO: 18116 - DNA, 2891 bp, Homo sapiens
ttttaacctggaggatgcagtgaaagaaacttcctcagtaaagcagccatgggaccacaccaccaccaccacaaccaataggccaggaaccaccagagctccggcaaaacctccaggtagtggattggacttggctgatgctttggatgatcaagatgatggccgcaggaaaccgggtataggaggaagagagagatgaaaccatgtaaccaccacgaccaagaggccagtaaccaccagagctccagtaaatactttaggaaatgattttgacttggctgatgccctggatgatcgaaatgatcgagatgatggccgcaggaaaccaattgctggaggaggaggtttttcggacaaggatcttgaagacatagtagggggtggagaatacaaacctgacaagggtaaaggtgatggccggtacggcagcaatgacgaccctggatctggcatggtggcagagcctggcaccattgccggggtggccagcgccctggccatggcactcatcggtgccgtctccagctacatctcctaccagcagaagaagttctgcttcagcattcagcagggtctcaacgcagactacgtgaagggagagaacctggaagccgtggtatgtgaggaaccccaagtgaaatactccacgttgcacacgcagtctgcagagccgccgccgccgcccgaaccagcccggatctgagggccctgtccagctgcaggcatgcacaatggtgccaccgcttgtcacccggctccccccaccccttcatttggacccgcagctgctgtgctgctctgtgccatcggctccttgttggtctgagtttcccggatgagctctgggtgtttgtgagtttggtttctctgccctgccccaagcgtgctgagacttggtgccgaaattcaagagccagctctgatagaaagccagcaccagcctcgggagctgctgagccaccaactcccaaagccagcctgcctccagctttactgtgcacaggatgcgggggccaagatgatgctgaggcctgatgacatttatgcttagaggacaagagtttgaactcaagggactgtgacccctgcacactggagtggctcattgtggcaggtttctgccaatagacagcccctgacagtggcctcaaggagctgcaggtggggggctcagcctgcacccacttggagcccctgcaaggagcgaaccggtcagcaccaagtaacaccacacacacgcagcacccaggatgatggtttcacttcagtcttccccatcccaggttttatgttgctgggcttccggagagccggtccaagcggaggctttcagtgatttaagtacaaacatgcatctcgtgatagtcctgccttgagagcttaggaatcttccggataagtatgaagcaattcgtaggcctgtttcccatctgattccatagggggctgggtgtggccttcgggttgacatgagaaaggtctttagcaatcatttctgcaccggagatgagttttatcctgtgttgaggagaggtgctcaccctccaccctgtgtccctgttttggtagcaagagtgaccgatgtcaagaacgagcatcaaagccagaatcctgcttgtttgcttaaaaatgtaattgggggcggcgggggaggagaggggaaagagacattcgcttggtttagtgaaacgcaggtgactttgtagctctgtggccagcctacttgtctgctctgagggagagtgcgtggggagccatgctcaccgtggcaaacacaggaaccccatgactcgcccctcacctggcgtggagctgcctggtttgggctggagcagagctggtttcctggaatgttcctttggcccacatatggttctgtcccggtgagctctgttgtcagaggctcacgggacagaaccacatgctagggtctagggcccctatctactgatagtcagtttgctgtgtcagaaagcacttctgaaagcagatatgagtcaccagacaggcaggatcttacaaaactcacgggcctctttggtctgcatgatggccccatgcgtttcataggctgtccactgagcgggattgtctgctgagtgggatgagccaactccagtttcttaaggaaaccactggaatctgcagcccccacatgcatctgtctaacgcatgcctcgtgttcgttttgcaaacatgcctgtggtggagggtggtcagttgtagccctgtgcgtctcaaggctgccttgtgaggccattcccagtgcgtgcccttgagctccttaccaccccttttcctgctcggccctttaatccctgacagacctggactgtgtggctgaagggggacctgcagcactgcagaaatgcctctgcgtggtgccatgaaggaaagaaaccttggcctggtctcgagaagcttcccatgcttcaggaagttagtaagggtggggtggcttgcaggattggcctgtttccagggcctcccacactcattggccagattgtgaactttgtcaggcttgtccctcccttataccaagtatgtcgagaaccgatggccccaccctctggctggtgctgggccggaggtggctatggaggattttggcatgcgtggcctgtcgccacctggacagcgtgacctcaggggttgtccactttacctttatggtgaggcctgtcggatggctaagtccttgaaaccctagagctgtgacgtagaatatgtgctgtctgtgagaccgtgttcagtcccagggccctgaggaagaaatggggactgatctcaaaattccagaattccctgtacatctgttcacgtgcttgtgtccaggtgtgacttgtaaactgtctagtgtttgcattaaataaaatggcaccgagcag

SEQ ID NO: 18117 - DNA, 3003 bp, Homo sapiens
  CDS (23)..(2806)
tccgaaagatggacagccttgcatggatcatgatagacaaactggagagggtgttggacctcaggaatatactttactcaaattgaaggtgcttgagccatacccatctaaattaagtggcctgaaaggtaaaaatattttcttggtggctgctactctcagacctgagaccatgtttgggcagacaaattgttgggttcgtcctgatatgaagtacattggatttgagacggtgaatggtgatatattcatctgtacccaaaaagcagccaggaatatgtcataccagggctttaccaaagacaatggcgtggtgcctgttgttaaggaattaatgggggaggaaattcttggtgcatcactttctgcacctttaacatcatacaaggtgatctatgttctcccaatgctaactattaaggaggataaaggcactggtgtggttacaagtgttccttccgactcccctgatgatattgctgccctcagagacttgaagaaaaagcaagccttacgagcaaaatatggaattagagatgacatggtcttgccatttgagccggtgccagtcattgaaatcccaggttttggaaatctttctgctgtaaccatttgtgatgagttgaaaattcagagccagaatgaccgggaaaaacttgcagaagcaaaggagaagatatatctaaaaggattttatgagggtatcatgttggtggatggatttaaaggacagaaggttcaagatgtaaagaagactattcagaaaaagatgattgacgctggagatgcacttatttacatggaaccagagaaacaagtgatgtccaggtcgtcagatgaatgtgttgtggctctgtgtgaccagtggtacttggattatggagaagagaattggaagaaacagacatctcagtgcttgaagaacctggaaacattctgtgaggagaccaggaggaattttgaagccaccttaggttggctacaagaacatgcttgctcaagaacttatggtctaggcactcagctgccttgggatgagcagtggctgattgaatcactttctgactccactatttacatggcattttacacagttgcacacctattgcaggggggtaacttgcatggacaggcagagtctccgctgggcattagatcgcaacagatgaccaaggaagtttgggattatgttttcttcaaggaggctccatttcctaagactcagattgcaaaggaaaaattagatcagttaaagcaggagtttgaattctggtatcctgttgatcttcgcgtctctggcaaggatcttgttccaaatcatctttcatattacctttataatcatgtggctatgtggccggaacaaagtgacaaatggcctacagctgtgagagcaaatggacatctcctcctgaactctgagaagatgtcaaaatccacaggcaacttcctcactttgacccaagctattgacaaattttcagcagatggaatgcgtttggctctggctgatgctggtgacactgtagaagatgccaactttgtggaagccatggcagatgcaggtattctccgtctgtacacctgggtagagtgggtgaaagaaatggttgccaactgggacagcctaagaagtggtcctgccagcactttcaatgatagagtttttgccagtgaattgaatgcaggaattataaaaacagatcaaaactatgaaaagatgatgtttatagaagctttgaaaacagggttttttgagtttcaggccgcaaaagataagtaccgtgaattggctgtggaagggatgcacagagaacttgtgttccggtttattgaagttcagacacttctcctcgctccattctgtccacatttgtgtgagcacatctggacactcctgggaaagcctgactcaattatgaatgcttcatggcctgtggcaggtcctgttaatgaagttttaatacactcctcacagtatcttatggaagtaacacatgaccttagactacgactcaagaactatatgatgccagctaaagggaagaagactgacaaacaacccctgcagaagccctcacattgcaccatctatgtggcaaagaactatccaccttggcaacataccaccctgtctgttctacgtaaacactttgaggccaataacggaaaactgcctgacaacaaagtcattgctagtgaactaggcagtatgccagaactgaagaaatacatgaagaaagtcatgccatttgttgccatgattaaggaaaatctggagaagatggggcctcgtattctggatttgcaattagaatttgatgaaaaggctgtgcttatggagaatatagtctatctgactaattcgcttgagctagaacacatagaagtcaagtttgcctccgaagcagaagataaaatcagggaagactgctgtcctgggaaaccgcttaatgtttttagaatagaacctggtgtgtccgtttctctggtgaatccccagccatccaatggccacttctcaaccaaaattgaaatcaggcaaggagataactgtgattccataatcaggcgtttaatgaaaatgaatcgaggaattaaagacctttccaaagtgaaactgatgagatttgatgatccactgttggggcctcgacgagttcctgtcctgggaaaggagtacaccgagaagacccccatttctgagcatgctgttttcaatgtggacctcatgagcaagaaaattcatctgactgagaatgggataagggtggatattggcgatacaataatctatctggttcattaaactcatgcacattggagatttatcctggtttcttaggaatactactactctgattgtgtctactgattggctatcagaaccttaggctggacctaaatagattgatttcatttctaaccatccaattctgcatgtattcataattctatcaagtcatctttgattcctggacctaataaattttttttcccttt

SEQ ID NO: 18118 - protein, 928 aa, Homo sapiens [sequence omitted]

SEQ ID NO: 18119 - DNA, 2869 bp, Homo sapiens
aacggactttttcagagagggaactatctctttgacacaaaacatacgttttaattaataatacttgctctggtaatatagtttcttatgagttgctacatattttctagaatagattttccctaaaatatgcctttgtaagatttttttaataaaatcaagtttagaaataatttgaacttttttgggggatagagtttcagtcttgtcgcccaggctggaatgcaatggcacgatctcagctcaccgcaacctccacctcctgggttcaagtgatttttctgcttcagcctcccgagtagctgggattacaggcacgcaccaccacacctgtctaattttggtgtttttagtagaaacggggtttcaccatgttggccaggctgatttctagttcctgacctccggtgatccacctgcatcagcctcccaaagtgttgggattataggcgtgagctaccgtgcccggcctgaacttttttttttttggagacggagtctccctctgtcgcccaggctggagtgcagtggtgctatcctggctcactgcaacttccgcttcctgggttcaagcgattctcctgcctcagcctccggagtagctgggattacaggcactccgccgccatgcccagctaatttttgtatttttagtagagacgggatttcaccatgttggccaggctggtcttgaactcctgacctcaagtgttctgccaccttggcctcccaaagtgctgggattgcagatgtgagccacgtcatctggcctggcctgaacttttagaattcaatattaaccattttcccctagtttattccctagagctcttcacaaagtatggcttgacttctctgagacagctagtgataagaaaaatgaagtttattttggtataccactcaaaaagattgtgaaaacaaaatggagattaattttttttttccaaactctttgtaccacaattttaagttgaatagctgacttcctaggcatggataagatcagttctatcttatcttctgtcctagtaatgtgtctgcagtggaatccccattgcttggcttctataattgatcttgaaccttcccaattatcattccctgaaaaaataattctacttaaataccttcttgacttaaatgtcatgagttgctacatctgggttctgataagatttttctaagaaaaactacatttgacatgtgacatcttcaggaattcaatatcttgtttctttgacagagggacgctattcatgtctgtgaatttggcagtctttgaaatgccatgtcttttttggaaaaagcttttgatggactttattttgatatacatcttaaggtcccctgacctatactataagcagagcatagcaaagagggtcattatgaacattgtgtgtagttctgggcagggcttgggatcctttgggattgttggtatctacaccacatggccccaccctgctatgttttaaggttttctgctgactttttaggtcttcagccttgattttgatgctttgagtgcctgcctctagcagcaccacccccagcccttttccagttggctgcatctcatctgttgtgggctaagaaaccagatcacagagcttattaaaattgtgtctaaaataagatccagtaggctcttgactgaagagggcttcatgtgctctgtgaactgtgtggtttccttggctgatcggagacctttctgacttgcttcctgtttttcttctttacttttgctatacagatgtaggaggctttttggtgctcttagagtgctgtaatgttgaagtatttggttaatttctctattcttgggaagggtaaaaggctaaataaatatcttgattctttgaggagttgaagactgaccagagttggatactaaaagcttttcttaacagtaatagtgcattgtacattttaatggtgtcctactagttgcagataacgtttggcatacatagctttcaaacaaagtaatgccaggattatcacttgatctatttctgtgatagagattttttttctttctttttttttttttgaggcagtcttgctcaggctggagtgcagtgtcatgatcttggctcactacaaactctggctcccagggtcaagcagttctcttgcctcagactcccaagtagctgggattgcaggcactcaccaccatgcccagctaatttttgtatttttgatagagacagggtttctccctgttggccaggctggtcttgaactcctgacgtcaggagatccgtccgtctcggcctcccaaagtgttgggattacaggtgtaagccactgtgcccggcctatggctagcttcttttaaggcgtctcaagacaaagttctcaatgaaataaagatttcaggtcatgcacagtgggtcacgcctgtaatcccagcactttgggaggcccaggtgggcagatcgcttgagctcaggagttcgagaccagcctgagcaacatgacgaaacatggtctttacaaaaaatacaaaaagttagctgggtatggtggtggatggctgtggtcccagctaggtgggaggctgaggtgggaggatctcgggagcctgggaggtagaggctgcagtgaaccgtgatcaggccgctacactccagcctatgcaacagagtgagaccctgtctcaaacaaacaaacaaacaaaaagatttcaaactctgatgtctataaaagccaggcaggtaccaaagtgagcagagagaacttgagggagctagaaaatgcatgtgctatcagatgagggcaactgctaaccagctccctgcaaatgttgctattgctaaaatctgtgggcccagtgttgcaatatcttccattc

SEQ ID NO: 18120 - DNA, 3149 bp, Homo sapiens
taatgaggaatcaaaggaagaagaagaaagagagaggaaggaaggttggaaggaaggaaggagggaaaattagaaggggaaaccatgattgctggtgaggttttgagcacattttcctgcaggctggtatgggtgagaggtttggtcttgtttgcaaatcttctgaaggccattccagaggagcagttgccactgccccatcccctgagctctgagcatgggggttcccctggggagactcctggtgagaggatgccgatttctgctgatctgtcactgggtaccgaggactgggtgtgtttaaggcagacagccaggtgaggatcccagctactggggcctgctgtcatctcctgggagtacccgggggtcaggagcctaggggactcttgcacttcacatccagccatgctaattacactttttggcaaaggaaacagctaggagcagtttctttcactcctacagccccgttttctcagtgtttagacctcgaattattactgggctagagggaaggcagcctctgaagtgtggcaggaggaggggaagtctgcctgcatcttggtgtgtctgtcagatgccagcactaataacctggcttctgtgaggcctgtcagtgctctcaggaatgaaaggggacccctgagaggtgctcggtaccagcaggctgtgaatgctctctacccaccaccctcacctcctcgttaaagatggtgctatctgccacacagcagacatctggtcgctgcacacccgaaagaccccaaggcagtctgccccttgtccagccacacgccagcacccaccctcctggcccctgcctcggcctccccagaccagctgcacccagcccccaacacgcaccccttctccagatgtgtgcagggcctcattttgcagagcaaagacagatgtttcagccacacgctttattaacttctaaaacctgtgctcaggacactcttcaacagtcatgaaaagtttgatcacttgccacagtcaggacctttgtgtggggctctgatctgatgttcggtctcatcatctcccaaaccagcagtcgtttgtaccccaaccctctgctcaggggctcatacccccaaatgattttcctgatttatgtatttccctacaaagggctttctatacctagcatctgcctccagcatgagaagggggaataggtgagacccatttgccagtagcagacggggaccctggggagaaaatggcagagcctgttggagactccctgtctccagctgaccagccaatgggattcctcttccctccactgtctcccacaaagtagaagaatcctggtacatttagcccatgagcctggcacagatccctatctagacatgaggccctttagacatgactttggcattgaccagcctgttggcaatgggtcggggaggcagaggggatgctcacaccagtaattctcatcccctgaatgcttgggatcacctggggagagttcacaaaaaactggtgcaggggtcccacctctgatgatgctgagtggtgggtctggggtgtggcccaggcatcatgatgtttcaggcccccaggtgacttcttaggcagcccagctaagcccctagagccttgcaatttcccccaaatgacctcagagggcccgatttgagggaaatgcctaacttcaggggccgtaagaatcccccagggagcatgtgaaatgcagataccaggcccacccccagagatgagctgaggtgggtcaggggtgaagtgcagggatcagtgtttttcacaagctccatacctccaggaaatggtgttgtggttgggcccgtagaaaacattctgagagtcctgttgcctgtgccttggtgcacgtggggtggaatcccagtggccctgccttgaggaggatgtgcattaacgtggtaggggagacagagacagctccacctgccccctgtcccaccggggacctccaaaaacttcatggatgttagagcaagcagccatgctgcagcagaggatgaggctggcggatttagtaagagccctctgtgtttgggctgagttctttctctagttgccctgtcatctggcctctggataacccacctctcctccctcatcctaaaattacagatggcgaaagacggccacatttagtgagacccctaaggtcctccaactagggtgggtccacagtggcccctggtgcatggaccacacactctcttccctcctctggctcaggactacggtctgaaattagggagatatgaatgtctttcttgaaaacttctcttcccagtcttcccactttgcttgggggtccttggtcaaggccagctttggggactagggcttgttgcgactaccagctgtctcattttgctgtactgcaaactcaggcttggttccaagcttatgggggccctgtccttcccctagtagggtttgttttggggtcacatctggtcatacccttcagagagctcttccccagcctctacatcagggagagaggtaggtagggaggagcattcaaggattagaagaaggactaaagtacaacagccttggaggaactgccaggaactaagggcgagcactggagaaggcaacctgggacccccctgcgcttctgagcaggaagaccaagaccttcaggggccctaagcactgaaaacatcattcctcatccccaagccctggcatccccctgttcttctaaaataattcttttctaggtatttctgattgcaaaattctggatgggttcatccaagctgacctttgctgtttttccccttcccaacaaggcctcactttttggagccaccttagctggtgcctaggcagaggggcagtcagcagtggttatcaggatcctggctctatgggttgccttcctcctggtctgtaaagcccctgcaggcagggacttcttagatagctgcttccttagggcatggcatgtagtgggtggttaatgaatgtaagagagggaatgagtgatcaagggagggaggagggagtggagtggagatttctcatcctttcctgttaatttatgacatcctcctgcctatgagtccttgactctggagttttacaaagcagtcacatttcaaataaaagtctgggaaagcaac

SEQ ID NO: 18121 - DNA, 4227 bp, Homo sapiens
  CDS (448)..(1914)
cctaaattcctttatattgccttagtattaaggataatattatcttgcataatcttcctctgaaatatttattacttcccttcttaatgatttggaaaagcagtgtattttagataatatcttcttacagatactccaagtatcacagctaaattaattagtgaacaaaaagatgacaaagaaaagaaaaaccatgaagagaaagaaaaagttaaagcggaaaatggatttcaagacaattacagtgttgttgttgcctctgggctgaagtctcaatctaaacgtgctgtgtcagctacaccacctcgcccaccatccaggagggggaggacaatacctgataaaataggaagtacttcaggagcagaggctgccaacaaaataattactgtcccagtgtttcacctgtttcacaaactcttggcaggccagccattgccagctgaaatgacacttgcccagcttttaactctcctatatgaccgaaaacttcctcagggttaccgctcaatagatctgactgttaaattgggatcaagagttataacagaccccagtctatcaaaaacagattcttataaaagactacaccctgaaaaagatcatggagacttacttgctagctgtccagaagatgaggctctcactccaggtgatgaatgcatggatgggatactggatgaatctttgcttgaaacctgtccaattcagtcaccattacaagtttttgcagaaatgggtggactggctcttattgctgaaagactacccatgctatatccagaagtaattcaacaggtgagtgctccagttgtaacatctaccactcaggaaaagccgaaggatagcgatcagtttgaatgggtgaccattgaacagtcaggggagttagtttatgaagcaccagaaactgttgcggctgaacctccacctatcaagtcagcagtacagaccatgtctcccatacctgcccattctttggctgcctttggaatatttcttcgtcttccgggctatgcggaagtgctactgaaagagagaaaacatgcccagtgccttcttcgattggtattgggagtgacagatgatggagaaggaagtcatattcttcaatctccatcagccaatgtgcttccaacccttcctttccacgtccttcgtagcttgtttagcactacacctttgacaactgatgatggtgtacttctaaggcggatggcattggaaattggagccttacacctcattcttgtctgtctctctgctttgagccaccattccccacgagttccaaactctagcgtgaatcaaactgagccacaggtgtcaagctctcataaccctacatcaacagaagaacaacagttatattgggccaaagggactggctttggagcaggctctacagcttctgggtgggatgtggaacaagccttaactaagcaaaggctggaagaggaacatgttacctgccttctgcaggttcttgccagttacataaatcccgtcagtagtgcggtaaatggagaagctcagtcatctcatgagactagagggcagaacagtaatgcccttccttctgtacttctcgagcttctcagtcagtcctgcctcatcccagccatgtcatcttatctacgaaatgattcagttctggacatggcaagacatgtgccactctatcgggcactgctggaattgcttcgggccattgcttcttgtgctgccatggtgcccctattgttgcccctttctacagagaacggtgaagaggaagaagaacagtcagaatgtcaaacttctgttggtacattgttagccaaaatgaagacctgtgttgatacctataccaaccgtttaagggcagtgatcacaaccagattcaacgtatgcacaaagcagcggataccatggtagcggccgtcgctgattgcttttaccatgttggatccattgtcagtctcaaagacctacttccagctaggtgccttgaactcaaatagcttttcacacagacttcaggatgtgagctaagatctaaaagggaaaatgttaaaacaggagtaaaaccagatgcgtctgatcaagaaccagaaggacttactcttttggtaccagacatccaaaagactgctgagatagtttatgcagccaccaccagtttgcggcaagcaaatcaggaaaaaaaactgggtgaatactccaagaaggcggctatgaaacccaaacctttgtcagtattaaagtcacttgaagaaaaatatgtggctgttatgaagaaattacagtttgatacgtttgaaatggtttctgaagatgaagatgggaaattgggatttaaagtaaattaccactacatgtctcaggtgaaaaatgctaatgatgcgaacagtgctgccagagctcgccgccttgcccaggaagctgtgacgctttcaacctcactgcctctgtcttcatcctctagtgtgtttgtacgctgtgatgaggagcgacttgatatcatgaaggttctaataactggtccagcggacaccccttatgcaaatggctgctttgagtttgatgtgtattttcctcaagattatcccagttcaccccctcttgtgaatctagagacaactggtggtcatagcgtgcgattcaatccaaacctttataatgatggcaaggtttgtttaagcatcttaaacacgtggcatggaagaccagaagagaagtggaatcctcagacctcaagctttttgcaagtgttggtgtctgtccagtcccttatattagtagctgagccttattttaatgaaccgggatatgaacggtctagaggcactcccagtggcacacagagttctcgagaatatgatggaaacattcgacaagcaacagttaagtgggcaatgctagaacaaatcagaaacccttcaccatgttttaaagaggtaatacacaaacatttttacttgaaaagagttgagataatggcccaatgtgaagagtggattgcggatatccagcagtacagcagtgataagcgggtaggcaggactatgtctcaccatgcagcagctctcaagcgtcacattgctcagctccgcgaagagttgctgaaacttccctgccctgaaggcttggatcctgacactgacgatgccccagaggtgtgcagagccacaacaggtgctgaggagactctaatgcatgatcaggttaaacccagcagcagcaaagaactccccagtgacttccagttatgagctgcattgatgtggacttcatagacacaaaggcttcgaagcacaagccaaatatgtcaatatttgtatgtaagaagctaattatgtaataggtaatgaaactgaaactatactatgcccttaaggagatccagtttaattcaaggtgatcttttatttacctgtacaggagtgtaaacttttttgtgcttttatttttcaattgtgagaaccactgattggtatgttcaacaaatttgtgtatacaaagaaatggataaatcactgctatataagggaaactaccttaggaaagaatgtttactgaatgtttattttatttttttttttttttactatagagtgaggggttgttaacaaagaatatatattggtcattcttacaactactatttaaagtcagcaacttttcacagaatttgatagattttatgtttggccatatcttcatgctcacatttgatttctgaagacctcctacatacacttcaataaaagttaaatggacatactccctctttttttgatttactggtacatttttaaaataataaatctgccataaaatgcattatatctggagacttgcacttgtatggatgaatttattacattcaacatatttaattttatgccttctaattctaagatgcagaaaaaaataaatgaacatgattttattctatgccaacatttgggcctctgaatgtatctgttatttgaatttaagtatttgaaaaggaatggtcaatttgaaagtcattctaaactgattttttttttctaaagggctccttttttcctggactatgtggttttatgactaaagtcacatgtatgtattaaacattgaggctctgtagaggagagaggatgtacctctctggtgctgttacagtacattctgtacctgccatacaggctcattttcatgcaaattcttcctagagccaaataaataaagacttaggtg

SEQ ID NO: 18122 - protein, 489 aa, Homo sapiens [sequence omitted]
